United States Patent Application Publication US 2011/0296543 A1 - sequence listing, part 6

SEQ ID NO: 24797 - DNA, 1017 bp, Unknown
  Obtained from environmental sample
  misc_feature (1)..(1017): n is a, c, g, or t
ttgggggcgaaggttagctcgtcgcataaagaaattctaaattgcgctgatatcgatcttgttagtatcagctctcctcctttctgtcacgcggaaatcgccgttgattttcttaacgctggaaaaaacgtacttgttgaaaagccgatggcggcgtcgcttgaagagtgcgacacaattattgccgcgacaaaaaagagcggcaaattgctttcggtagtagcccaaaaccgttttaccgatccaatcaccggtctaaaaaaagttttggattctgaactaatcggaaaaattgttcacgcgcaaattgaatccctttggtggcgcggccattcctattacgatctgtggtggagaggcacatgggaaaaagaaggcggaggctgtacattgaaccacgctgtacatcatattgacatgctgtgctggatgcttggactaccaaagaaagtcagcgccgttatcagtaacgcgtcccatgacaacgccgaagtggaagatatatcagtcgcggtactgcaatacgacggcgggctttgctcgaaaggagctttggcgcaggtaacaagctccgttatccaccacggcgaggaacagcagcttgtttttcagggagagaaagcgcgtgtttcggctccgtggagagtttcagccaatatcgcgcagcctaacggttttcccgtcttncaacaacaaaatgaagaactaatatcaaaactgaataatttttacgactcgctgccaaaacttacacatactttacacacggggcaaattgacgatgtattgacagcgcttgaaaccggaggcaagccattgattgacggcggagacggcaggcgcacaatagagcttatctccgctatttacaaggccggaactgaacaatgcgcagcggaaatgccaatgcaaaaaggcgatcccttttacacggtcaagggtatcatggatagagtgccgcatttctatgagaagaccatctctgtaaacgatcaaggcggaaaaataacattttaa

SEQ ID NO: 24798 - protein, 338 aa, Unknown
  Obtained from environmental sample
  DOMAIN (2)...(75): Oxidoreductase family, NAD-binding Rossmann fold
  misc_feature (1)..(338): Xaa is any amino acid
MGAKVSSSHKEILNCADIDLVSISSPPFCHAEIAVDFLNAGKNVLVEKPMAASLEECDTIIAATKKSGKLLSVVAQNRFTDPITGLKKVLDSELIGKIVHAQIESLWWRGHSYYDLWWRGTWEKEGGGCTLNHAVHHIDMLCWMLGLPKKVSAVISNASHDNAEVEDISVAVLQYDGGLCSKGALAQVTSSVIHHGEEQQLVFQGEKARVSAPWRVSANIAQPNGFPVXQQQNEELISKLNNFYDSLPKLTHTLHTGQIDDVLTALETGGKPLIDGGDGRRTIELISAIYKAGTEQCAAEMPMQKGDPFYTVKGIMDRVPHFYEKTISVNDQGGKITF

SEQ ID NO: 24799 - DNA, 852 bp, Unknown
  Obtained from environmental sample
  misc_feature (1)..(852): n is a, c, g, or t
ttggcattcagccgcctgacccctcatggggcaggatgctctacgaatcgcaaacatggtttttcaacgccccgtggtgcgcccttgctcccggtatttttattatgcttacggttatcgcttttcacatgctcggcgaaggccttaggcgcaggttcgggggataatatggcgcgcctgcttgaagtacgcaatcttcagattgccctgaaaaaagaacagaaaaccattaacgccgtggataatgtcagctttacagttgatgaaggagaaattgtcggacttgcgggcgagacaggctgcggcaaaactctgaccgcgctttcaattgccggtcttttgccgcagaaagcgaagattacaggcggagaaattatttttaatgacaaaaatttagtctctttaaacgaaaaagattactgcagtatacgcggaaaagaaatttcgatgatttttcaggaggtaaggcagtccttaaatcctcttataaaagtcggcaggcaaatccgtgaaactctggaacttaaccaaaacgctgatgattccgcaaaaaaaagctataaaaggcgcacggtccagacgcttttccgtcttgggtttgaagaaccaaaaaaaatatataacgcgtatccgcaccagctttcaggcggtatgtgccagcttataatggccgccatcgccgcgattaagaatcctcgcctgctgttagccgacgagccttccagttctctcgacgcgagtgcgcaggagcgcatactttcccttcttgtggaaatgaacagggaacataaaaccgccgtattgattatatcgcacgatctttccgtaatacgctcctctcggccgatctga

SEQ ID NO: 24800 - protein, 283 aa, Unknown
  Obtained from environmental sample
  DOMAIN (90)...(279): ABC transporter
  misc_feature (1)..(283): Xaa is any amino acid
MAFSRLTPHGAGCSTNRKHGFSTPRGAPLLPVFLLCLRLSLFTCSAKALGAGSGDNMARLLEVRNLQIALKKEQKTINAVDNVSFTVDEGEIVGLAGETGCGKTLTALSIAGLLPQKAKITGGEIIFNDKNLVSLNEKDYCSIRGKEISMIFQEVRQSLNPLIKVGRQIRETLELNQNADDSAKKSYKRRTVQTLFRLGFEEPKKIYNAYPHQLSGGMCQLIMAAIAAIKNPRLLLADEPSSSLDASAQERILSLLVEMNREHKTAVLIISHDLSVIRSSRPI

SEQ ID NO: 24801 - DNA, 813 bp, Unknown
  Obtained from environmental sample
  misc_feature (1)..(813): n is a, c, g, or t
ttgataaaagtccgctcgaccatgggctctttggttcccttgagcgcttttgccaaattggagatcaataatacagccctgtctataagccaccaaggaacctgccccgccactacgatatctttcaacatcgcccagggttacgcgctgggcgacgcggtcagcgccatccagaaggcgcaggacgaaatgatgatgcccggctccatcagaggcacattcatgggcacggccagggcattccaagattcgcttgccaaccagccattcctcatagccgccgcactgctcactgtctatatcgtgcttggcatgctgtacgaaagcctcatacacccactgaccatactgtcggcgctgccatctgcgggcgtgggagcgttgttggcccttatcatctttaagaccgaactcagcgtcatagccctcataggcataattttgctgatagggatagtcaagaaaaacgccatattgatggttgactttgccctggctgccgagagaggcgaacaaaagtcgccagaacacgccatattcaaagccgcgctgctgcgcttccgcccgatcatcatgacgactaccgccgctctgctcggtgggctgccgctggctcttggtcagggcacgggttcggagttccgccgcccaatggggctggccatagtaggcggcctgctgatcagccagctgctgacgctctacaccaccccagtcgtgtttctctacatgtccagactaaaggctaggtgggccagagcgcatcgcaaggccccggagctggaagcccgtgggcatgcttcggctatgtag

SEQ ID NO: 24802 - protein, 270 aa, Unknown
  Obtained from environmental sample
  SIGNAL (1)...(18)
  misc_feature (1)..(270): Xaa is any amino acid
MIKVRSTMGSLVPLSAFAKLEINNTALSISHQGTCPATTISFNIAQGYALGDAVSAIQKAQDEMMMPGSIRGTFMGTARAFQDSLANQPFLIAAALLTVYIVLGMLYESLIHPLTILSALPSAGVGALLALIIFKTELSVIALIGIILLIGIVKKNAILMVDFALAAERGEQKSPEHAIFKAALLRFRPIIMTTTAALLGGLPLALGQGTGSEFRRPMGLAIVGGLLISQLLTLYTTPVVFLYMSRLKARWARAHRKAPELEARGHASAM

SEQ ID NO: 24803 - DNA, 1218 bp, Unknown
  Obtained from environmental sample
  misc_feature (1)..(1218): n is a, c, g, or t
ttgaggaaagaaatcgggaaacgggcggtaaactacaaattgagggactggattttcagccgccagcggtactggggcgagccgattcccgtcgtgcattgcagccaatgcggcattgttacggttcctgagagcgagcttccgcttaaactgcctaacgtaaaaacttacgcgccaacgggaacaggcgagtctccgcttgcgggtatagacgaatgggtgaatactacctgtcccaaatgcggcgggaaggcgaagcgcgagacaaacactatgcctcagtgggcgggttcttgctggtactacatccgctacctcgaccccaagaacagcaaggaatttgccgccaaggataaaatcaactattggctgcctgtagatttatatgtcgggggagcggaacacgccgtgcttcatcttctgtacagccgcttttggcacaaggttctctacgatctcggtcttgtgaataccgtcgagccgtttcagcggttgatcaatcagggaatgattctaggtgaggacaatcagaaaatgagtaagagccggggtaatgtaattaatcccgatgatgtgattaaagaatacggaacagactcgcttcgtctttacgaaatgtttatggggcctctggaagtcagtaagccgtggaatatgtcgggtgtttccggcgtgtcccgttttctggaaaggctttgggcgattggcgaaaaacctctgtgcgacgcggaaccgggaagcgaagaagcgggcggcgccgctttgcaaaaacttttgcaccgttccataaaaaaaattacccacgatacaggcaatctctgttttaatacggctataagccagatgatgatctactccgcagaacttgcgaaacttgcggaaattccgcgtttaatgtggcagccgcttgttataatggcaagcgcttacgctccgcaccttggcgaagagctttgggaaaaactgggtaacaaaaatactgtttccgcctgtcagtggccgatttttgatgatgcgcttacgcatgatgacgaggtaaatatcgtggttcaggtaaacggaaaaattcgcgacaaatttagcgcttctgtcggaacatcaaaagatgaattggaaaaaactgcattttctttgcccgatgtaaaaaaatggcttgacgggcaaatagttaaaaaagtaattgtcgtgcctgacaaattagttaatattgtgatataa

SEQ ID NO: 24804 - protein, 405 aa, Unknown
  Obtained from environmental sample
  DOMAIN (252)...(376): Anticodon-binding domain
  misc_feature (1)..(405): Xaa is any amino acid
MRKEIGKRAVNYKLRDWIFSRQRYWGEPIPVVHCSQCGIVTVPESELPLKLPNVKTYAPTGTGESPLAGIDEWVNTTCPKCGGKAKRETNTMPQWAGSCWYYIRYLDPKNSKEFAAKDKINYWLPVDLYVGGAEHAVLHLLYSRFWHKVLYDLGLVNTVEPFQRLINQGMILGEDNQKMSKSRGNVINPDDVIKEYGTDSLRLYEMFMGPLEVSKPWNMSGVSGVSRFLERLWAIGEKPLCDAEPGSEEAGGAALQKLLHRSIKKITHDTGNLCFNTAISQMMIYSAELAKLAEIPRLMWQPLVIMASAYAPHLGEELWEKLGNKNTVSACQWPIFDDALTHDDEVNIVVQVNGKIRDKFSASVGTSKDELEKTAFSLPDVKKWLDGQIVKKVIVVPDKLVNIVI

SEQ ID NO: 24805 - DNA, 609 bp, Unknown
  Obtained from environmental sample
  misc_feature (1)..(609): n is a, c, g, or t
ttgcgccttaaggaatacggatcgttagcggtaatttttgatattgagtttatcgaccgcggccctcagggagtagacactatatatttgaatcagggacttggaagtgattttgaccgcagcttttcagaaataggcgcggcggcgaaagatattttttcagctatcagtgcaggacgcatggggcgtaatgatattgagtatttgtcagattcatttatagacataataaacaccgaacgaaaaaacctttattcaagagcgcagggcgtcgcccgcgataacgatctctatctggctcaggctattgcgctcaataacaacggctggtcaacccttaatctaagggcagttcctcttgacggcgagcaggcggagcgccgtcaggttgcggaagagctttttgcgtatcctgtaaaggccgcagatgacgcaagccacggaggcggttttactgatatactgacgtccctgcccctgcttgccaaagccgcaaagggagccggatatacaaatgtcgaaattgacaatgacggcgtcaggcggcgcgtgtatctgacgcagaaattcatgatcactggtatcttcagctttcttttgcccctttga

SEQ ID NO: 24806 - protein, 202 aa, Unknown
  Obtained from environmental sample
  misc_feature (1)..(202): Xaa is any amino acid
MRLKEYGSLAVIFDIEFIDRGPQGVDTIYLNQGLGSDFDRSFSEIGAAAKDIFSAISAGRMGRNDIEYLSDSFIDIINTERKNLYSRAQGVARDNDLYLAQAIALNNNGWSTLNLRAVPLDGEQAERRQVAEELFAYPVKAADDASHGGGFTDILTSLPLLAKAAKGAGYTNVEIDNDGVRRRVYLTQKFMITGIFSFLLPL

SEQ ID NO: 24807 - DNA, 1179 bp, Unknown
  Obtained from environmental sample
  misc_feature (1)..(1179): n is a, c, g, or t
atggcccttcagcggcttagggaagcttcggaaaaggcaaagagggaactttcttctacccagaccacagaaatcaacctgccctttatcactgccgaccagaatggccccaagcatcttcaaaagagccttacccgtgcgaaattcgagcaactggtgtcggatcttctggagaaaaccaaggagccatgccgaaaagcccttgctgacgcgcagctttcggaggatcaaattgacgaggtgatccttgtcggcggttctaccagaatccctgctgtacaggcgattgtaaaggatctctttaagaaagagcccaacaaaggcgtcaaccccgacgaggcagtcgccgtgggggccgccattcagggcggtatcctgggcggcgacgtaaaggacgtgctgctgctggacgttacgccgctttcactgggcattgagaccattggcggcgtgatgacgcggcttattccccggaacaccaccatccccaccaggaaaagccagattttctccaccgccgctgacggacagaccgcagtttcaatccaggtgcttcagggcgaaagggagatggccgcccagaaccgtacattgggcaggtttgacctggtcggtatcccgcccgctccaaggggaattccgcagatagaagtgacctttgatattgacgcgaacggcatcgtccatgtttccgctaaagaccttggtaccggcaaggagcagaagatccgcatagaaagctcttccggcctttcggacaacgaaatcgaccgcatggtaaaagaagcggaactacacgcggaagaagacaaacgggaaagggaaagggctgaagtccggaatgatgctgacaacatgatctactccaccgagaagaacatcaaagagctgggagacaagataaacgccgcggataaagccaaggtcgaggaagcgatagcgaatctgcgcaaggctctggaaggaggcgacatcgaaaatattaaatccaagaccgaggccttaaagcaggtttcttacaagatagccgaggaagtttacaagcagactggtgcgcagcaaggcggcaatgcgtccggcccatccggcggcccttcgagcggtagcagtaccggagccgggaataacaccaaaggcgccgaagacgcggactatgaagtagtggatgacgataagtaa

SEQ ID NO: 24808 - protein, 392 aa, Unknown
  Obtained from environmental sample
  DOMAIN (1)...(348): Hsp70 protein
  misc_feature (1)..(392): Xaa is any amino acid
MALQRLREASEKAKRELSSTQTTEINLPFITADQNGPKHLQKSLTRAKFEQLVSDLLEKTKEPCRKALADAQLSEDQIDEVILVGGSTRIPAVQAIVKDLFKKEPNKGVNPDEAVAVGAAIQGGILGGDVKDVLLLDVTPLSLGIETIGGVMTRLIPRNTTIPTRKSQIFSTAADGQTAVSIQVLQGEREMAAQNRTLGRFDLVGIPPAPRGIPQIEVTFDIDANGIVHVSAKDLGTGKEQKIRIESSSGLSDNEIDRMVKEAELHAEEDKRERERAEVRNDADNMIYSTEKNIKELGDKINAADKAKVEEAIANLRKALEGGDIENIKSKTEALKQVSYKIAEEVYKQTGAQQGGNASGPSGGPSSGSSTGAGNNTKGAEDADYEVVDDDK

SEQ ID NO: 24809 - DNA, 303 bp, Unknown
  Obtained from environmental sample
  misc_feature (1)..(303): n is a, c, g, or t
atgttgtcagcatcattccggacttcagccctttccctttcccgtttgtcttcttccgcgtgtagttccgcttcttttaccatgcggtcgatttcgttgtccgaaaggccggaagagctttctatgcggatcttctgctccttgccggtaccaaggtctttagcggaaacatggacgatgccgttcgcgtcaatatcaaaggtcacttctatctgcggaattccccttggagcgggcgggataccgaccaggtcaaacctgcccaatgtacggttctgggcggccatctccctttcgccctga

SEQ ID NO: 24810 - protein, 100 aa, Unknown
  Obtained from environmental sample
  SIGNAL (1)...(23)
  misc_feature (1)..(100): Xaa is any amino acid
MLSASFRTSALSLSRLSSSACSSASFTMRSISLSERPEELSMRIFCSLPVPRSLAETWTMPFASISKVTSICGIPLGAGGIPTRSNLPNVRFWAAISLSP

SEQ ID NO: 24811 - DNA, 516 bp, Unknown
  Obtained from environmental sample
  misc_feature (1)..(516): n is a, c, g, or t
ttgggacacgacggttctccgttgacgcggacgttaattgaatccggttttggagaggatattacgcctgtctccgggcttgagggcgaaataagggaaacattatttgtagtcggcttgaaaggcgtaagcggcgatttacagcaaatgagtcaaaagattgaaaaacttatcatggacgagctgaacaggcttgttaccgaaggcataccgccgcaagagacagaagcggctgttttatcaatggaattttctcagcgggaaatccgccggtcgggaggaccgttttcccttgtttggatgcgccgttccctgcgttcatggctgcacggctgtaagccgtgggaaagcctgcttcttctgccgtcaatggcaaaaataaaagaaaaccttgccgccgacaatcgctattttgaaaaacttataaaaaaatattttctggataacccgcaccgcgcccttgtcattcttgaaccaaaggaagattttttacagaagcaggaaaaagacttttaa

SEQ ID NO: 24812 - protein, 171 aa, Unknown
  Obtained from environmental sample
  misc_feature (1)..(171): Xaa is any amino acid
MGHDGSPLTRTLIESGFGEDITPVSGLEGEIRETLFVVGLKGVSGDLQQMSQKIEKLIMDELNRLVTEGIPPQETEAAVLSMEFSQREIRRSGGPFSLVWMRRSLRSWLHGCKPWESLLLLPSMAKIKENLAADNRYFEKLIKKYFLDNPHRALVILEPKEDFLQKQEKDF

SEQ ID NO: 24813 - DNA, 906 bp, Unknown
  Obtained from environmental sample
  misc_feature (1)..(906): n is a, c, g, or t
atgatcgctgttggcgttggtggcgcagatgctgtggatgcaatggtaagtttgccctgggaattgaaatatccacgcataataggcgttaaattgcgcggttctttgaacggctttgcaagccctanagatgtgattttgaaattggcaggaatgttaaaggtttcgggtggaacagattccataatagaatattttggcgaaggagcaaaaacgctctctgcaacaggaaaaggaactatttgcaatatgggtgcagaaattggtgctacttgcagcatttttggctttgattcctctatggaaagatatttgcgagcaacagacagagcagaaattgcagatgccgctaaaaaaataatttcttatttgcgttgcgatgcagaggttgaagttgaaccggaaaaatattttgacaaggttatagaaattgatttaagcacattaaaaccgcattacaatggtccctttagtccagaccgttcttttgcaattggtgaaatggaaaaatctctggaagaatttgaaagtccatcggagataagtgcggctttagtaggcagttgcaccaattcaagctacgaagacctagccagagccgcttccattatcaaagatgcacaagcaaaaggtataaaacccaaagttccgctttacataaacccaggttccgaagcggtgcgagcaacagcggaaagagatggcattttgcgtacattcatggattttggtgcaacggtatttgccaacgcttgcggcccttgcattggaatgtgggcgagaaatgacgtaaaaaaaggtcaaaaaaacagcattgttcattcattcaaccgcaattcaccggcagagccgatggcaatgagcaaacccacgcatttgtggcaagcccggaaatggcggttatag

SEQ ID NO: 24814 - protein, 301 aa, Unknown
  Obtained from environmental sample
  DOMAIN (1)...(291): Aconitase family (aconitate hydratase)
  misc_feature (1)..(301): Xaa is any amino acid
MIAVGVGGADAVDAMVSLPWELKYPRIIGVKLRGSLNGFASPXDVILKLAGMLKVSGGTDSIIEYFGEGAKTLSATGKGTICNMGAEIGATCSIFGFDSSMERYLRATDRAEIADAAKKIISYLRCDAEVEVEPEKYFDKVIEIDLSTLKPHYNGPFSPDRSFAIGEMEKSLEEFESPSEISAALVGSCTNSSYEDLARAASIIKDAQAKGIKPKVPLYINPGSEAVRATAERDGILRTFMDFGATVFANACGPCIGMWARNDVKKGQKNSIVHSFNRNSPAEPMAMSKPTHLWQARKWRL

SEQ ID NO: 24815 - DNA, 1050 bp, Unknown
  Obtained from environmental sample
  misc_feature (1)..(1050): n is a, c, g, or t
atgatactgagaaaattcgatcccaactttaccgaaaggccgttttcgagtgacccgaaattttctcctgccaaggtggggttgatggttaaagagttaagcgagtttttggcagtctcccaagttattaccccggaaaacgactggaaaaccctgttaaaactgctcagaatctgcgccggggatgagatgatttctgacagccagtttgcccagatgctgatggggctgcgggatgtagtcaattccaaaatcctcgaattgatagttcagttgggaatcaggaatccggtatgggcctgcaggccgaaaattcccgatgagcgtatcgcggactcctggctggaggttagaattgtaaaagcgcaggagtgtattgacaggatcagcaacgccgagaaaaacaagcaaattaacgtattgctcaaggaaattttttacggcggcgatcttacacatttggaaaactatacgcccgcaaagagcgactatttccgtaatagggaattagcctattatacttacgcggaagggctgaattatctggcggtttttctgaacgagtatattcaaaaagacatacgcgaactgtttgatatattgcttatccgggggcaatggacaaataacaccgattcaaaggaattatcggaagaattccaccagttgctggaactgcccgaacttatctccaagctggacgactcccttaccgatgaaggctcgaatggttcccggctgaaagcttctcttgtacgcatagaaagggatcccggtcaggcgcgttatatagagagtattattgacagtatcaacgaagaggcgctggacatcattaacaaagccacccagcattttaccgtcatagaaaaacatctgagaaacctgacggacgatatgcagaagaagcatcccgagttgatcataaactggaaagaattgggcaatgtctcaaaaaatcccctgtttgaggtgatggcggagaatcaccggaggatcaactgttttgtccagttgatgcggctctgcgcctcaataattccgatatag

SEQ ID NO: 24816 - protein, 349 aa, Unknown
  Obtained from environmental sample
  misc_feature (1)..(349): Xaa is any amino acid
MILRKFDPNFTERPFSSDPKFSPAKVGLMVKELSEFLAVSQVITPENDWKTLLKLLRICAGDEMISDSQFAQMLMGLRDVVNSKILELIVQLGIRNPVWACRPKIPDERIADSWLEVRIVKAQECIDRISNAEKNKQINVLLKEIFYGGDLTHLENYTPAKSDYFRNRELAYYTYAEGLNYLAVFLNEYIQKDIRELFDILLIRGQWTNNTDSKELSEEFHQLLELPELISKLDDSLTDEGSNGSRLKASLVRIERDPGQARYIESIIDSINEEALDIINKATQHFTVIEKHLRNLTDDMQKKHPELIINWKELGNVSKNPLFEVMAENHRRINCFVQLMRLCASIIPI

SEQ ID NO: 24817 - DNA, 339 bp, Unknown
  Obtained from environmental sample
  misc_feature (1)..(339): n is a, c, g, or t
ttgtctattatttatacaaatggggaacctcaacctagcccgccgggcgaaggttccacttccagggaattatttggtcagttctataattatttacacggaaaaccttgccaggtgttttacgtgcctgttgatgtcaggctgttttatgaggaagatggaagcgacgacacggtggttcagcctgatattatagttatttgtgacaaagataaaatagcggaagagagctgccatggggctcccgatctggtgatagagatattgtcgccctcaaacaccgctactgaaatggaaagaaaatttttattgcacagggaagccggtgtccgggaataa

SEQ ID NO: 24818 - protein, 112 aa, Unknown
  Obtained from environmental sample
  DOMAIN (17)...(112): Protein of unknown function (DUF820)
  misc_feature (1)..(112): Xaa is any amino acid
MSIIYTNGEPQPSPPGEGSTSRELFGQFYNYLHGKPCQVFYVPVDVRLFYEEDGSDDTVVQPDIIVICDKDKIAEESCHGAPDLVIEILSPSNTATEMERKFLLHREAGVRE

SEQ ID NO: 24819 - DNA, 564 bp, Unknown
  Obtained from environmental sample
  misc_feature (1)..(564): n is a, c, g, or t
atgaaaatatttcaaatagtgactctttctgaattaggaggcgcgcagtcagtagtagttaatttatccaacgctctctcaaatgttcatgaagttatcgttatagcgggagaaggcgatgggaaaatgtttgatatgcttaattcgagagtaaaatatattaaaaataattatttaaaaaaaaacatttctattattaatgatatctgtgttcttttctcattcttaaagttatataataaatataaacccgatataattcatcttcattcttcaaaagccggaatattgggacgtttaatttttcctaaaaagaaaacagtatatactgtacatggctttgattctattcgtttggcatatagaaaatatttacctatagaaaaattacttcagaataaatgtaaggctatagttgccgtcagtcgctatgatgagaataatcttaaagctgaacatataacaaataacgtaaaatgtgtttataatggctgtaagaaggtttctgatacaattgaaccaatttatattcctcaaaaatttataaaaaaagttattgtatag

SEQ ID NO: 24820 - protein, 187 aa, Unknown
  Obtained from environmental sample
  misc_feature (1)..(187): Xaa is any amino acid
MKIFQIVTLSELGGAQSVVVNLSNALSNVHEVIVIAGEGDGKMFDMLNSRVKYIKNNYLKKNISIINDICVLFSFLKLYNKYKPDIIHLHSSKAGILGRLIFPKKKTVYTVHGFDSIRLAYRKYLPIEKLLQNKCKAIVAVSRYDENNLKAEHITNNVKCVYNGCKKVSDTIEPIYIPQKFIKKVIV

SEQ ID NO: 24821 - DNA, 714 bp, Unknown
  Obtained from environmental sample
  misc_feature (1)..(714): n is a, c, g, or t
atggctcaagaaacaaattattcaatcattattccgcataagaatattcccgaattattaaaacgctgtcttgattcaattccgcgtagaaaagatgttcaaataattattgttgatgacaatagtgattcagacagagtagactttaaacattttcccggtttaggagaaccaagtgttgaaattatttttgcaaaagatgggaaaggagcgggatatgcaagaaatgttgggctgtcaaaagcaaatgggaattggctattgtttgcggatgctgatgattattttaccgatggttttttagaatgcctggataaatacaaagattcaaattatgaattaatctattttggaataaacggggtaaatcttaaaaaaagaaatgaaaattccagtagtttaaaatttaaaaaattaatcagaaaagcaataaaaaacaaaaaacatgacatatataaatattcaatatatgttccatggggaaaaataataaaatcatctttagtaaaagataatgccattttttttgatgaaataatggtaattgaagatgtaatgttttcagtaaaaacagcatattatgccgaaaatgttttttttgatgaacataatatatatgtttatgaaataagatcaggttcattaacaactataagaacatggaagcaagatttgaccagttttgtgtatatatacgcctntatgcttttctga

SEQ ID NO: 24822 - protein, 237 aa, Unknown
  Obtained from environmental sample
  DOMAIN (8)...(173): Glycosyl transferase family 2
  misc_feature (1)..(237): Xaa is any amino acid
MAQETNYSIIIPHKNIPELLKRCLDSIPRRKDVQIIIVDDNSDSDRVDFKHFPGLGEPSVEIIFAKDGKGAGYARNVGLSKANGNWLLFADADDYFTDGFLECLDKYKDSNYELIYFGINGVNLKKRNENSSSLKFKKLIRKAIKNKKHDIYKYSIYVPWGKIIKSSLVKDNAIFFDEIMVIEDVMFSVKTAYYAENVFFDEHNIYVYEIRSGSLTTIRTWKQDLTSFVYIYAXMLF

SEQ ID NO: 24823 - DNA, 969 bp, Unknown
  Obtained from environmental sample
  misc_feature (1)..(969): n is a, c, g, or t
atgtccaacccatatataggtaccagaccacttttaagtggtctggcggagaaatctatttcaggaggacattttatggaaaatgttaacagaaaccacaagaacagcgtattttcttcgctgttcagcaccccggacgttctaagagaactctactcggctattgagggcatccctataccgccggatatacccatcgatattaatacgctgacagacatactttacaaaggacaaattaatgatgtgtcttttgttattaacaatcgccttgtcgtgttgattgaacatcagtctacaattaacgctaacataccgctacgtcttttaatgtatattgcccgtgtatatgaaaaaattatcaacagaaaaaaactgtatcagtccaaacttgaaaaaatccctttacctgagtttatagttctttacaacggagaaaaagaatactctgatttccaagaactaaaactttctgacgctttcaaagatattgatgggctgaaattatcaggtattgaaaagataccgctggaattgattgtacaagtatacaacataaaccacgggcataatccggaaatactgaaaagaagcgaaacattggacagttacagtatttttataaacaagatacgggaatatcagaaagaaaaagattcacttgaaaaagcggctagatctgcgataatatactgtataaagaacaatatactaaaagattatttagaagctcacgcttcggaggtattaaatatgctgttgacggaatggaatcaagatgaagcggtagaagttgcccgcgaagaaggacgcgaagaaggcagagaagaaggacatgaaaatggtctcaaagaaggcaagatgataatcgcgaaaaatttgcttgaaaaaggctctacgccagaatttgtgcgtgagattaccggactgtctccggaagaaattgaagaaatagagctaaatgattag

SEQ ID NO: 24824 - protein, 322 aa, Unknown
  Obtained from environmental sample
  DOMAIN (26)...(298): Putative transposase, YhgA-like
  misc_feature (1)..(322): Xaa is any amino acid
MSNPYIGTRPLLSGLAEKSISGGHFMENVNRNHKNSVFSSLFSTPDVLRELYSAIEGIPIPPDIPIDINTLTDILYKGQINDVSFVINNRLVVLIEHQSTINANIPLRLLMYIARVYEKIINRKKLYQSKLEKIPLPEFIVLYNGEKEYSDFQELKLSDAFKDIDGLKLSGIEKIPLELIVQVYNINHGHNPEILKRSETLDSYSIFINKIREYQKEKDSLEKAARSAIIYCIKNNILKDYLEAHASEVLNMLLTEWNQDEAVEVAREEGREEGREEGHENGLKEGKMIIAKNLLEKGSTPEFVREITGLSPEEIEEIELND

SEQ ID NO: 24825 - DNA, 1011 bp, Unknown
  Obtained from environmental sample
  misc_feature (1)..(1011): n is a, c, g, or t
gtgctgcccccgcacgaagcggaagccagcctcgccttgcccggttccctcatcgtcttcgaccacggctacaaccgcatcacccgcctcgaactgctcctggacggtcagacggtacaagccctgccggccgtgcgcgccccggaaggccggcctcccgcagccgccccccccctggcggaacaagaggactacacacgggccgccatgcaggtcaaagaactgatccgccaaggagaagccattcaggtggtgctttccgtgcccttcagcgcgcccctggcggaaagtcccttcagcctgtatcggcggctgcgccggatcaatccctcgccgtacatgttttacatgcgcctgccggatgccggggccggagtcgtgctgggcgcttcgccggaagtgctcgtcacctgcgaggccgaccacctgcgcctgtgccccatcgccggcacccggccgcgcagcctcaagcccgaggaagacatcctgttcggcgatgaattgcagcaagaccccaaggaaaaggccgaacacgtcatgctggtggacctcggacgcaacgatctcggacgcatcgcccggcccggcagcgtccagctcgaacgtttcatggaagtggagcgcttctcccatgtcatgcacctgacctcgcgcatccacgcccgactcgcccccggcctggacgcgctggacgtgctcgcggcgaccttcccggcaggtacggtgagcggcgcgcccaaggtgcgggccatggagatcatcgcggaagaagagcgcggcccgcgcggcccctacgccggcgccgtgggatggattggcctcgacaaggacgccgttcacctggatttcgggatcaccatccgcagcctctgggtgcgcggcgggcgcgtgtactggcaagccggggcgggcatcgtgcatgactccgtgccggaaaaggaatggacggaatgctgcgccaaggccgccgtcatcaggcaggtggtgctgggcgaagacgcgccgctctga

SEQ ID NO: 24826 - protein, 336 aa, Unknown
  Obtained from environmental sample
  DOMAIN (61)...(328): chorismate binding enzyme
  misc_feature (1)..(336): Xaa is any amino acid
MLPPHEAEASLALPGSLIVFDHGYNRITRLELLLDGQTVQALPAVRAPEGRPPAAAPPLAEQEDYTRAAMQVKELIRQGEAIQVVLSVPFSAPLAESPFSLYRRLRRINPSPYMFYMRLPDAGAGVVLGASPEVLVTCEADHLRLCPIAGTRPRSLKPEEDILFGDELQQDPKEKAEHVMLVDLGRNDLGRIARPGSVQLERFMEVERFSHVMHLTSRIHARLAPGLDALDVLAATFPAGTVSGAPKVRAMEIIAEEERGPRGPYAGAVGWIGLDKDAVHLDFGITIRSLWVRGGRVYWQAGAGIVHDSVPEKEWTECCAKAAVIRQVVLGEDAPL

SEQ ID NO: 24827 - DNA, 417 bp, Unknown
  Obtained from environmental sample
  misc_feature (1)..(417): n is a, c, g, or t
atgatctccatggcccgcaccttgggcgcgccgctcaccgtacctgccgggaaggtcgccgcgagcacgtccagcgcgtccaggccgggggcgagtcgggcgtggatgcgcgaggtcaggtgcatgacatgggagaagcgctccacttccatgaaacgttcgagctggacgctgccgggccgggcgatgcgtccgagatcgttgcgtccgaggtccaccagcatgacgtgttcggccttttccttggggtcttgctgcaattcatcgccgaacaggatgtcttcctcgggcttgaggctgcgcggccgggtgccggcgatggggcacaggcgcaggtggtcggcctcgcaggtgacgagcacttccggcgaagcgcccagcacgactccggccccggcatccggcaggcgcatgtaa

SEQ ID NO: 24828 - protein, 138 aa, Unknown
  Obtained from environmental sample
  SIGNAL (1)...(21)
  misc_feature (1)..(138): Xaa is any amino acid
MISMARTLGAPLTVPAGKVAASTSSASRPGASRAWMREVRCMTWEKRSTSMKRSSWTLPGRAMRPRSLRPRSTSMTCSAFSLGSCCNSSPNRMSSSGLRLRGRVPAMGHRRRWSASQVTSTSGEAPSTTPAPASGRRM

SEQ ID NO: 24829 - DNA, 762 bp, Unknown
  Obtained from environmental sample
  misc_feature (1)..(762): n is a, c, g, or t
atgatggaagaaaaccctgtcgccgccattgacaacaatgtctttggaaccgagaaccttatcagggcggtcattaaccacggggtaaagcgcttcgtccatataaccacggataaggctgtagaccctgtttccgtatacggcgcgtcaaaactgatatgcgagcagcttgtaatggaggccgccgccgtttcgtccaatttcatggttgtacgcttcggcaatgtgcttggatcgcgcggttccatagtgccgctttttcagaaacaaatagagaagggcgggccggtcaccataacccacccggacatgcaccgctggtttatgaccatccccgaagcctgctccctggtattaaaagccggcggcgtgggcgagaacggaaagctctaccttcttgacatgggcgaaccggtacggatacgcgaccttgccgagcagatgatccgcttttacggttttgagcctgagaccgatataaaaatcgaatatacaggcctgcgcccgggcgagcgccttgacgagcgcctgtggtcggacaatgagatacctcagataactgaatacaaccgcatacttcgcgtggacagaaaaacctcaggcggtatggatcttgccctgttgatggaagaactcaagcccatctgccgcttcgacccgaaccagccccaaaagtaccgtgacagcggcctgttgcgccttgtactggaaagggcaataccgggtattaaaaaaaatgaacaattagcagctaataattaa

SEQ ID NO: 24830 - protein, 253 aa, Unknown
  Obtained from environmental sample
  DOMAIN (1)...(197): Polysaccharide biosynthesis protein
  misc_feature (1)..(253): Xaa is any amino acid
MMEENPVAAIDNNVFGTENLIRAVINHGVKRFVHITTDKAVDPVSVYGASKLICEQLVMEAAAVSSNFMVVRFGNVLGSRGSIVPLFQKQIEKGGPVTITHPDMHRWFMTIPEACSLVLKAGGVGENGKLYLLDMGEPVRIRDLAEQMIRFYGFEPETDIKIEYTGLRPGERLDERLWSDNEIPQITEYNRILRVDRKTSGGMDLALLMEELKPICRFDPNQPQKYRDSGLLRLVLERAIPGIKKNEQLAANN

SEQ ID NO: 24831 - DNA, 660 bp, Unknown
  Obtained from environmental sample
  misc_feature (1)..(660): n is a, c, g, or t
atggaaaaatcaaaacgtctgtacattatcggagcgggatttgccggacgtacccttgcgaacgaaataacatcaaaggcgatttttggcgaagtagtcgcgttcttggacgacgacccggaaaaaataggcaagaaaatcgacggtatccccgtactgggtccaatccgcgacgtagctcttttattaaaaacaaacccggctgacgaagcgataatagccattccaagcgcaagcaaagagtacttaaaagaactctactctatccttaaacaagccaactttcagaaaatcagaatcctccccggaatctcacaaattgtcgaaggagacgcgcactttatccagacgcgctccatagatttacaggacttactcgggcgcaaccccgtaacgataaaacttaaacagagcctttcctatgtgcgcggaaaacgcgttttagtaacgggcgcgggcggctcaatcggcagtgaattatgccgccagttattgtcgggcggagtgtcaaggctgtacctgctggggcacggcgaaaactccatctacctgatcgacaaggaactgcggcttttacaggacgaaggggtcggagaaaaggcggcaatagtgcctgtaatcggggacttaaggacacggattttgttgattacattttaa

SEQ ID NO: 24832 - protein, 219 aa, Unknown
  Obtained from environmental sample
  SIGNAL (1)...(20)
  misc_feature (1)..(219): Xaa is any amino acid
MEKSKRLYIIGAGFAGRTLANEITSKAIFGEVVAFLDDDPEKIGKKIDGIPVLGPIRDVALLLKTNPADEAIIAIPSASKEYLKELYSILKQANFQKIRILPGISQIVEGDAHFIQTRSIDLQDLLGRNPVTIKLKQSLSYVRGKRVLVTGAGGSIGSELCRQLLSGGVSRLYLLGHGENSIYLIDKELRLLQDEGVGEKAAIVPVIGDLRTRILLITF

SEQ ID NO: 24833 - DNA, 528 bp, Unknown
  Obtained from environmental sample
  misc_feature (1)..(528): n is a, c, g, or t
gtgcagaattgggacaaaaccatcgtttccataccggcctacgaatttgtctcgtcctcgtttaaaaactggcgcggcatgagcgagagcggcggcaggcgaataaaacgctccatgcgcttcaagataagcaccatccacatccttaccgatgaggagattgagcgtctgcgcaagataaagctgctggcgccgtacatggagaaaaaacaggcggagatgagcaagttcaacgcggaggagttttccgacagcgacatgacggtattggcaaacggagaacgcctgacgaacataggtttatttagagcgtactgcaacgtatacctgcacaaacatccggggataaaccaaagcatgacgataatcgtgaggcacttggaaccgacggagaccggtctgccgctggaactttatatgttcacaagcgacacgcggtgggaggagtacgagaacgtgcaggcggacatattcgaccacctgctgtcgctggttccggtgttcgggttggagatttatcagaggtag

SEQ ID NO: 24834 - protein, 175 aa, Unknown
  Obtained from environmental sample
  misc_feature (1)..(175): Xaa is any amino acid
MQNWDKTIVSIPAYEFVSSSFKNWRGMSESGGRRIKRSMRFKISTIHILTDEEIERLRKIKLLAPYMEKKQAEMSKFNAEEFSDSDMTVLANGERLTNIGLFRAYCNVYLHKHPGINQSMTIIVRHLEPTETGLPLELYMFTSDTRWEEYENVQADIFDHLLSLVPVFGLEIYQR

SEQ ID NO: 24835 - DNA, 933 bp, Unknown
  Obtained from environmental sample
  misc_feature (1)..(933): n is a, c, g, or t
atgagtattgccctttctttgggcctatacacctcgcacgtgtttattcctcccacacccgggccaatagccgcggctcaaaaccttgggttaggcgatcatctgcttctggttatgggtatgggcgctctgtgttccattcctgcattgataggagcttatttctttagcaagtacataggcaaaaaagtaaaatcaaaggaagacattgatatagacagcgcctcaaagagctatgaggaacttgttaagagtttcgggaaattgcccaatggttttgtttctttggcacccattattatgcctattatcttcatggctttaggttccattgctaccatggctggatggactggtttctttggagatatttggaaattccttggtactccaatcatcgctctggcagcaggcgtattattcgctgtttggcagatcgccgtttccggaaaactgaataaattttatgatattaccaatgatactttgaaggtcgtcggtcccatcctgtttattaccgcggcaggcggagttcttggcagggtaatatcctccaccagcattgttccgtacatcagggaaaatgccgatgctatcgctacggtcggaattttcttccccttcatcctttcggcaattctgaaaaccgcccagggttcttccacggtggcgctggtaactacatcaggaatcgtatatcccctgcttggcgtgttgggactggattccccggccagggcggcgctctgcgtcatggcaatcgccgctggcgcaatgaccgtttcccacgccaatgattcttactactgggttgtaacccactttggcgggatgaccacggatcagggttacaaagcgcaaactttgggcacccttgttcagggtgtctgttncatgattggcgtatttattttctcgctgattttccgctaa

SEQ ID NO: 24836 - protein, 310 aa, Unknown
  Obtained from environmental sample
  DOMAIN (1)...(308): GntP family permease
  misc_feature (1)..(310): Xaa is any amino acid
MSIALSLGLYTSHVFIPPTPGPIAAAQNLGLGDHLLLVMGMGALCSIPALIGAYFFSKYIGKKVKSKEDIDIDSASKSYEELVKSFGKLPNGFVSLAPIIMPIIFMALGSIATMAGWTGFFGDIWKFLGTPIIALAAGVLFAVWQIAVSGKLNKFYDITNDTLKVVGPILFITAAGGVLGRVISSTSIVPYIRENADAIATVGIFFPFILSAILKTAQGSSTVALVTTSGIVYPLLGVLGLDSPARAALCVMAIAAGAMTVSHANDSYYWVVTHFGGMTTDQGYKAQTLGTLVQGVCXMIGVFIFSLIFR

SEQ ID NO: 24837 - DNA, 906 bp, Unknown
  Obtained from environmental sample
  misc_feature (1)..(906): n is a, c, g, or t
gtgaaaatcatgnatggcggttttaattatctttctgatgacgtcaattatcaaggcaattatgcgttcttcaaagttgatttaggcgagttgacattacttgatattaattcaatttcattnaaagcaaacttgacaacaacaaatgaaggaaacaaagattttgtattatgggcaagcaaaacagcgtttgccggctcaccgtggagcggcggtccggaaatacaaaaaacgaaagtagcttatacagcaggaagtacgcttacacttgaaattgatcctgtaaaagttttaactctgaatatcgaagatgaaaacgtagtgtatttagctctcttcttccatttaggcggacacgcggcagtaagcttcgacatcactgatgtttcgcttgtaaaagtaactacgccatttgtgcccatagtgatcaatactacactgagtttacgcgaaccagttgacggagaaacacccgcgacagctattaccggaacaggatataccggagcagttacatgggtagagactacaggtagtgtccctgttaccggtaattttgaagcaggaaaaggctatactgcgactatcgttttgacaaagaaaaacggatacacctttaacgggattgcggctaacagttttgtagtcggagatgcaaccgtaacccatgcagcaggtacttcttcagatgctactttaacagttacagctgtattcgctgctgctacagcggctataccggaaaaagtggtctcttttactgccggcgatacaactaccggatttgctgttgttgacgccacaatcaaagcagtaactgctaccggatttaacattgatcatacatctggttatggagacttcggagctttcaaagtaacatcgacatccggctcggcgatctga

SEQ ID NO: 24838 - protein, 301 aa, Unknown
  Obtained from environmental sample
  misc_feature (1)..(301): Xaa is any amino acid
MKIMXGGFNYLSDDVNYQGNYAFFKVDLGELTLLDINSISXKANLTTTNEGNKDFVLWASKTAFAGSPWSGGPEIQKTKVAYTAGSTLTLEIDPVKVLTLNIEDENVVYLALFFHLGGHAAVSFDITDVSLVKVTTPFVPIVINTTLSLREPVDGETPATAITGTGYTGAVTWVETTGSVPVTGNFEAGKGYTATIVLTKKNGYTFNGIAANSFVVGDATVTHAAGTSSDATLTVTAVFAAATAAIPEKVVSFTAGDTTTGFAVVDATIKAVTATGFNIDHTSGYGDFGAFKVTSTSGSAI

SEQ ID NO: 24839 - DNA, 492 bp, Unknown
  Obtained from environmental sample
  misc_feature (1)..(492): n is a, c, g, or t
atggacaagagtaaaaacggatatagattacctactgaagcggaatgggaatatgcgtgtcgtggaagttatgataacaaagcgacagaaacaaatacaaaaccgtttgggataggggacgggacaaagatgataagcgggctggcgaatttttgtgttatatatccttatgatctggctaaaggagggcattatgaagattcaagtgcaaccggatatgtaggcaagacaacagaggtaggaaaatatgcggctaacaattacggactttatgacatgctcgggaatttatgtgaatggtgttgggactggtatggctcttattcgagtgggtctcagactgaccagactggggtggttacctggtctagccgggtgggacgcggcgggggctgggacagatacggtcgggacttgcgttctgcgtctcggtacggcaactacccgggcaaccggtacagcagcgtcggcttccggctggcgcgtccctga

SEQ ID NO: 24840 - protein, 163 aa, Unknown
  Obtained from environmental sample
  DOMAIN (1)...(162): Domain of unknown function (DUF323)
  misc_feature (1)..(163): Xaa is any amino acid
MDKSKNGYRLPTEAEWEYACRGSYDNKATETNTKPFGIGDGTKMISGLANFCVIYPYDLAKGGHYEDSSATGYVGKTTEVGKYAANNYGLYDMLGNLCEWCWDWYGSYSSGSQTDQTGVVTWSSRVGRGGGWDRYGRDLRSASRYGNYPGNRYSSVGFRLARP

SEQ ID NO: 24841 - DNA, 675 bp, Unknown
  Obtained from environmental sample
  misc_feature (1)..(675): n is a, c, g, or t
ttgaataatctgctctccaacgctttcaaatacacagatatgggagaagttgaactgtcgttttccgccgaagtttccggaacaggcaagtctgtaatgcttattataaatgtaagtgatacagggcatggcatgactcaggaacagatagacaagctgtttgatgattacacgcggtttaatatagaccccaaacgtcaaattcagggtacaggcttgggcatgagcgttaccaaacgctttattgaaatgatgaaaggcgagattaccgttaaaagcgagccgggaaaaggcacaacgtttaatatacgaataccgcagggttatattgattcggacgtattgggtaaggaaggtacagataatctacagcaattatgcgccggaagagaagcaagagaaaaaaccgccgaatttgtcagagagtacatgccctacggcaaagtattggttgtagacgatatggagccgaatctttatgttactaacatggttcttgctccttacggattgacaatatctaccgcaaaaagcggacaagaggcgattgataaaattaaaaacggtatgtcatttgatattatttttatggaccattatatgccggatatggacggcatggaaacgacaaagataatacgaagtattggtacaagcaccctattatcgcgctga

SEQ ID NO: 24842 - protein, 224 aa, Unknown
  Obtained from environmental sample
  DOMAIN (147)...(222): Response regulator receiver domain
  misc_feature (1)..(224): Xaa is any amino acid
MNNLLSNAFKYTDMGEVELSFSAEVSGTGKSVMLIINVSDTGHGMTQEQIDKLFDDYTRFNIDPKRQIQGTGLGMSVTKRFIEMMKGEITVKSEPGKGTTFNIRIPQGYIDSDVLGKEGTDNLQQLCAGREAREKTAEFVREYMPYGKVLVVDDMEPNLYVTNMVLAPYGLTISTAKSGQEAIDKIKNGMSFDIIFMDHYMPDMDGMETTKIIRSIGTSTLLSR

SEQ ID NO: 24843 - DNA, 843 bp, Unknown
  Obtained from environmental sample
  misc_feature (1)..(843): n is a, c, g, or t
ttgaaaaaagttttaatcaacggcgattttttctgccgtaggtttaccggcatagagcgttatgcgtatgaaattacgctgcggcttgataagctctgcaagcccgatgaaatcgcgattataacgccaaataatgcggtaaatataccggaattttcaaaccttgaattaatcaggcacaggaagaatatcaaatcccatctatggtggcagatgattaccctacaatggttccttatcactcacagagaatttatcgttcttgaatttggcaataccgctttgccctttgcgcccggtatcgtgtttctgcacgacatttattgtgaattttttcctgaagattttaacagtttgagagataaacttattcgcctgtacaataaatggcaataccgtctgatagcaaaaaaagcaaagcagattgggacagtttcgtattttagcaaaaatcaaattgcgcggacttacaatataaatcctgacagaatcaccgttatttattccagctggaatcatttcaggaatatcacggcggactattctgtttttaataattttccggttctgtcaaagcagttttatttttcattgggcagtctctcgaaacgaaaaaatataaaatggataatcgactatgcgcgaaaaaacacggattctgtctttgccatttccggcgtgagtctgcccactgtaaaagccgatgagttggataattcaacgccgcanaatattattatgttaggctaccttgacgattccaaagtaaaagcccttatgacccgatgtaaagcgtttattttaccttcctactacaagggtttcggacttacaccgctttga

SEQ ID NO: 24844 - protein, 280 aa, Unknown
  Obtained from environmental sample
  misc_feature (1)..(280): Xaa is any amino acid
MKKVLINGDFFCRRFTGIERYAYEITLRLDKLCKPDEIAIITPNNAVNIPEFSNLELIRHRKNIKSHLWWQMITLQWFLITHREFIVLEFGNTALPFAPGIVFLHDIYCEFFPEDFNSLRDKLIRLYNKWQYRLIAKKAKQIGTVSYFSKNQIARTYNINPDRITVIYSSWNHFRNITADYSVFNNFPVLSKQFYFSLGSLSKRKNIKWIIDYARKNTDSVFAISGVSLPTVKADELDNSTPXNIIMLGYLDDSKVKALMTRCKAFILPSYYKGFGLTPL

SEQ ID NO: 24845 - DNA, 1488 bp, Unknown
  Obtained from environmental sample
  misc_feature (1)..(1488): n is a, c, g, or t
gtgtcctctgtgtactccgtggtatttattttctttctttttttcgcaatgctaccgcagggctttgcgcaggacgagccaagaggaaacagggcaatggcggatcgttacgcgcaatgggcaaagaacacgctggagatgggcctgtggagcgaagcccattccggcattgaacgcgccgcagactttgccgacgtttcttccgacatcggctatcttcttgctctgactcgcgttcacgaaaacaaacccagggcctccgttttggaagcgctgaatctggcgcttttggtggatcgctgggttttctacaacgcggaattggccaggctttttaaagcggaaactctgatcgcccttcgtttttatccggaggcgctgcaagagctttcgctgatcagcaaaagccccaggcaagcctctcttactcttaaagccctggctaattacagttatccggattttcgtcgtaatatgcgggaagcgctggacatatatccccgcgaaactgagccggtgcggatattcctcaattttctttcaaacgaggatgccgccggaagaaatcccgaaagggatgatctggatcttctggaaatagtaatccgccgactgcccctgctaatccagaacgatcctgaattggcatggatggcctcgccttttatccgcgacgttgaagaagccaggcgtcttgtaagggcttacagggcaatgaacaaaccggcgctccagtccatccctgttgctttaaagttgggcgttattgatgaagaaatggcccttgaagaactctttaactattcagtgaattctttggatcttgcgcttttggacaaggtctgggaacttttccgttctgacaccacaaaaaccatgttgaaaaacaagcttgcctcatatagcggaattataaccgaggactcggatagggacggaatccctgaaaccgttgtgaagtaccacaggggcctgcttgagtattcatttgtcgatgtaaaccaggacggcattcacgatcttatcgttcattacgaggccggtgttcccttgcggggcatggtgtttttgccgcctgaaaattcagggcgcaaacaggcggagattttttgggagcgttacccctcaattctggaagttcgtctggacgggacaaaatttataccgaggcctttggatttcttttttaatccgttgaggtttgtcaatctctttggcggcgggacgctttttccgcgctgggattttttatacccgccgcttacccgcaaggttttggtttcgcagtcccttcgtgtggaaaggtcaagcctggaatttcccggcggcattgaggtagtggagctggaacagggcattccggttagggccagggaatatgtgggaaatctgatggtaagcgaaaccgattttctccggggtaggcctcagcatcagcgcgttgatttggattttgacggcnagatggatacggttcgttttttttag

SEQ ID NO: 24846 - protein, 495 aa, Unknown
  Obtained from environmental sample
  SIGNAL (1)...(23)
  misc_feature (1)..(495): Xaa is any amino acid
MSSVYSVVFIFFLFFAMLPQGFAQDEPRGNRAMADRYAQWAKNTLEMGLWSEAHSGIERAADFADVSSDIGYLLALTRVHENKPRASVLEALNLALLVDRWVFYNAELARLFKAETLIALRFYPEALQELSLISKSPRQASLTLKALANYSYPDFRRNMREALDIYPRETEPVRIFLNFLSNEDAAGRNPERDDLDLLEIVIRRLPLLIQNDPELAWMASPFIRDVEEARRLVRAYRAMNKPALQSIPVALKLGVIDEEMALEELFNYSVNSLDLALLDKVWELFRSDTTKTMLKNKLASYSGIITEDSDRDGIPETVVKYHRGLLEYSFVDVNQDGIHDLIVHYEAGVPLRGMVFLPPENSGRKQAEIFWERYPSILEVRLDGTKFIPRPLDFFFNPLRFVNLFGGGTLFPRWDFLYPPLTRKVLVSQSLRVERSSLEFPGGIEVVELEQGIPVRAREYVGNLMVSETDFLRGRPQHQRVDLDFDGXMDTVRFF

SEQ ID NO: 24847 - DNA, 876 bp, Unknown
  Obtained from environmental sample
  misc_feature (1)..(876): n is a, c, g, or t
atgatagtaggcataggcgaaatgctgtgggatatattcccagagcggaaagtaccaggtggagcaccagccaattttgcataccacgcttcgcagttcggttttgagagttatgttgtaagtgcggttggcaaggatttgctaggcgaagaaattttgaaaatttttgcagaaaaagaacttgagcttctggttgaaactgttaattaccccactggaacagttaaggttgagttgaacgataaaggcattcccaaatatgagatatgcgaaaatgtcgcttgggataatatcccttttactgaacgaacaaaagaactagcacagaactcttctgctgtttgctttggcacgctcgcccaacgcaatgaaacctcacgcaaaaccattcgtagttttttggaacttgttcccaaaaatgcgctcaaaatttttgatataaatttgaggcagaatttttacagcaaaaaaataatacacgaatcgcttatgattagcaacattttgaaaataaatgaagaagaggttattgaggtagctcgtttatttgattttgagaaaaaagacgaacagganatatgcttgcatctattgaaagaatataacctgaatatcgttattgaaacaaaaggcagcattggcagttatgtgttcacaaaaaacgaaatctcgtatttagacacgccaaaagtaaatgccatagataccgttggagcaggagattcttttgccggtgcgtttgcaggtgctttgcttcaagggaaaaaaataaaagaagcacataaacttgcagtagatgtttcctcttatatttgcactaggcgcggtgcaatgcacaattatgttgcaaattttctaaattattcccataaatga

SEQ ID NO: 24848 - protein, 291 aa, Unknown
  Obtained from environmental sample
  DOMAIN (1)...(284): pfkB family carbohydrate kinase
  misc_feature (1)..(291): Xaa is any amino acid
MIVGIGEMLWDIFPERKVPGGAPANFAYHASQFGFESYVVSAVGKDLLGEEILKIFAEKELELLVETVNYPTGTVKVELNDKGIPKYEICENVAWDNIPFTERTKELAQNSSAVCFGTLAQRNETSRKTIRSFLELVPKNALKIFDINLRQNFYSKKIIHESLMISNILKINEEEVIEVARLFDFEKKDEQXICLHLLKEYNLNIVIETKGSIGSYVFTKNEISYLDTPKVNAIDTVGAGDSFAGAFAGALLQGKKIKEAHKLAVDVSSYICTRRGAMHNYVANFLNYSHK

SEQ ID NO: 24849 - DNA, 723 bp, Unknown
  Obtained from environmental sample
  misc_feature (1)..(723): n is a, c, g, or t
atgataaaagttgccattccaaataaaggcgtgctttcggagcctgcgctggatttgctaaaggcttgtggatacaaggttagcagagttattaaaacgctcaattcggtagataccgtaaatggcattgaattttattttttgcgacctggcgatattcccatgtatgttggcaaaggcataatagatgcaggcataacgggagtggatttttgcgtagaggcacaaagccctgctataaaaatacttgacttgccttttggtggaagcaaacaccgtgctgccgttccagagaatagtagctaccaaaaattgagcgatattgaaaatttgcggatagcaaccagcttcccaaacatcgttcgcaattatttcaaaaatcctaaaatggaactcgttgagctggaaggtgcagttgaaatttctgtggagctggatgttgcagatgccgttgttgatgttgtggatacaggaacaaccctaaaacaagcagggcttcgcattttaggagaacctctgttcttgagcaatgcagcactcttcgctcacccaaaccgccaggaataccctgaagttcgcacacttgcacgccgcatagagggtaaattggtggctatgagctataaaatggttgaatacgatgttccttcagaacttttggaaaaagcctgttcccataacgcccggcatagaatcgccaactgtggcacctttgcaaaataa

SEQ ID NO: 24850 - protein, 240 aa, Unknown
  Obtained from environmental sample
  DOMAIN (48)...(203): ATP phosphoribosyltransferase
  misc_feature (1)..(240): Xaa is any amino acid
MIKVAIPNKGVLSEPALDLLKACGYKVSRVIKTLNSVDTVNGIEFYFLRPGDIPMYVGKGIIDAGITGVDFCVEAQSPAIKILDLPFGGSKHRAAVPENSSYQKLSDIENLRIATSFPNIVRNYFKNPKMELVELEGAVEISVELDVADAVVDVVDTGTTLKQAGLRILGEPLFLSNAALFAHPNRQEYPEVRTLARRIEGKLVAMSYKMVEYDVPSELLEKACSHNARHRIANCGTFAK

SEQ ID NO: 24851 - DNA, 630 bp, Unknown
  Obtained from environmental sample
  misc_feature (1)..(630): n is a, c, g, or t
atgaatgaacaaaacaccctgttgaattttaccgcccccgcagcaagagtcctgtcggtggacgaccttccgaccaatcacaaaaccctgaaagagctgctcaagccgtacggcctcaagctgtacgccgtccttgacggggcgacagccatcgaactgatccggaaagagcgttacgatcttgtttttatggatcagatgatgccggaaatggacggctgggaagccgctgcccgcatccgcgcgatgggaagcgaagacgaatattttctcaaggtaccggtggtgctgcttaccgccaacacggtaacgaaaacagccgaagaccttgcgcggcagggggtaaacgattttcttgtcaaaccggttgacagcgtgaaacttgccgccgtgcttaaagaattcctccccgcggaaaaaatcattccgtcttcccagcagccccaacaaaaagccgatccctcagccatatcgattccgggaattgactcggaagtgggactccggaacgtgggcggcgccctttcgtcgtatataagcgtgctcggcggattctgccgcgacgcggaaaacagcagcgtaaaattgcgacagcgtaaaaaacggcgacacgcagctattccccgatag

SEQ ID NO: 24852 - protein, 209 aa, Unknown
  Obtained from environmental sample
  DOMAIN (15)...(133): Response regulator receiver domain
  misc_feature (1)..(209): Xaa is any amino acid
MNEQNTLLNFTAPAARVLSVDDLPTNHKTLKELLKPYGLKLYAVLDGATAIELIRKERYDLVFMDQMMPEMDGWEAAARIRAMGSEDEYFLKVPVVLLTANTVTKTAEDLARQGVNDFLVKPVDSVKLAAVLKEFLPAEKIIPSSQQPQQKADPSAISIPGIDSEVGLRNVGGALSSYISVLGGFCRDAENSSVKLRQRKKRRHAAIPR

SEQ ID NO: 24853 - DNA, 846 bp, Unknown
  Obtained from environmental sample
  misc_feature (1)..(846): n is a, c, g, or t
ttgcgcggacatttaatctgctctcggatatggggtgcttttttacccaatcgggaagatacccccgaaccgggcgacgttatctccctggttttcccccaggatttcgggagtgcgctcctgcttgcggaaatgattccccgcagactgatggagatgtccctgctcaagattcgccattatatgcacgtccgcaataacagcgactatgtgcttaacaagttaattgggcagatgccgggcaaggaaaaagcgatacgggaaataattgagaaaattaagattcgtccccaggactgtctcggtgaaatggaacgttccgccgattttccgtatcttttctggacctttttctgcccgctggtcaagaacgacataaagaaaaaaaatgaagcgcttgcggaggatacggcgacgctgcaggcggtctgtaccattgaaatatgctgtagtttttaccggacggctgccgccaaaaagcgggagaaggatgccgcttttctgactcttgaagtgttgatggaccgtcccccctggcactttaccctcgaagaaatcatcggttttaccaacgacagggaaatacccctgctggatatttattcacagagcgatctggaagattatatccttaaatcggttaacgaagggaaaaacggcgaactgcctccctggttggccgtgcagggggataagggcgaacggtggttcattaaaaaagggcgttacctgtctgtgtgcgcgcggatgcttgccgagacccagccggcggtaaaagcggcgattaccaagcgctggtatgtgttaatccgcgatttcggtaaagaactccgcgatagagtctga

SEQ ID NO: 24854 - protein, 281 aa, Unknown
  Obtained from environmental sample
  misc_feature (1)..(281): Xaa is any amino acid
MRGHLICSRIWGAFLPNREDTPEPGDVISLVFPQDFGSALLLAEMIPRRLMEMSLLKIRHYMHVRNNSDYVLNKLIGQMPGKEKAIREIIEKIKIRPQDCLGEMERSADFPYLFWTFFCPLVKNDIKKKNEALAEDTATLQAVCTIEICCSFYRTAAAKKREKDAAFLTLEVLMDRPPWHFTLEEIIGFTNDREIPLLDIYSQSDLEDYILKSVNEGKNGELPPWLAVQGDKGERWFIKKGRYLSVCARMLAETQPAVKAAITKRWYVLIRDFGKELRDRV

SEQ ID NO: 24855 - DNA, 1548 bp, Unknown
  Obtained from environmental sample
  misc_feature (1)..(1548): n is a, c, g, or t
ttgggattcatttcgaacggaatgataacaaaacttatttcattcaatcctgaaattactttggaaaaagcgaaagaagacgagcctcgtcttaaagatatggaaaaagatccccgttttacggaattattcgccatagcgggtaaattggaggggcttaaccgtcattcaagcatacacgccgcaggtatcgtaataggaaaaaaaccgctgattgagttagtgcctctctttcaggaacgggaagaaaagggcggcaatatcgccacacagtacagcatgaacttccttgaagaatgcggtcttgtaaaaatggatttccttggactaagaaaccttgatattataaaatatacgcaagaattaatccgaaagcgcggaagcaaatatttaaattttaacatagaagatattcccgaagatgacaaaaaaacttttaaaatgttaggtgaagggaaaagcaacgcggtctttcaatttgcctccgacggtatgcaggacattttaaggcagacgaaacccacgtccatagaagacttaacggctctgaacgcgatgtatcgtccgggacctatgcagttcattccgcgctttgtggaggcaaaaaccggtaaagcgccgataacgtatcccgatccaagccttgaaggagttttaaaagaaacctacggcgttattgtctatcaggaacaggttatggaagtggcaagaataatagcgggttacagtatgggacaagccgatctcctccgcaaagcaatgggtaaaaagataaaaaaagttattgatgaagaaaaaatcccgtttttggaaggcgcggtaaaacagggatactccgcgcagaaggccggggaaatttacgacatacttgttccttttgcgggctacgggtttaataaaagccattccgccgggtatgcggtattggcgtaccagacggcttaccttaaagcgaatttcccagcggaatatatggcggctgcattgatagtcgaaataaaaagcacggacaaacttttatccagcattgtcgaagcccgtaaaatgggaataagcgtcgatcctcccaatattaattattccgacaaactttttaccgtagtggacggcaggatagtatacggtttcctgggcataaaaggcgtaggcgacgccccggcggaagaaatcgtgcggggcaggcaaaacggccattataaaaattttatggatttcctggacagggtggacataaaaacggtaagcaaaaaagttattgaactgcttattcacaccggcgcgtttgacgattttaaggtatcacgcgaaacgctcgcgggtaatatggaaaaagcgatagagtacgcgcaaaagggaaaagaggacagacagcttggacagtcaaacctgtttggagattcaaccgaatccggtatgcccgattttaagtttacggaatttccgcctgtaagcaaaactgaaagactgaaccgtgaaaaagatttaatcggtttttatttttcgggtcatccgttagacgaataccggcaattatggaaaaagccgtga

SEQ ID NO: 24856 - protein, 515 aa, Unknown
  Obtained from environmental sample
  DOMAIN (3)...(277): Bacterial DNA polymerase III alpha subunit
  misc_feature (1)..(515): Xaa is any amino acid
MGFISNGMITKLISFNPEITLEKAKEDEPRLKDMEKDPRFTELFAIAGKLEGLNRHSSIHAAGIVIGKKPLIELVPLFQEREEKGGNIATQYSMNFLEECGLVKMDFLGLRNLDIIKYTQELIRKRGSKYLNFNIEDIPEDDKKTFKMLGEGKSNAVFQFASDGMQDILRQTKPTSIEDLTALNAMYRPGPMQFIPRFVEAKTGKAPITYPDPSLEGVLKETYGVIVYQEQVMEVARIIAGYSMGQADLLRKAMGKKIKKVIDEEKIPFLEGAVKQGYSAQKAGEIYDILVPFAGYGFNKSHSAGYAVLAYQTAYLKANFPAEYMAAALIVEIKSTDKLLSSIVEARKMGISVDPPNINYSDKLFTVVDGRIVYGFLGIKGVGDAPAEEIVRGRQNGHYKNFMDFLDRVDIKTVSKKVIELLIHTGAFDDFKVSRETLAGNMEKAIEYAQKGKEDRQLGQSNLFGDSTESGMPDFKFTEFPPVSKTERLNREKDLIGFYFSGHPLDEYRQLWKKP

SEQ ID NO: 24857 - DNA, 621 bp, Unknown
  Obtained from environmental sample
  misc_feature (1)..(621): n is a, c, g, or t
gtgcagaagcgtggcggaggcatggaggaaataatgcgttttatttttggaattttggcttcaataaccggtatttattcgttaattatttttatacgaataattttttcatggtttggaaatatggttggcggaaaacccgtagaaattataaataaaattacagacccgtatcttgactggtggaggcaaaaattacatttaagaataggcaattttgatttttcagtaattccggcgattctgtttctttcttttattcaaaatttatttcgtattatttcaaaagaggaaagaataactattggatttctgcttgtgcaaatattgttatttatatggaatattttttctattatattaggattttttattattgtaattatcatacgccttataggctattttattaacagcaatatatacagccctttctggagcattattgattctgtcacacagccgttattatatagaacgaacagaatattttttggtaaaaaaatcggaggctatttaaaaggaatgtttttatcgttattacttttaattgtaatacttttcggcggatggtttgttgtctctttactttccggtattcttaataaattgccgatataa

SEQ ID NO: 24858 - protein, 206 aa, Unknown
  Obtained from environmental sample
  DOMAIN (12)...(94): YGGT family
  misc_feature (1)..(206): Xaa is any amino acid
MQKRGGGMEEIMRFIFGILASITGIYSLIIFIRIIFSWFGNMVGGKPVEIINKITDPYLDWWRQKLHLRIGNFDFSVIPAILFLSFIQNLFRIISKEERITIGFLLVQILLFIWNIFSIILGFFIIVIIIRLIGYFINSNIYSPFWSIIDSVTQPLLYRTNRIFFGKKIGGYLKGMFLSLLLLIVILFGGWFVVSLLSGILNKLPI

SEQ ID NO: 24859 - DNA, 867 bp, Unknown
  Obtained from environmental sample
  misc_feature (1)..(867): n is a, c, g, or t
ttgcgacccttgagattacacggcgagattgaggtcacatttttttcaggtccgtgggaaaggtgtcagaatttcatcaaagacgattcggttgtcatattaaaaggaaaaattgattatcaaaaagataaggacaagtacagtttcttggcagatggcgttataagcaaacaggaagttacgacagttgtaaaagaagttaaagaattggacgaaaaaaataaattacacaaaaatacatggctttacatggcggatttaaaaagctcatatattttacaggcaaaaaaaggcaattatacggttataggttatttaaaatcgatcagggattttaaggataaaaaaggaaacgacatggcgtttggcacattgcaggattttgaaggcgaaatcgaccttgtgtttttttcaaaggtgtatgcggaatgcagacatttgcttaaacttgacgagatgatcgccttaaaaggaagcatagatccggaaaatgaattaaaacccggtaaggtaagttttaaagtatcgagcatggctgatttgccttttttaagccgtagcgccgcaaaaaaagcggccgaaaacgaaaaattgccaactcccaatcttgtaaaaagcaacgaaagacatcttgatgaagtacacataagactgcataaaggctcttcggataataaagatgaaatgttggagttacgcgattaccttgccgaaaattcaggttcaaacactatttttatacatattcccgttaacgacgaggaaaaaatcatacgcgccgcatccggtcttgatatgtcaggtaacggatatgtgatggaaggcttaaaacagtgcagaagcgtggcggaggcatggaggaaataa

SEQ ID NO: 24860 - protein, 288 aa, Unknown
  Obtained from environmental sample
  DOMAIN (100)...(181): OB-fold nucleic acid binding domain
  misc_feature (1)..(288): Xaa is any amino acid
MRPLRLHGEIEVTFFSGPWERCQNFIKDDSVVILKGKIDYQKDKDKYSFLADGVISKQEVTTVVKEVKELDEKNKLHKNTWLYMADLKSSYILQAKKGNYTVIGYLKSIRDFKDKKGNDMAFGTLQDFEGEIDLVFFSKVYAECRHLLKLDEMIALKGSIDPENELKPGKVSFKVSSMADLPFLSRSAAKKAAENEKLPTPNLVKSNERHLDEVHIRLHKGSSDNKDEMLELRDYLAENSGSNTIFIHIPVNDEEKIIRAASGLDMSGNGYVMEGLKQCRSVAEAWRK

SEQ ID NO: 24861 - DNA, 414 bp, Unknown
  Obtained from environmental sample
  misc_feature (1)..(414): n is a, c, g, or t
ttgcgcatgaacttacgcaaaaaaggcattgtttacaaagcggtaaaaaacagattgataagggaagcctttaaaaaggcggacatcaaaggcttggattcttaccttaaaggtgctacctctattatgctgggtagtgcggaagacccaatgctacctgcccgcgaaattgttgaatttcacaaggcaaaccccgaaattttaattgctaaaggcatttcactagatggctcatccttaaaagggagcgagctggaaaatctagctaagatgcctggcaaaaacgagattcttggtcaagttatatccttagcgctttcacctggtgcaaatttgatagctcttatcaaaggccctggttcaaagattgcggggcaaataaaggctttagaacagagactggaaacgaagtaa

SEQ ID NO: 24862 - protein, 137 aa, Unknown
  Obtained from environmental sample
  misc_feature (1)..(137): Xaa is any amino acid
MRMNLRKKGIVYKAVKNRLIREAFKKADIKGLDSYLKGATSIMLGSAEDPMLPAREIVEFHKANPEILIAKGISLDGSSLKGSELENLAKMPGKNEILGQVISLALSPGANLIALIKGPGSKIAGQIKALEQRLETK

SEQ ID NO: 24863 - DNA, 387 bp, Unknown
  Obtained from environmental sample
  misc_feature (1)..(387): n is a, c, g, or t
atggctacagatgtcaaaacactaggcgaccaaattgttgccctcacgcttttagaagcaaaagcattggctgattaccttaaagagactcatggtcttgaagctgccagcggcggcgcagttgttatggctgctcctgcggcaggcggtggcggtgctgctgccgaagaaaaaacagagtttgatgttatgttgatagatggcggagcgcagaaactaaatgttattaaggttctacgcgctgctgttcctggccttggactcaaggaagcaaaagatttggtagacaaaggcaatgcacctgtgaaagaaggcgttgccaaagccgaagctgaaaagctgaagaaagagctagaagacgccggagcaaaggtcacgctgaaataa

SEQ ID NO: 24864 - protein, 128 aa, Unknown
  Obtained from environmental sample
  DOMAIN (60)...(128): Ribosomal protein L7/L12 C-terminal domain
  misc_feature (1)..(128): Xaa is any amino acid
MATDVKTLGDQIVALTLLEAKALADYLKETHGLEAASGGAVVMAAPAAGGGGAAAEEKTEFDVMLIDGGAQKLNVIKVLRAAVPGLGLKEAKDLVDKGNAPVKEGVAKAEAEKLKKELEDAGAKVTLK

SEQ ID NO: 24865 - DNA, 369 bp, Unknown
  Obtained from environmental sample
  misc_feature (1)..(369): n is a, c, g, or t
ttgatcagatcggcacgagaaacttgtgtgttcctctttcattctttcagtttatctcttttttatgctttgttaagtaaacgcatatgggtattaaacccccaaagggattacgcccttaataaagtagaacacagaatgttctgctacattaccagccattggaagggacagccattaataagtgttgagacagttatacagttgattggcagcacaacaacaacgaccggattgaaaatcatttgcgtgaaagatgatactgtttataagattggtataaaagttagtgatgaggattttgcgacaataaatataaaaaatgtgaaaacattgcctacttggaactatatcatctcacctaaataa

SEQ ID NO: 24866 - protein, 122 aa, Unknown
  Obtained from environmental sample
  misc_feature (1)..(122): Xaa is any amino acid
MIRSARETCVFLFHSFSLSLFYALLSKRIWVLNPQRDYALNKVEHRMFCYITSHWKGQPLISVETVIQLIGSTTTTTGLKIICVKDDTVYKIGIKVSDEDFATINIKNVKTLPTWNYIISPK

SEQ ID NO: 24867 - DNA, 402 bp, Unknown
  Obtained from environmental sample
  misc_feature (1)..(402): n is a, c, g, or t
gtgttccaagggaaccccgtggcacatgttatcaaactgggcagaggcaaaaggaatcgcggtggaagccacaaccggcttaccaacaacgaattagcggaacggttatttcccggtacggcaagcaagccggtctataaaataccgaactgggagtacatccaccgagaaatggctaaaagcggtgtgacgttaagcctgctttgggcggaatactgcgagcaatgccgaaagaccggagaaacaccttataagacaacccagttttacaactattacagcgagtatgtccagaaaaacaaagccaccatgcacattagccataaaccgagcgaaatcatggaggttgactggcgggccagagcgcatgtatacgcaacaccgacacaggagaacccataa

SEQ ID NO: 24868 - protein, 133 aa, Unknown
  Obtained from environmental sample
  misc_feature (1)..(133): Xaa is any amino acid
MFQGNPVAHVIKLGRGKRNRGGSHNRLTNNELAERLFPGTASKPVYKIPNWEYIHREMAKSGVTLSLLWAEYCEQCRKTGETPYKTTQFYNYYSEYVQKNKATMHISHKPSEIMEVDWRARAHVYATPTQENP

SEQ ID NO: 24869 - DNA, 1179 bp, Unknown
  Obtained from environmental sample
  misc_feature (1)..(1179): n is a, c, g, or t
atgaatatgtttcgcatccaaacaatgaacaaaatcgctccccaggggcttgaactgtttccccgggacaaatacgaagtcgcaagcgagattctccacccccacgccattattgtaagaagcgcggacctgcacaatgttgagattcccgattcggtactggcaatcgcgcgggccggggcgggcgtcaacaacattcccattccgcggtgcagcgagcgggggatggtagtattcaacactccaggcggcaacgccaacgcggttaaagagctgaccctggccgcgatgcttatcgcgtcacgcggtattgtcgccgggatcaactgggccgcctcaatcgcgggcagggccgaccaggttcctgatctggtggaaaagggaaaatcgcagtttgaggggccggaactgtggggcaagaccctaggcgtggtagggctcggcgccataggcgtaatggttgccaacgacgcgattgccctgggcatgaatgtcattggctacgacccctacatttcagttgacgccgcgtggaatctttcccgcgaggttgtccgcgctgacacgcttgaggggatgctcgccaaagcggattacctcagcctgcatatcccccttgctgatacgacaaagggcctgttaaacgcggaaaagatccggtttatgaagaaaggcgtccggataattaacctggcgcgcggcgctctggtcaacgaggccgatataatcaatgccttgagttcggataaaatcgccgcctatgtgaccgacttcccctcagccgagatgcttgcctgcaagaaggcgatttgcgttccccatttgggcgcctcgacccccgaagcggaggataactgcgccattatggcggttaaacagcttatgaattacctggaaaacggctccattcgcaattcggtaaattacccgcactgccgccttgatcagaacgcccccttccggcttttggtgtctaaccgcaatattcccaatatggtgggacagatcaccacgattttggcaggcgctaatattaacattaccgatctgattaaccaccataagggcgattttgcctataatattatagatacagagcaaaaaatcccggatccggctctggaacagctcaaaaaaatagaaggcattatccgggtcaggtcaatagaaaagggttga

SEQ ID NO: 24870 - protein, 392 aa, Unknown
  Obtained from environmental sample
  DOMAIN (2)...(308): D-isomer specific 2-hydroxyacid dehydrogenase, catalytic domain
  misc_feature (1)..(392): Xaa is any amino acid
MNMFRIQTMNKIAPQGLELFPRDKYEVASEILHPHAIIVRSADLHNVEIPDSVLAIARAGAGVNNIPIPRCSERGMVVFNTPGGNANAVKELTLAAMLIASRGIVAGINWAASIAGRADQVPDLVEKGKSQFEGPELWGKTLGVVGLGAIGVMVANDAIALGMNVIGYDPYISVDAAWNLSREVVRADTLEGMLAKADYLSLHIPLADTTKGLLNAEKIRFMKKGVRIINLARGALVNEADIINALSSDKIAAYVTDFPSAEMLACKKAICVPHLGASTPEAEDNCAIMAVKQLMNYLENGSIRNSVNYPHCRLDQNAPFRLLVSNRNIPNMVGQITTILAGANINITDLINHHKGDFAYNIIDTEQKIPDPALEQLKKIEGIIRVRSIEKG

SEQ ID NO: 24871 - DNA, 1131 bp, Unknown
  Obtained from environmental sample
  misc_feature (1)..(1131): n is a, c, g, or t
ttggcgtatttgcgaaaaattctattaatagcagataaagaggggatttccgtctttatcgatcctcatcaggatgtgtggagcaggtggacgggtggggacggcgctcccgtgtggactttggaaaaactgggaatgaatcccgataattgcgatgtttgctcggcggcaattacccgccagcgttacgctctttatcataagagtaaaaaacatcctgacggtaaaccgtttccaaaaatgatatggccaagcaattacaaccgttacgccacggcgacaatgttcagtttgttttttgcgggaaaaacttacgcggaggatttgcggatagaaggggaaaatgtccaggactggcttcaaaaccgatacattgccgcgtttaaacacgctcagcgccgattaaaaaattgcgccgccatcacgggctggggttcgatgaacgaaccgcattttggttttattggccatcagaatcttgaaaaccctgaaaactgtcttattccggcgggaccgcgcccgagtccgtggcaggcaatccgcgccgcatccggctttcccgtaaaagttcccgtttacaaaattgaatctttatttaaaaagatttcccactacgaaactttcaaccggcaggggatttcactttttaaagacggtttttcctgcccctggaaacaagcgggcgtatggcgggaagaaggcggcgtaccccggcttttacgcgccgatcacttcagccgctatcagggacggcctgttgactttgccgatgattttttaaaaccgtttatcgtcaaatacgtcaataaaatgaaagaggctgacgagcatactcttttctttnatgaaggtctgcctaattgcgtanaagccgaatctcatccgtcatgggataaaacgatcccgtcaacgcgatcaacgcgtttcactggtacgacggctttgccctttttaccaagaccttccagccgtggttcactgttgatcctgacacttcaaaatttattgtgggcagaaaaaaagtgggtgctttttttgcccaatgccttgccagggcaaccgcctggaccaaagaaaaaatggggaacatgccctgcctgttgggcgagttcggccttgcctttgacctga

SEQ ID NO: 24872 - protein, 376 aa, Unknown
  Obtained from environmental sample
  misc_feature (1)..(376): Xaa is any amino acid
MAYLRKILLIADKEGISVFIDPHQDVWSRWTGGDGAPVWTLEKLGMNPDNCDVCSAAITRQRYALYHKSKKHPDGKPFPKMIWPSNYNRYATATMFSLFFAGKTYAEDLRIEGENVQDWLQNRYIAAFKHAQRRLKNCAAITGWGSMNEPHFGFIGHQNLENPENCLIPAGPRPSPWQAIRAASGFPVKVPVYKIESLFKKISHYETFNRQGISLFKDGFSCPWKQAGVWREEGGVPRLLRADHFSRYQGRPVDFADDFLKPFIVKYVNKMKEADEHTLFFXEGLPNCVXAESHPSWDKTIPSTRSTRFTGTTALPFLPRPSSRGSLLILTLQNLLWAEKKWVLFLPNALPGQPPGPKKKWGTCPACWASSALPLT

SEQ ID NO: 24873 - DNA, 603 bp, Unknown
  Obtained from environmental sample
  misc_feature (1)..(603): n is a, c, g, or t
gtgggcagaaaaaaagtgggtgctttttttgcccaatgccttgccagggcaaccgcctggaccaaagaaaaaatggggaacatgccctgcctgttgggcgagttcggccttgcctttgacctgaacaagcgcaggggttttgccagcggagactactcggtgcatgaacaagccctgtccatgtattacgacgcggtggacgccaacctgcttcattcaacaatctggaactacacggcggacaataccaacgaatacggcgacggctggaatgacgaggacctttcgattttttccgaaggcaaggaacgggccgtagccggatggaagcggccttaccccatggccacgccgggcgaacccctttcaattaactgggaccgcaagcgccgcctgttccgttaccgcttccgcgccgacggggccattgccgcgccgggcatgatttatctgcctgcggaatatttcggtccgtcgccccgggtcgaaaccaagtcaggcaacggaagcctgcgctgggagtacaaccatgaagaacagcaactgttgatatataccgacggctacagcggagaggcggatattaatgcgcggccaggctga

SEQ ID NO: 24874 - protein, 200 aa, Unknown
  Obtained from environmental sample
  SIGNAL (1)...(21)
  misc_feature (1)..(200): Xaa is any amino acid
MGRKKVGAFFAQCLARATAWTKEKMGNMPCLLGEFGLAFDLNKRRGFASGDYSVHEQALSMYYDAVDANLLHSTIWNYTADNTNEYGDGWNDEDLSIFSEGKERAVAGWKRPYPMATPGEPLSINWDRKRRLFRYRFRADGAIAAPGMIYLPAEYFGPSPRVETKSGNGSLRWEYNHEEQQLLIYTDGYSGEADINARPG

SEQ ID NO: 24875 - DNA, 639 bp, Unknown
  Obtained from environmental sample
  misc_feature (1)..(639): n is a, c, g, or t
ttgctaaagaaagcggaaaagcgggattataacaggacggttcgcatgagactcgatgacgacaaactgcatgaggagtgcggggtttttggggtattcctgaatgatcctcagcatgatgccgctcctttagtctatcaaggactgttttccctgcagcaccgcggacaagaaggcgccggtattgccgttgcccgggataatgtaatagatgtccacaaaggacagggtcttgtcggtgaagttatcagtcctgatgtagtgacgaaactaaagggacacgccgccatcggtcatgtgcgttattcgacatgcggagcaaacgtcatggaaaacgtacagccctttataagccggttcaaactaggctctattgcagttgcccataacggtaatcttaccaacgcagatgtcgttcgggaattgctggaggatgccggcattggttttaccacttccagcgacagcgaagtcattgtcaatctaattacgaaaaattacaaaaaaggcctggaaaaggcttttaccgatacggtcaaatttataaaaggttcttacgcgctgatagtgttaacagatgacgctctggtaggggcgcgcgatccgaacgggattcgtcgctttgccctggggaaatag

SEQ ID NO: 24876 - protein, 212 aa, Unknown
  Obtained from environmental sample
  DOMAIN (27)...(211): Glutamine amidotransferases class-II
  misc_feature (1)..(212): Xaa is any amino acid
MLKKAEKRDYNRTVRMRLDDDKLHEECGVFGVFLNDPQHDAAPLVYQGLFSLQHRGQEGAGIAVARDNVIDVHKGQGLVGEVISPDVVTKLKGHAAIGHVRYSTCGANVMENVQPFISRFKLGSIAVAHNGNLTNADVVRELLEDAGIGFTTSSDSEVIVNLITKNYKKGLEKAFTDTVKFIKGSYALIVLTDDALVGARDPNGIRRFALGK

SEQ ID NO: 24877 - DNA, 936 bp, Unknown
  Obtained from environmental sample
  misc_feature (1)..(936): n is a, c, g, or t
ttggcggtcagcgctatcaatggcgtcgtcataaacaacgtgaacgcagtgataacaaacgtcagcggcgcggcgagcacggccgcggcgccgagcgctgtcgtctacagcgtgaagggcaagatagccgtcgtcaacgttgactcgatatgggcgaacgcccaggcgaccgcgcttcttacggttgagccggggcagggcgtgacggtgttgagcggaaaggtgaagtcgagaacgggtttcgccatcaactcggcgggctctgtcgaagttgacaaaaggacagtcacagagacgaatttcggaacgcttggaaacaagcgcggaagcatcgtggtcagcaccggcgcgtccggggtggcgttcagcgcgatatacactaacgtcgccaattccaacgtaaagatcggctgcgcggaagtcagcgccaccaacgcgtccggaggcgcgtcggcgatcaacgcgatcgaggccagcgtgcagacggacagcgtaacgtctaaggtgacgtctgcgtccggcacggctatcaaagtcagcggccggcccgtaacgatcaacgcgggtgaaatcacctcaagcgcggcgtccgggaattttgcggcggtttgggttgataacggcaacgtgaccatcggcaacggcgacaccgaacatagcaacggcggcggagaaggcggcctcgtcttcggaacggtcgccaggcctatggacaccaagatcacgtcgaacggcgcgtgggcggtctatgccgacgcacagggcgtgtataccgtcaccgttaatgacgacgccactttctcggtccgcggcaccaccgcgacggccggcgcgatctacgctttgcatgaagtcaaagtgaccttcggcggcgagatcatcgtcagcgaccccacaaggaaaccttcgcgatccgcacggctttggggcatataa

SEQ ID NO: 24878 - protein, 311 aa, Unknown
  Obtained from environmental sample
  misc_feature (1)..(311): Xaa is any amino acid
MAVSAINGVVINNVNAVITNVSGAASTAAAPSAVVYSVKGKIAVVNVDSIWANAQATALLTVEPGQGVTVLSGKVKSRTGFAINSAGSVEVDKRTVTETNFGTLGNKRGSIVVSTGASGVAFSAIYTNVANSNVKIGCAEVSATNASGGASAINAIEASVQTDSVTSKVTSASGTAIKVSGRPVTINAGEITSSAASGNFAAVWVDNGNVTIGNGDTEHSNGGGEGGLVFGTVARPMDTKITSNGAWAVYADAQGVYTVTVNDDATFSVRGTTATAGAIYALHEVKVTFGGEIIVSDPTRKPSRSARLWGI

SEQ ID NO: 24879 - DNA, 705 bp, Unknown
  Obtained from environmental sample
  misc_feature (1)..(705): n is a, c, g, or t
ttggacttaattccgcaaaacagccttgtctatttttgttcacccaacaaccccactggcgcggtttcggatcgcgttcagcttaccgcgcttgtaaataccgccgtcgaaaaaggctgcatcattgtctttgacgccgcctacgccgaatttatccgcgatccgtcgctccctaaaactatctacgaaatagacaaggctgaccaatgcgccatagaagtaaactctttctccaagcccgccggatttacaggagtgcggctcggctggtcgattgttccaaaagcgctcaagtactcaggaggcgagagcgtcaacgcggactggaaccgcatcgcgggaacaatttttaacggcgcgtcaaacatcgctcaggcggggggacttgccgcgttagacgacgagggactgaaagaagtccgcaagctgactgatttttatcttggaaacgcgaaattgattagggatgcccttcgaaagctgggaataaaatgcataggcggagacaattccccatacatctgggcgcattttccaggcagggacagttgggaagtgttctcccaaatccttgaaaagtgttatgttgtaaccaccccgggagccggtttcggccccgccggccaaagcttcatccgcttttcagccttcggccacagagcggacgttgaagaagcgtgtaaccgccttggctctcttgtataa

SEQ ID NO: 24880 - protein, 234 aa, Unknown
  Obtained from environmental sample
  DOMAIN (1)...(230): Aminotransferase class I and II
  misc_feature (1)..(234): Xaa is any amino acid
MDLIPQNSLVYFCSPNNPTGAVSDRVQLTALVNTAVEKGCIIVFDAAYAEFIRDPSLPKTIYEIDKADQCAIEVNSFSKPAGFTGVRLGWSIVPKALKYSGGESVNADWNRIAGTIFNGASNIAQAGGLAALDDEGLKEVRKLTDFYLGNAKLIRDALRKLGIKCIGGDNSPYIWAHFPGRDSWEVFSQILEKCYVVTTPGAGFGPAGQSFIRFSAFGHRADVEEACNRLGSLV

SEQ ID NO: 24881 - DNA, 1266 bp, Unknown
  Obtained from environmental sample
  misc_feature (1)..(1266): n is a, c, g, or t
gtgatttccgaaagaagtagtaaatatgtctcacttgacctttccggcagtacctttaccagcattgggaattatgcttttagaggttgcactagccttgccagcgttaccataccggacaacgttaccagcattggggatggtgctttttatgattgcactagtcttgccagcgttaccataccaaacagcgttaccagcatttgggataatgcttttaacggttgcactagccttgccagcgttaccatacccgacagcgttaccagaattggagccttagctttttctgattgtaccagccttactagcgtaactataccggacagtgttaaaagcattgggcaagcttttaaacgttgcaccagccttactagcgtaaccataggaaacggcgttaccgacattgtagaaagaacttttcaaggctgcaccagccttactagcgtaaccataggaaacggcgttaccagcattggggctggtgcttttgaaggctgcaccagccttaccagcataacaataccttttgtgggcgctacattagatggaagatcaaatacccattttggctatatattcggcgcttcaggttccggcagtcaaaattcttatataccgacatctttgaaaacagtcattataactggcggtagcagtatcgctgccagcgcttttacccgttgtaccaacntgacaagcgttaccatacccgacagcgtgttaagtatcggtgcaagtgcgttcaaagattgtagcagtttgacgagtatcactataccctttgtcggcgcggcattgaacggaacctcaaatactcattttggttatatattcggcgcgtcagatgaccgcggtcaatatacttcgataccgtcctcgttgaaaaccgtcgtcataacgggcggcagcagtatcggaaacagcgcgttctccggttgtgtctacctgacgagcgttaccatactcaacagcgtaaccagtatcggcaattctgcgttttcctcctgcttatacctgacgaacattaccatacccaacagcgtaaccaggatcggcgatcatgcgtttgggtactgtggcgacttgacgagcgtaacttttcaagggacgattccttcgagcgggtttaatagctccgcatttctcggcgacttgcgcggcaaattttacgcatcgaactcaaccaacggaacaccagggacgtatacgagaagtggggatggtacagattcgtcgccatatacgtggacgaaacagaattag

SEQ ID NO: 24882 - protein, 421 aa, Unknown
  Obtained from environmental sample
  misc_feature (1)..(421): Xaa is any amino acid
MISERSSKYVSLDLSGSTFTSIGNYAFRGCTSLASVTIPDNVTSIGDGAFYDCTSLASVTIPNSVTSIWDNAFNGCTSLASVTIPDSVTRIGALAFSDCTSLTSVTIPDSVKSIGQAFKRCTSLTSVTIGNGVTDIVERTFQGCTSLTSVTIGNGVTSIGAGAFEGCTSLTSITIPFVGATLDGRSNTHFGYIFGASGSGSQNSYIPTSLKTVIITGGSSIAASAFTRCTNXTSVTIPDSVLSIGASAFKDCSSLTSITIPFVGAALNGTSNTHFGYIFGASDDRGQYTSIPSSLKTVVITGGSSIGNSAFSGCVYLTSVTILNSVTSIGNSAFSSCLYLTNITIPNSVTRIGDHAFGYCGDLTSVTFQGTIPSSGFNSSAFLGDLRGKFYASNSTNGTPGTYTRSGDGTDSSPYTWTKQN

SEQ ID NO: 24883 - DNA, 1044 bp, Unknown
  Obtained from environmental sample
  misc_feature (1)..(1044): n is a, c, g, or t
atgagtatgccgcaccatatcgaccggattggggcgtaccaagaagacgggtctgtaacggtttatcctgatgattacatagacgagacgcttcgaggaaagccaaaacatccacaaattaagcacttggaacgatacaaatggaataagggtgggggagcggcttttgatgaatttagaaaaaggtggctggaagaaattgcccggttagaacgcagcccccaaaaaaacgcttcactgacggtttgctttaatctttcggcaggagaggaattctggaagaagctaagaaaggacaatcccagagacgaagactattactctaagtgtgaggaatatttttacgattgccgggtagttctggatgaattgtacccatatggaaaaaccataaaatgggctacccactatgaggaaaaagaaccccatatgcactgtctgaaaattccgattgttaaggcccctaaacgtttaagcaaaaaagacatagctgcaaagaaaaagcccggtgaggctatgcttaaattttcctctggtgagtttttgggggggcgtgaagggttggcaaaactgcaagacacgatatttgaaaaggttggcaaaaaatggggtttagagcgcggggaacgaggatcggacgcaaaacatactgatcaaattgaatggcaaaaagaattggcattaaaagataaagaattgacgaatggccttaaaatggtgaatgaaatcaaagataaattaaagctgaaagcagaagaattagacaaacgtgaaaattacgttaaaaagacagaaaatgccatagaagagatgaagaaaaaattatcaggggaagaacaaataggtgtagcggtaattactgaacttaatatcaataatgcaagtaaagaagaacggaaaatattttataaagattatttcccaaatatgattaaaaagcttgttaataattttataaaaaaaatacgtgttaaaatgaaaccagtaaagcaaacaaatttaaatgaaaggaaattagataacggtaaaaaaaacacattataa

SEQ ID NO: 24884 - protein, 347 aa, Unknown
  Obtained from environmental sample
  misc_feature (1)..(347): Xaa is any amino acid
MSMPHHIDRIGAYQEDGSVTVYPDDYIDETLRGKPKHPQIKHLERYKWNKGGGAAFDEFRKRWLEEIARLERSPQKNASLTVCFNLSAGEEFWKKLRKDNPRDEDYYSKCEEYFYDCRVVLDELYPYGKTIKWATHYEEKEPHMHCLKIPIVKAPKRLSKKDIAAKKKPGEAMLKFSSGEFLGGREGLAKLQDTIFEKVGKKWGLERGERGSDAKHTDQIEWQKELALKDKELTNGLKMVNEIKDKLKLKAEELDKRENYVKKTENAIEEMKKKLSGEEQIGVAVITELNINNASKEERKIFYKDYFPNMIKKLVNNFIKKIRVKMKPVKQTNLNERKLDNGKKNTL

SEQ ID NO: 24885 - DNA, 660 bp, Unknown
  Obtained from environmental sample
  misc_feature (1)..(660): n is a, c, g, or t
ttgttgaaaatcccaatattcgttatattttttattagggagaaacttatgcctgcaaaaacaccagtgaagaaaacaaaaaaaaccgctaaaaaaacagtcaaaaagacggttaaaaaacccacgaaaaaagtaacttgggacactttagagacaggttttgagagacttcagaaatcacaagatgaagcatgggcagccattcgggaaactcaacaagccgtaaaagagacccaaaaaaatgtcggcggccttaacaactcattaggctctatggttgagcatatattaacccccagcctcccgcaaaaattcaaaaaatttggatattcctttacccgaatagcaagttacaaatacgccgcaggggtctgggcgcaaattgacggaatgcttgaaaacggcactcaagcaatggcagttgaagtcaaattgacacttaggcaaatagatattgacgaccacataaaacgcatggaaaagatacgcaaattcgccgatgaacacggcgacaataggcaattcataggagcgatagccgctataaacatagacgaaacaaccaaaaaatacgccttaaaaaaagggctttttgttatagaaccaagcggcgaagatgtcaaagttacaaaacctgatacagagccacgggtttggtaa

SEQ ID NO: 24886 - protein, 219 aa, Unknown
  Obtained from environmental sample
  misc_feature (1)..(219): Xaa is any amino acid
MLKIPIFVIFFIREKLMPAKTPVKKTKKTAKKTVKKTVKKPTKKVTWDTLETGFERLQKSQDEAWAAIRETQQAVKETQKNVGGLNNSLGSMVEHILTPSLPQKFKKFGYSFTRIASYKYAAGVWAQIDGMLENGTQAMAVEVKLTLRQIDIDDHIKRMEKIRKFADEHGDNRQFIGAIAAINIDETTKKYALKKGLFVIEPSGEDVKVTKPDTEPRVW

SEQ ID NO: 24887 - DNA, 369 bp, Unknown
  Obtained from environmental sample
  misc_feature (1)..(369): n is a, c, g, or t
atggtacaaccacaaacttatttaaaagtcgcggacaacacaggtgcaaaacaacttggcgtaatccgaattttgggcgggtcgtttcgacgctccggcggaatcggtgatatcgttatttgcagtgtcaaggtcgcgacaccgggcggaatcgttaaaaagggcgaggtcgtgcgatgcgttatcgtgcgtacgtgctttacgattaaacgcgcagacggcacgcatattcgtttcgacgacaacgcggcggtcattattgataaagagggaaatccgcgcggaactcgtatctttggaccggtcgcgcgtgaattacgcgaaaaaggttacatgaaaatcgtttcgcttgctccggaggtgctttaa

SEQ ID NO: 24888 - protein, 122 aa, Unknown
  Obtained from environmental sample
  DOMAIN (1)...(122): Ribosomal protein L14p/L23e
  misc_feature (1)..(122): Xaa is any amino acid
MVQPQTYLKVADNTGAKQLGVIRILGGSFRRSGGIGDIVICSVKVATPGGIVKKGEVVRCVIVRTCFTIKRADGTHIRFDDNAAVIIDKEGNPRGTRIFGPVARELREKGYMKIVSLAPEVL

SEQ ID NO: 24889 - DNA, 912 bp, Unknown
  Obtained from environmental sample
  misc_feature (1)..(912): n is a, c, g, or t
atgattcgtcaacatttggcaaaggaatatggaagcggtcaaaataattgctcgatttccaaaatcacgattgaacgtacatcgacgcgcgtgaccgtaaatatttttacaggtcgccctggaatgctgattggtcaaaagggtgcgggaattgataaattgaaaaaagaacttgccgcattcgtcgcgaaaaaggacatcgaggtcaacgttcgcgaggttaaaaacatcgacatcgatgcggtcttggttgcgcaaagtatcgcgacacaactggaaaaacgtattgcttggcgacgtgcaatgaaaatggcaattcaaaaagccatgaaaaacggcgtaaaaggaatcaaggtcatggtcggcggacgcctggacggcgcggacatcgcacgaagcgaacattatcaacagggaatcctgccgctccatacattgcgaagcgatattgatttcggtttcgccgaggcaaacacgacctttggaattatcggcgtaaaatgttggatttgttacggtgaaatcaagggcacaacacgccgcaccggcgaggttgcacgtgccgcaaaccgaccggaacgcagcgaacgaccgcgcgaaggcggacgaaactttggcgaccgacgcccaccgcgtccatttaacgccagtttccgtccaaacagcggagtacaaggcggcgcaccgtcaacgaccggcgcaccacgcacggcggggcacggaaatccgtcagcccaaggtgtctatgttccacgtccacgtcccgagggcgcacccagaccgacaacatcggttcatggtggagcacccgcgcacgcaacgcgaccgactggcgctcaacccgccggcgcaccgaatgctaaaccccgtgtgacgcgcacattcgtgccgaaagcacccagaagggggtaa

SEQ ID NO: 24890 - protein, 303 aa, Unknown
  Obtained from environmental sample
  DOMAIN (30)...(85): KH domain
  misc_feature (1)..(303): Xaa is any amino acid
MIRQHLAKEYGSGQNNCSISKITIERTSTRVTVNIFTGRPGMLIGQKGAGIDKLKKELAAFVAKKDIEVNVREVKNIDIDAVLVAQSIATQLEKRIAWRRAMKMAIQKAMKNGVKGIKVMVGGRLDGADIARSEHYQQGILPLHTLRSDIDFGFAEANTTFGIIGVKCWICYGEIKGTTRRTGEVARAANRPERSERPREGGRNFGDRRPPRPFNASFRPNSGVQGGAPSTTGAPRTAGHGNPSAQGVYVPRPRPEGAPRPTTSVHGGAPAHATRPTGAQPAGAPNAKPRVTRTFVPKAPRRG

SEQ ID NO: 24891 - DNA, 987 bp, Unknown
  Obtained from environmental sample
  misc_feature (1)..(987): n is a, c, g, or t
gtgaaacattttccagcttgttttttatttctgcccctagcttttttatttctntcntgcgcctcagtcggcaatgtttatagaaatattgataacgcggtttatcataacgattntgaaagaggaatcgctgaaataataatcgggcaggaaaagaaaaagcctatatacccggaaaacaacgccgtatcgctttttttggacaagggcctccttgagcattatgcgggaaactacagcagctcatcacgggacctggaaaatgcggaaaggcttatccaggaggcttttacaaaaagcatcaccggggaaattgcttcgtacatcgccaacgataatacgaaagaatacccgggcgaggactacgaggacatttatttaaatgtatttaacgccctgaattattatcacaacaacaatccggaagaagcaatggttgaaattcgtaaaattaccatgtccagcggtaagctggatctgctttcaagaaagtatgaagaggggagaaattttgctacgcaatacttgcttgaaacgctccatcgcatcggttttatgactaacatggaattgcccaaaggagaaccggttgtcttttccgactccgcccttgcccgctatttgagcgcccttttttaccaggggcagggaaaagaggatgacgcccgaatcgagtttagcaggctatacgcggcttttaaaagcaatcccaaaatatattaccaccccattccaaagtccgtagaggacgcccaaaacgtgccgctggggaaagcgcggcttaacgttatcggttttatcgggctatctcccatcaaggaagaacaaatttacaatcaatactttccgttttttaaaaatcccgttctgcgttatactcaatttaagctccccgtactggtgaaaaggcctagcgccatatacaggatacatgtaaaaattcacggcgggcaaagctttgatcttgaactacttgaagatatgtga

SEQ ID NO: 24892 - protein, 328 aa, Unknown
  Obtained from environmental sample
  SIGNAL (1)...(24)
  misc_feature (1)..(328): Xaa is any amino acid
MKHFPACFLFLPLAFLFLSCASVGNVYRNIDNAVYHNDXERGIAEIIIGQEKKKPIYPENNAVSLFLDKGLLEHYAGNYSSSSRDLENAERLIQEAFTKSITGEIASYIANDNTKEYPGEDYEDIYLNVFNALNYYHNNNPEEAMVEIRKITMSSGKLDLLSRKYEEGRNFATQYLLETLHRIGFMTNMELPKGEPVVFSDSALARYLSALFYQGQGKEDDARIEFSRLYAAFKSNPKIYYHPIPKSVEDAQNVPLGKARLNVIGFIGLSPIKEEQIYNQYFPFFKNPVLRYTQFKLPVLVKRPSAIYRIHVKIHGGQSFDLELLEDM

SEQ ID NO: 24893 - DNA, 1371 bp, Unknown
  Obtained from environmental sample
  misc_feature (1)..(1371): n is a, c, g, or t
atgcttggttacgacgacgagccgtgttcgatggagatgaactgggctatggggcagaacatcttgcgggcggccaacgtcgcgagccgccatccgcagttgttcggcgcgtacatcaccaatttcagttgcggcccagactcttttctcgtcggctacttccgcgacataatgaaagacaagccgtcgctgacgctggagcttgacagccacaccgccgacgccggcgttaatacgcgcatagaggcctttttggacatcgtcgcccgatatagggcgctaagcatttcggcaagcgccgacgtcccgttccaaaaggcgtttatcgattactccggaaagaagccgatgttcgtcgcttccgacggcacgcgggcgtcgctaaaggacaagagggtgcacgtgctcttcccgtctatgggttccctcacaagcgacatcttcgccgcagcgttcagcggggcggggatcaacgcctcggctatacccgtctacgataccgaggtgctgaaggtcggcaaggggcacagttcctgcaaggagtgcctgccgctcatactaaccaccggcggattgttgcattacttatcgtcgcgccgcaatagcgacgaatacttggtatacttcatgccaacaagcgggggcaactgccgtctctcccagtacaacgtctacatccgcagcgtcttggaaaagaagcgcgtaaaggacgtgacgctcttgtcattgacaaatgagaacggctacgcggggcttgaagtcaaagatacgctgaacgtgatgaaaggcgcaatcatcgccgacgtaatggaagacgtcaaaaacgccctcagcgtgttggccaaagacaagaagtcggcgatgaagatcttccatgaggagtgggagcggatcttggcgctctttcgcacaggtaaaaccgcgcctctatacaaattgctggacgacgtggccgcgaaactcaaagccatacccatcaaatatccgttgcgcgaagccagagtcatttctctactcggtgaaatctttgtccgcagggattacttcgccgcccaggacttgctcgaacgccttgagaagcgcgagataatagtgaagcgcgccccgctcttcgagtggctggaatattgcgactggaacgtggagaacggcatttttgaggcggatttcggcttgatgggaaaattcgagttcaagatacggcgaatgctgcagctgcgtctggaaagaaagataaagagcgcgctcgcgaaatccgggctttatacttatgaattcgacgagatggacaagatcataaagtacgggcgcgaaattctcgatccgcgcctttacggagaggctattcttgtcgcccggaacgttctttaa

SEQ ID NO: 24894 - protein, 456 aa, Unknown
  Obtained from environmental sample
  misc_feature (1)..(456): Xaa is any amino acid
MLGYDDEPCSMEMNWAMGQNILRAANVASRHPQLFGAYITNFSCGPDSFLVGYFRDIMKDKPSLTLELDSHTADAGVNTRIEAFLDIVARYRALSISASADVPFQKAFIDYSGKKPMFVASDGTRASLKDKRVHVLFPSMGSLTSDIFAAAFSGAGINASAIPVYDTEVLKVGKGHSSCKECLPLILTTGGLLHYLSSRRNSDEYLVYFMPTSGGNCRLSQYNVYIRSVLEKKRVKDVTLLSLTNENGYAGLEVKDTLNVMKGAIIADVMEDVKNALSVLAKDKKSAMKIFHEEWERILALFRTGKTAPLYKLLDDVAAKLKAIPIKYPLREARVISLLGEIFVRRDYFAAQDLLERLEKREIIVKRAPLFEWLEYCDWNVENGIFEADFGLMGKFEFKIRRMLQLRLERKIKSALAKSGLYTYEFDEMDKIIKYGREILDPRLYGEAILVARNVL

SEQ ID NO: 24895 - DNA, 729 bp, Unknown
  Obtained from environmental sample
  misc_feature (1)..(729): n is a, c, g, or t
atgaggcaaatcggcggaaggatgtacatagctctgacaggagcgcttggaagcaagaccgaggcgggatcgatgctttacaaggcgggagacgtaaactcgccgcacattgtcctcttgcctcggggcggaaaccccgacctgccctgcgcgtgggccgccgcgtggtgcgcgtccgcctgccgcatccttgccgacgatcccgccgccaacacttacgacactaaagtaaccggcttgataggcggccaggacttttctttctgggaaaggcaaaagctgcttgaagcgggcattgccacttaccgcctcgacacgacgggcaacgtgcttattgagcggcttgttaccagctacaccgaaaacaccgacggcggaagggacaccagctatcttgacgtgcaggttcccgagaccgtcgacgcggtgcggacttacatcaacgccgaagcgaaaaaaaggttcaagacatggaaacttgccggcaccgaagaaaacttcggctcgggttccaaagttatgacgcccggcgtgttccgttccttccttgccgagctttacagcgaagtattcatcaaggaaaaacagtggtgccaggattttgaaaactacaaaaaatcaattctggtcgaagtcaaaaagggcagcaaaaccaggcttgagtatttgcaccagccgaaccttataggccagttctatatcggcgccgggctgcttcaattcaaataa

SEQ ID NO: 24896 - protein, 242 aa, Unknown
  Obtained from environmental sample
  DOMAIN (1)...(242): Bacteriophage Mu tail sheath protein (GpL)
  misc_feature (1)..(242): Xaa is any amino acid
MRQIGGRMYIALTGALGSKTEAGSMLYKAGDVNSPHIVLLPRGGNPDLPCAWAAAWCASACRILADDPAANTYDTKVTGLIGGQDFSFWERQKLLEAGIATYRLDTTGNVLIERLVTSYTENTDGGRDTSYLDVQVPETVDAVRTYINAEAKKRFKTWKLAGTEENFGSGSKVMTPGVFRSFLAELYSEVFIKEKQWCQDFENYKKSILVEVKKGSKTRLEYLHQPNLIGQFYIGAGLLQFK

SEQ ID NO: 24897 - DNA, 360 bp, Unknown
  Obtained from environmental sample
  misc_feature (1)..(360): n is a, c, g, or t
atggtacttgaaagggtaaagcgggtcatatcggcgaaccttggcgagctgccggttcaggaaaaaggggcgacgtttaagcccgccgggacaaagcgcgaaaccaaggcgggggaggttccggaaaataccggctacaccgaaagccagacgttcgcgtcgctaaagctgaagctcaacgcgacgggcaagctgggcgtcgaagagctgagcaacatgggggaggacaccctcacgatcttcaccaccggcggcaagcaatacatgatgcccaatgcctgggtgatagaacccggcgagctgggcgacgccgaaatggacattgaatacaactcggcaaccagcccgaggctggcgtag

SEQ ID NO: 24898 - protein, 119 aa, Unknown
  Obtained from environmental sample
  misc_feature (1)..(119): Xaa is any amino acid
MVLERVKRVISANLGELPVQEKGATFKPAGTKRETKAGEVPENTGYTESQTFASLKLKLNATGKLGVEELSNMGEDTLTIFTTGGKQYMMPNAWVIEPGELGDAEMDIEYNSATSPRLA

SEQ ID NO: 24899 - DNA, 447 bp, Unknown
  Obtained from environmental sample
  misc_feature (1)..(447): n is a, c, g, or t
atgattaaagtaattgactacaaagcgggaaacgctcctagcgtaatgcacgcaatcaaccgcctcgggtatgaggcgtcattcgcccgtcagggagatgagcttgcggacgcggcttacgtcttactgccgggagtaggcagcgctggggcaactatggaatcgctccgcgaattgaacatgatcggggcattggaagacgcagttctaaaaagaaaaactttttttcttggcatttgcgtcgggatgcaaattctttttcagcacagcgaagaagacgatgcggactgcctcggatggctaaaaggcaatgtaactaaattcgacgcttcaagggccagggttccgcagatgggctggaacaaagttacttttacggaaagcccggttagtaacgcaagggaaggctatttttactttgtaaactcttattatgcgaaaccctaa

SEQ ID NO: 24900 - protein, 148 aa, Unknown
  Obtained from environmental sample
  misc_feature (1)..(148): Xaa is any amino acid
MIKVIDYKAGNAPSVMHAINRLGYEASFARQGDELADAAYVLLPGVGSAGATMESLRELNMIGALEDAVLKRKTFFLGICVGMQILFQHSEEDDADCLGWLKGNVTKFDASRARVPQMGWNKVTFTESPVSNAREGYFYFVNSYYAKP

SEQ ID NO: 24901 - DNA, 1140 bp, Unknown
  Obtained from environmental sample
  misc_feature (1)..(1140): n is a, c, g, or t
atgagccacagagattctgttgcccgcctgccggatggttttaatataacggcaaaaacttcctcttgcattgccgcttgcgaaaatcacgctaaaaaactttacagtacgcaatttcatcccgaaacaaaacacactaaaggcgggaaaaaaattatcagcaggtttttgttcgatatatgcggagcttcgggcgattataaactgaatgattatattgatacgcaggtaaaacaggtgcggaaaaaagtcggcgataaaaaagttttgctcgctttatcgggcggcgtcgattcttccgtatgcgcaagtcttttatccaaggcgatacccggacagcttacctgtatctttgtagatcacgggttaatgcggttaaacgaaggcgacgagatagaaaaagttttttcaaaaagaaaacttcgctttattcgagttaacgcaaaagaccgcttcctttcaaaattaaacggcgtatcagagccggaaagaaaacgtaaaataatcggcgaagaatttatccgtgtatttgaagacgagtcggcgaaattaggcgacattccattcttggcgcagggaacaatctaccccgatgtcgtggaatcgggcggcaagcacggcgctgttatcaagagtcatcacaatgtcggcggacttcccgaaggactcaattttaccgccgttgtagaaccgctgtccggtctttttaaggacgaggtgcgcgtcctcggaagaaagctgaagcttccagcctctcttgtaaaccgccagccgtttcctggccccgggcttgcgattcgcgtcatgggagaagttacggaagaaaagctccaaaccctacgcaaggcggacgcgattctccgcgaagaactggacggtctaaaaaacaggcccgatcagtatttttgcgtatttacaggtacgcgctccgttggcgttaaaggggacgacagaacctacgatttcgtaatcgccgtcagggccgtaaagaccgatgactttatgacctgtgaatacgccccgctgccgcataagctcttaagccgcatttcatcaaggataacggcggaaataccttccgcaagccgcgttgtttacgatattacatcaaagccccccgctacggtagaatgggaataa

SEQ ID NO: 24902 - protein, 379 aa, Unknown
  Obtained from environmental sample
  DOMAIN (288)...(378): GMP synthase C terminal domain
  misc_feature (1)..(379): Xaa is any amino acid
MSHRDSVARLPDGFNITAKTSSCIAACENHAKKLYSTQFHPETKHTKGGKKIISRFLFDICGASGDYKLNDYIDTQVKQVRKKVGDKKVLLALSGGVDSSVCASLLSKAIPGQLTCIFVDHGLMRLNEGDEIEKVFSKRKLRFIRVNAKDRFLSKLNGVSEPERKRKIIGEEFIRVFEDESAKLGDIPFLAQGTIYPDVVESGGKHGAVIKSHHNVGGLPEGLNFTAVVEPLSGLFKDEVRVLGRKLKLPASLVNRQPFPGPGLAIRVMGEVTEEKLQTLRKADAILREELDGLKNRPDQYFCVFTGTRSVGVKGDDRTYDFVIAVRAVKTDDFMTCEYAPLPHKLLSRISSRITAEIPSASRVVYDITSKPPATVEWE

SEQ ID NO: 24903 - DNA, 723 bp, Unknown
  Obtained from environmental sample
  misc_feature (1)..(723): n is a, c, g, or t
ttgacaataagctccccgccgggcaggcgcacccttatatccgcgttcttgtcgcagtatccgtttaagacggctgccacggcggaagcgcaggcgctggttccgcttgcctgcgtctcgccgcttccgcgctcccatacgcgtatctccagatggtttgtggcaataacattaacaaattccgcgttaaccctgtcgggaaacagcggatcgttttcaaacagagggcctatttcttccaaatcaagatcatccagacggttgctgaacaccacggcgtggggattgcccatggaaacgcaggtaatttcgtattcaacgcccccgattgtaacctttcgcgcgatcacgctttcgccggttaaattaacaggtatatcctgcgggcccagtttcgcgcgccccatatcaaccctgacggagcaaacaaccttgttccgcgtggaaagatacagttttttcacgccgctctttgtctctatctgcatatcgcgtttttttacaagaccgttgtcatacaggtattttgccacacagcggatggcgttcccgctcatgctcccctcgctgccgtcaagattgaacatccgcattttcgcgtcggcgatattggatcgcagtatcagcacaacgccgtcgccgcccacgccgaaatgcctgtcggacaaaaacacggacagcgattcaggcgaatcgatttccgtatcaaaacagttgaagtaa

SEQ ID NO: 24904 - protein, 240 aa, Unknown
  Obtained from environmental sample
  misc_feature (1)..(240): Xaa is any amino acid
MTISSPPGRRTLISAFLSQYPFKTAATAEAQALVPLACVSPLPRSHTRISRWFVAITLTNSALTLSGNSGSFSNRGPISSKSRSSRRLLNTTAWGLPMETQVISYSTPPIVTFRAITLSPVKLTGISCGPSFARPISTLTEQTTLFRVERYSFFTPLFVSICISRFFTRPLSYRYFATQRMAFPLMLPSLPSRLNIRIFASAILDRSISTTPSPPTPKCLSDKNTDSDSGESISVSKQLK

SEQ ID NO: 24905 - DNA, 891 bp, Unknown
  Obtained from environmental sample
  misc_feature (1)..(891): n is a, c, g, or t
ttgggcgatccgatggggaatatgacgcctaataacgaacagtatttgataaaccccatctatgaaactgaaattatgaccgaggttgccaaaaaatccgttatgatgccccttgtccggcatcgcccgatgatggggccgtctatcttccttccgacaagagaccggggcggggtacagcttaactggctgactgcatacggtcaaaaaattgaagggagcaagcctaaaggtgcggagcgtgtagaattaaaagcctatactctggctggtttcatcccgtggttcgatgaatttgaagaggatgttttcactgaccttggggctatgttcgtggatgagtttttggaaacatacggtcaggaatttgacaggcaatgcttaacagccgataacgatccgttcacaggggcaatggcctgttccgatgttaccgaggtaactatcaagggaaacagcattgacgatctgacatggaaggatttccgtgatgccgtttataaggttccggcagaagaaaggaaagactgcgcgtggttcatcaatgaaacaatcctaaaccatgtcgccaatatcgaggacaccacgggccgccctatttggcggcggcctacggaggctatgccggggcggttggatttatacccctatcacgaggtttcaatccttccgcagattgcggacattgaggaagaccaggcgtttgcgatatttatgaatccgaagcggatacagcacggaaacaggcggggcatcgagcttaaaaagtttgacgctactactgaaagcctcgaatatggggaattgtttttgaggtttcgcaagagggacggatttctcgttacaaggccgaaagggaacatggtcgttctgaaaactaaggcttcttaa

SEQ ID NO: 24906 - protein, 296 aa, Unknown
  Obtained from environmental sample
  DOMAIN (13)...(293): Phage capsid family
  misc_feature (1)..(296): Xaa is any amino acid
MGDPMGNMTPNNEQYLINPIYETEIMTEVAKKSVMMPLVRHRPMMGPSIFLPTRDRGGVQLNWLTAYGQKIEGSKPKGAERVELKAYTLAGFIPWFDEFEEDVFTDLGAMFVDEFLETYGQEFDRQCLTADNDPFTGAMACSDVTEVTIKGNSIDDLTWKDFRDAVYKVPAEERKDCAWFINETILNHVANIEDTTGRPIWRRPTEAMPGRLDLYPYHEVSILPQIADIEEDQAFAIFMNPKRIQHGNRRGIELKKFDATTESLEYGELFLRFRKRDGFLVTRPKGNMVVLKTKAS

SEQ ID NO: 24907 - DNA, 810 bp, Unknown
  Obtained from environmental sample
  misc_feature (1)..(810): n is a, c, g, or t
gtggctggggtaatttatcttattaaggagaaaaaaatgtcagtaggcagacaggattacgaagaacggaaagaaagcaaaattgacgcttataaagcgagggcaagaaaatcagccatactagccaatcaggaaagcgacaacgcccggaatatgggcagcgtaattccttttggccagcctattttagtaggccatcatagcgaaggcagccaccgagcgcatttgaaaagaattgacagcgcacaccggaaagcttccaaagcctatgataaggctggatattatgaaagcaaagccgccgccgccgaaaataaccattcaattagcggggatgaccctggagcattggagcgttatcaggaaaagctggcagggctggaaaaaacacaggaatatatgaaagccgtaaacaaggcatggaaacagggaaaagccgcccttgttgcgttgggtttatccaaagaagaaagcgaaagattagcaaacgaaaaaacaaagccctgcccgacatggatgctaggcaacaacagcgcagaaatccgcagggtaaaagaaaagatggagacaataaagaaacttgacagcatggaagctgaaaatatcaaattcaacggtggggaaatggttgtaaataccgaaattaatcgggtccagattattttcgatgacatacccgcaccggaaaaaagggcattgctaaaatctcatggcttcaaatggtctccatcggaaaaagcatggcaaaggcaaagaacaataaacgccatcaatactgtcaaacgccttattaaggagttagtgctatga

SEQ ID NO: 24908 - protein, 269 aa, Unknown
  Obtained from environmental sample
  misc_feature (1)..(269): Xaa is any amino acid
MAGVIYLIKEKKMSVGRQDYEERKESKIDAYKARARKSAILANQESDNARNMGSVIPFGQPILVGHHSEGSHRAHLKRIDSAHRKASKAYDKAGYYESKAAAAENNHSISGDDPGALERYQEKLAGLEKTQEYMKAVNKAWKQGKAALVALGLSKEESERLANEKTKPCPTWMLGNNSAEIRRVKEKMETIKKLDSMEAENIKFNGGEMVVNTEINRVQIIFDDIPAPEKRALLKSHGFKWSPSEKAWQRQRTINAINTVKRLIKELVL

SEQ ID NO: 24909 - DNA, 783 bp, Unknown
  Obtained from environmental sample
  misc_feature (1)..(783): n is a, c, g, or t
ttggtttatccaccgataattgtaaagaataaaatgaaagcgttcatagcggcggcgctccttatacttattatcggaaatatacaggcggtcgatataaattcttaccaatttattgaccacatcaggagtatctccaagccggggaaacctgaaattttcgaagacggcgtgctctttaccgcttcctccacctatcgcaaggtaggtatttcctttgcccacgaaggctatgcaaaagtttactggttcaggcagcttttgattccaagggactcttctgaattgtatctcaacaacaaacctataaaaggagtagagcccactattgattcaggaataatgttccacatcgaaacaatccccgcagacctgaaaaatctggattaccgcctaataattgacggcctttggacaacggatccctcaaacccaatcagcgttacaggcccatccggcattacggagtcccgggtcatactgccggaaaaagccaagccttacctggatgcagtccagcccggcacttacaggttcacctaccgctcagatcccggcgaattaattaccgtgggcggaagcttcaacaactgggatcctttcatgtacgagttaaaggaaatctaccccggattctataccttaacccttccgcttcctccgggaagttttcaatatgtatttttccatcggggagaacagattcctgatcctgagaaccccagaaggctctatagccgggagggaagggtaatctcggaaggccaagttgcccagtggtaa

SEQ ID NO: 24910 - protein, 260 aa, Unknown
  Obtained from environmental sample
  misc_feature (1)..(260): Xaa is any amino acid
MVYPPIIVKNKMKAFIAAALLILIIGNIQAVDINSYQFIDHIRSISKPGKPEIFEDGVLFTASSTYRKVGISFAHEGYAKVYWFRQLLIPRDSSELYLNNKPIKGVEPTIDSGIMFHIETIPADLKNLDYRLIIDGLWTTDPSNPISVTGPSGITESRVILPEKAKPYLDAVQPGTYRFTYRSDPGELITVGGSFNNWDPFMYELKEIYPGFYTLTLPLPPGSFQYVFFHRGEQIPDPENPRRLYSREGRVISEGQVAQW

SEQ ID NO: 24911 - DNA, 549 bp, Unknown
  Obtained from environmental sample
  misc_feature (1)..(549): n is a, c, g, or t
ttggggctggcaccgcctattttacaccacagaaaggccaatatgccactgctcaggtttttctttagggacgctggctctttttgggacacattcccaaccatgcgccctgaatgccgcgaggccaagctatgcttcaccaatggctgcttcgaccttttgcaccccggccatgtgcagtacctagaagacgcaagggcgctgggggatttcttgatagtgggcctcaacagcgacgagagcgtggcgaggctgaaagggccgagccgccccctgcagaacttggaagcccgtgcgatggtgctgctggggctaaagagcgttggcgcggtaatcagcttcgatgaggacactccagccaagctgattgagcaaatgcagcccgacgtgctgataaagggcggggactatgccctagaccaagtcgttgggcgcgacaccgtggaaaagcgggggggcaagacggcgataatcccattccttgacggccatagcacgtctgccatcgtccacaggatacaaattggcaagggtgttgcgttaccttga

SEQ ID NO: 24912 - protein, 182 aa, Unknown
  Obtained from environmental sample
  DOMAIN (46)...(172): Cytidylyltransferase
  misc_feature (1)..(182): Xaa is any amino acid
MGLAPPILHHRKANMPLLRFFFRDAGSFWDTFPTMRPECREAKLCFTNGCFDLLHPGHVQYLEDARALGDFLIVGLNSDESVARLKGPSRPLQNLEARAMVLLGLKSVGAVISFDEDTPAKLIEQMQPDVLIKGGDYALDQVVGRDTVEKRGGKTAIIPFLDGHSTSAIVHRIQIGKGVALP

SEQ ID NO: 24913 - DNA, 687 bp, Unknown
  Obtained from environmental sample
  misc_feature (1)..(687): n is a, c, g, or t
ttggcgggggaagcatcgcagattgtgctggggataaagctgaaaaaccgctggcaggatcaaagaacggttgaaaagataaaagaaataatcgcctcgtatggtatttccgatgttactgccgtttctgtcagatcgtggcgcgattacaacagatctttttttggcgcacttagaaccgaaaagcttatgatgtttattcttgtggggcttatctttatagtggttgggctaaatatttttcaggcgcaaaggcgcgttgttctggaacgccgggaggagatcggccttttgcgggcgcttggagcttcaagtacggctgtgcgcctggttttcgtttgggacggttttatcatcgggcttgccggagccgtacttggccttgttccggggcttctcattgcgtataacatccaggcgtttttctcgatacttgaaagggcggtgaatttttgcatcgctattttcaattctgttttcggttttattggcgggtattccggccagggggattttgccgtgttttccacgcaggttttttatttaaaggagattccttccagggttatcccgcatgaagtggtattgattttcctgtttggctttttttcggcacttttggcggcgtggttcgcgtcgggaaaagtttccgcaacaaagcctgcggaggttttacgttatgagtga

SEQ ID NO: 24914 - protein, 228 aa, Unknown
  Obtained from environmental sample
  DOMAIN (7)...(221): Predicted permease
  misc_feature (1)..(228): Xaa is any amino acid
MAGEASQIVLGIKLKNRWQDQRTVEKIKEIIASYGISDVTAVSVRSWRDYNRSFFGALRTEKLMMFILVGLIFIVVGLNIFQAQRRVVLERREEIGLLRALGASSTAVRLVFVWDGFIIGLAGAVLGLVPGLLIAYNIQAFFSILERAVNFCIAIFNSVFGFIGGYSGQGDFAVFSTQVFYLKEIPSRVIPHEVVLIFLFGFFSALLAAWFASGKVSATKPAEVLRYE

SEQ ID NO: 24915 - DNA, 414 bp, Unknown
  Obtained from environmental sample
  misc_feature (1)..(414): n is a, c, g, or t
ttgctgaaagattttaccgccctggagaacgtaatgcttcctctttatatgatgggcagccgcaaaaaagccgcaattgaaaaggccagagttttattgtccgacatgaaacttgaaaaccgccagagccattacccttcacaactgtcaggcggtgagcggcagcgggtggcggcggcgcgggctatggtaaacgatcccgacataattctggcggatgagccaacgggaaacctggatcccggcaacagcgctctggtggcggagctgctttacgccggcgcggaaaaatggggcaagacgctcattgtggttacacataacgaaagcgttgcgtcccgcgccaaagtacgctatgttcttgaaaacggccttcttgatgccgaggatctatccggaagggaagccccttga

SEQ ID NO: 24916 - protein, 137 aa, Unknown
  Obtained from environmental sample
  DOMAIN (2)...(124): ABC transporter
  misc_feature (1)..(137): Xaa is any amino acid
MLKDFTALENVMLPLYMMGSRKKAAIEKARVLLSDMKLENRQSHYPSQLSGGERQRVAAARAMVNDPDIILADEPTGNLDPGNSALVAELLYAGAEKWGKTLIVVTHNESVASRAKVRYVLENGLLDAEDLSGREAP

SEQ ID NO: 24917 - DNA, 1110 bp, Unknown
  Obtained from environmental sample
  misc_feature (1)..(1110): n is a, c, g, or t
atgattcctcaaatgtctaaaaccaccgtgagcgtaaaagcgcacatcggtactataacgcaaaaccttcctttttttcaccgttccatgcgtgatttttcagagtatcacgaactaaaaacagaggatttggaattgcttaaaactactatcggcgtaatgattggcaaagattatgaaattatggatcaggctttaatcgcgggtctttattatgagcgcggccagcttatagacgctgttcatcatgcccttatcggaaagaaagcctgcggagaagggatgcatcccgaaacacgtttttcaattaacatgattctggcggcggtactctatgcgatgggtgattttcgggatgccggtaatgttatagcgcaaacggaagtctttattggagaaaaggcgcggtttttatatcctaatttcaagtctctgcaaacagaacgcgttatacgattaggcgatatagcagccgcaaaggaatggctggctgtgtacgcgaactgcgcacagcggttgccgttttatcaaatatgcaggcactttacatctctccgttcctatatcgcgcttgaagattttaaggcggctgttgattttggtaaacgcatacatgaactggcaacagattacaaacgcccgcttgaccggattgaaagcggcatactgacggcaatcgccttatggaaaaagggcgataaatacaacgccgtggcggaaatggaacaagccctgcttattgccgcgccttacggatttatacagttgtttatcaacgaaggcaaagaaattctgcctttgttgtggatgatccgcaaaaaaactgacatagattcgcagttggcgcaatttattgacacgcttacgcacagaatctccgggttttacgaaggtcggaaggaacttgaacaagcgccgcgtctttccgctatgcgccgtaaaatgcttgaatatctatacaagggtatgtcttataacgagattgctgataaaaccggcattgtacgcgggacggtaaaaaggcatattcttcttttatataaaaaattaggggtaaacagcagcgaggaagctgttataaaagcaaaaatgttgggcttgctggagtga

SEQ ID NO: 24918 - protein, 369 aa, Unknown
  Obtained from environmental sample
  DOMAIN (298)...(350): Sigma-70, region 4
  misc_feature (1)..(369): Xaa is any amino acid
MIPQMSKTTVSVKAHIGTITQNLPFFHRSMRDFSEYHELKTEDLELLKTTIGVMIGKDYEIMDQALIAGLYYERGQLIDAVHHALIGKKACGEGMHPETRFSINMILAAVLYAMGDFRDAGNVIAQTEVFIGEKARFLYPNFKSLQTERVIRLGDIAAAKEWLAVYANCAQRLPFYQICRHFTSLRSYIALEDFKAAVDFGKRIHELATDYKRPLDRIESGILTAIALWKKGDKYNAVAEMEQALLIAAPYGFIQLFINEGKEILPLLWMIRKKTDIDSQLAQFIDTLTHRISGFYEGRKELEQAPRLSAMRRKMLEYLYKGMSYNEIADKTGIVRGTVKRHILLLYKKLGVNSSEEAVIKAKMLGLLE

SEQ ID NO: 24919 - DNA, 459 bp, Unknown
  Obtained from environmental sample
  misc_feature (1)..(459): n is a, c, g, or t
ttggctgaacagttcaagtcaagaaaggcgaagaaaacgtacattgccattgtcagcggaattccaaaagaaaaaaaaggccgcatagaggcctacatcgccagagacccaaaagatcgcaagcgtttcacggtaagcgccccgggtcttggcccgggcaagggccgggcttctctgacgctttactcggtaataaagacatggagagcccactcgctgctgctattgaggccaaaaacaggcagaactcaccagattcgcgtgcacctccgccatcttgggcatcctgtcatgggcgatattgtttatggcttcacagacccggttgctcccaacgcaagcctgatgctccattcaagaagcctcgcgatcaccctgcccggcgaagctgaacagcgtatttttaaagctccgctgccggagcgctttacaacgatgattaaattgctggcaaagtaa

SEQ ID NO: 24920 - protein, 152 aa, Unknown
  Obtained from environmental sample
  DOMAIN (1)...(92): RNA pseudouridylate synthase
  misc_feature (1)..(152): Xaa is any amino acid
MAEQFKSRKAKKTYIAIVSGIPKEKKGRIEAYIARDPKDRKRFTVSAPGLGPGKGRASLTLYSVIKTWRAHSLLLLRPKTGRTHQIRVHLRHLGHPVMGDIVYGFTDPVAPNASLMLHSRSLAITLPGEAEQRIFKAPLPERFTTMIKLLAK

SEQ ID NO: 24921 - DNA, 582 bp, Unknown
  Obtained from environmental sample
  misc_feature (1)..(582): n is a, c, g, or t
atggaaattttcttgcaatgctggggcggaatatgctacctgttatccaaggtctttattgtccgcgccgaatttttatcatatgacagaaattgccgccttattggatggattctcaatttattgggtttaccggcatgggtcattttatttataagcaggcaaaactggattgccgcggcggttgaagtagcggggattccttcgctggttcttggcatagttattacctggaaacagaataataatccaaacaaatatatcgactggtcagtcagggcatttaccggaattacgattttattgggaataattttcagcatatatacctttggcggcataaaaaaatttacgcaggttttggaattaataatcattttcggaattcttgtgagctattatttactcgcgaggagaaacccgtacgcgtggcttacgtttacatcgggccatattagtaccggcactttaatgtacatacaaaacaagccaatactgtttatccagcaaatgctttcactgattcccgcgataatcggattcaggatatgcatgaaaaaagccaaagtactaaatgtttaa

SEQ ID NO: 24922 - protein, 193 aa, Unknown
  Obtained from environmental sample
  misc_feature (1)..(193): Xaa is any amino acid
MEIFLQCWGGICYLLSKVFIVRAEFLSYDRNCRLIGWILNLLGLPAWVILFISRQNWIAAAVEVAGIPSLVLGIVITWKQNNNPNKYIDWSVRAFTGITILLGIIFSIYTFGGIKKFTQVLELIIIFGILVSYYLLARRNPYAWLTFTSGHISTGTLMYIQNKPILFIQQMLSLIPAIIGFRICMKKAKVLNV

SEQ ID NO: 24923 - DNA, 486 bp, Unknown
  Obtained from environmental sample
  misc_feature (1)..(486): n is a, c, g, or t
atgcatgaaaaaagccaaagtactaaatgtttaaagagaaaagttatgcacaaattatctgacaggacggcggggtttaccgattcagtcattcgcagaatgacgcgcatatcgctaaagtacggagcggtcaacctttcgcagggatttccggattttgatccgccaaaggaaatgttggaccggttagcggcaatagcgcacactgggccgcatcagtattctattacctggggcgcgcaaaatttccgcgaggctctttctgataaacagtcaaaactaatgggcaggcaaattgatccggaacgcgaaatagttgtgacttgcggcagtaccgaggcaatgatggccgcaatgatgacggtcgtgaatccaggcgaacaggtattgtattctctccgttttatgaaaactacggcgcggacacgatcctgtccggcgcccagccatctatgtaccgctgcgtccgccnttctttcactttga

SEQ ID NO: 24924 - protein, 161 aa, Unknown
  Obtained from environmental sample
  misc_feature (1)..(161): Xaa is any amino acid
MHEKSQSTKCLKRKVMHKLSDRTAGFTDSVIRRMTRISLKYGAVNLSQGFPDFDPPKEMLDRLAAIAHTGPHQYSITWGAQNFREALSDKQSKLMGRQIDPEREIVVTCGSTEAMMAAMMTVVNPGEQVLYSLRFMKTTARTRSCPAPSHLCTAASAXLSL

SEQ ID NO: 24925 - DNA, 1275 bp, Unknown
  Obtained from environmental sample
  misc_feature (1)..(1275): n is a, c, g, or t
gtggttcttgccgacatgaagcagactcgtgaactggcggcgaaattcaacgcaaagcaagaccctgctcaccccgagcgttttataaaagcgggtcatctttacgcaatggggcttatcgacgagatacttcactttgttgtcgccctttaccgagaagaagttcaaggcgatgtttttgaaaccgcactggacaggctcgatagcaacctcggcgaaaaacagacaagcggtctgttaaaaactttttccgatcaatttcctccgcgccccgtttataaaggcgagaaaaaagttgatgaatacttgaagagcaaggaagaaggcgaaagctgccgagccctctccatcgaagaaactatgcttctctctctggcaaatcttaatccggctttcaagccgttcaaatttttatttgacgataaagacctcgagaaaaaaaccgtctatcccgacgccatcgaagaattaaaagcgcacttaaaagaaatgccggttttcggtccggacggaatgaacctttgggatttccttcgctcccccgccattgcctgccccgactctcttttcggacagcttgaatatatgcgaaaacattgggggcttctcatttccaagttcatggcgcgtctgctcatggctctcgatgtaataaacgaagaagaaaaaccgagtttcttcggaccgggaccgagcgaagttttaacatttgcgggtctcgatgaatatgaaagattcagtcccgatcaggattggatgcccaagacggtactaatggcgaaaagcacgctcgtctggcttttccaactttcgcaaaaatacaaaagagacattacccgcctcgaccaaattcccgatgaagaacttgacgagttatcaaggagaggatttacggggctgtggcttatcggtctttgggaacgaagccaagcgagcaagacgataaaacaatggacaggcaatcccgaagcggcggcatccgcttacagtttgcacgattatgatattgccggcgaactcggcggctggggggcgctcaccaatttgcgtgaacgctgtatgcacagaggcatccgcctcggctccgatatggttcccaaccacacaggcatcgatagccgttggatgatcgaacaccccgatcgtttcctgcaactgccctacccgcctttcccgacatacaactacaactgcggcaacctttcaggcagagacgacataaccgttcaaattgaagaacatattttcacgaagcgacgctctcggccgatctga

SEQ ID NO: 24926 - protein, 424 aa, Unknown
  Obtained from environmental sample
  misc_feature (1)..(424): Xaa is any amino acid
MVLADMKQTRELAAKFNAKQDPAHPERFIKAGHLYAMGLIDEILHFVVALYREEVQGDVFETALDRLDSNLGEKQTSGLLKTFSDQFPPRPVYKGEKKVDEYLKSKEEGESCRALSIEETMLLSLANLNPAFKPFKFLFDDKDLEKKTVYPDAIEELKAHLKEMPVFGPDGMNLWDFLRSPAIACPDSLFGQLEYMRKHWGLLISKFMARLLMALDVINEEEKPSFFGPGPSEVLTFAGLDEYERFSPDQDWMPKTVLMAKSTLVWLFQLSQKYKRDITRLDQIPDEELDELSRRGFTGLWLIGLWERSQASKTIKQWTGNPEAAASAYSLHDYDIAGELGGWGALTNLRERCMHRGIRLGSDMVPNHTGIDSRWMIEHPDRFLQLPYPPFPTYNYNCGNLSGRDDITVQIEEHIFTKRRSRPI

SEQ ID NO: 24927 - DNA, 312 bp, Unknown
  Obtained from environmental sample
  misc_feature (1)..(312): n is a, c, g, or t
gtgaatatctcgccggagaggcttataaatgtgctaggcataaattcgaaaaaggtgcctgtggggaacttcacgggaactggtatgcatggtggccgtatttttatacgaactgacaaggaacttgtcgcacttccagcgcaagtgatagtggatgtggcatctgatgaagatttgcaggaaataaaaccttatatctccgaatttgctaatttctttaatatggacgcgcagcagcttataaaagagaaattttatatgttaaggccaaacgcgaaaaatccgtataaacagttgtacaccacgaattaa

SEQ ID NO: 24928 - protein, 103 aa, Unknown
  Obtained from environmental sample
  misc_feature (1)..(103): Xaa is any amino acid
MNISPERLINVLGINSKKVPVGNFTGTGMHGGRIFIRTDKELVALPAQVIVDVASDEDLQEIKPYISEFANFFNMDAQQLIKEKFYMLRPNAKNPYKQLYTTN

SEQ ID NO: 24929 - DNA, 537 bp, Unknown
  Obtained from environmental sample
  misc_feature (1)..(537): n is a, c, g, or t
atgccagaaaagaaaaataaaacaaagcaatttattaaagttgttttagatacaaacatattagtgtcatctctgatttctgcaaaagggtgtccatctgaaatagtaacgctgattcgcataaataagttgcaaccttattataatactgaaattatgaatgaatataatcgtgtattgcgttatcaaaggttacagattacgcctctggaaataagcgtaattataaatctaattctgagaaaaggtgttgctatggaaacggagaaaagtacaaaagaaatgatagacgaaagcgacaggaaattttatgatttgcataaagcagcaaatgcaattttaatcactggaaacataaagcattttccaaaagaatattccataatgaaacccgctgattttttagaatattcaaagcacttatatataaataatcacttcccactcaataatagcaaggggcttatgcgtaacatcataaagccaaagcacccaaaccagctttctttaatttgggctatagtaaatgctgattaa

SEQ ID NO: 24930 - protein, 178 aa, Unknown
  Obtained from environmental sample
  misc_feature (1)..(178): Xaa is any amino acid
MPEKKNKTKQFIKVVLDTNILVSSLISAKGCPSEIVTLIRINKLQPYYNTEIMNEYNRVLRYQRLQITPLEISVIINLILRKGVAMETEKSTKEMIDESDRKFYDLHKAANAILITGNIKHFPKEYSIMKPADFLEYSKHLYINNHFPLNNSKGLMRNIIKPKHPNQLSLIWAIVNAD

SEQ ID NO: 24931 - DNA, 501 bp, Unknown
  Obtained from environmental sample
  misc_feature (1)..(501): n is a, c, g, or t
ttgagcggctttagtttggcctgtaacttgagccgggggttggatctgggctggagtaccgcttccctgcgcagtttgtgtgggttgagttggctgtgtactttgcgcagtttgtgtgggctgagttggctgcgtaccttgaccttgcgcagtttgcgcgggctgaatcgactgtgtaccttgcgcagtttgtgtgggttgagttggctgtgtactttgcgcagtttgtgtgggctgagttggctgtgtaccttgcgcagtttgtgtgggctgagttggctgtgtaccttgcgcagtttgtgtgggctgagttggctgtgtgcttggcgtctgtgcgggctgagtggccgtgaccctgccggagccggggttttcgcctgtaacaggaaccttgatgtattgcaaatccgctccaagtccccgcaggcgggcggaactatcattcaacagattctgcgtattttccgcgttaccgtcagaaatcaggacaatcttttttga

SEQ ID NO: 24932 - protein, 166 aa, Unknown
  Obtained from environmental sample
  misc_feature (1)..(166): Xaa is any amino acid
MSGFSLACNLSRGLDLGWSTASLRSLCGLSWLCTLRSLCGLSWLRTLTLRSLRGLNRLCTLRSLCGLSWLCTLRSLCGLSWLCTLRSLCGLSWLCTLRSLCGLSWLCAWRLCGLSGRDPAGAGVFACNRNLDVLQIRSKSPQAGGTIIQQILRIFRVTVRNQDNLF

SEQ ID NO: 24933 - DNA, 459 bp, Unknown
  Obtained from environmental sample
  misc_feature (1)..(459): n is a, c, g, or t
atgatagttccgcccgcctgcggggacttggagcggatttgcaatacatcaaggttcctgttacaggcgaaaaccccggctccggcagggtcacggccactcagcccgcacagacgccaagcacacagccaactcagcccacacaaactgcgcaaggtacacagccaactcagcccacacaaactgcgcaaggtacacagccaactcagcccacacaaactgcgcaaagtacacagccaactcaacccacacaaactgcgcaaggtacacagtcgattcagcccgcgcaaactgcgcaaggtcaaggtacgcagccaactcagcccacacaaactgcgcaaagtacacagccaactcaacccacacaaactgcgcagggaagcggtactccagcccagatccaacccccggctcaagttacaggccaaactaaagccgctcaaacatcttccggagtaa

SEQ ID NO: 24934 - protein, 152 aa, Unknown
  Obtained from environmental sample
  misc_feature (1)..(152): Xaa is any amino acid
MIVPPACGDLERICNTSRFLLQAKTPAPAGSRPLSPHRRQAHSQLSPHKLRKVHSQLSPHKLRKVHSQLSPHKLRKVHSQLNPHKLRKVHSRFSPRKLRKVKVRSQLSPHKLRKVHSQLNPHKLRREAVLQPRSNPRLKLQAKLKPLKHLPE

SEQ ID NO: 24935 - DNA, 1089 bp, Unknown
  Obtained from environmental sample
  misc_feature (1)..(1089): n is a, c, g, or t
atgcccccggcatccttttttccgtccatgctcagccatcattcattcagtcctatccatccttccatgctgaatgtagatgactggacaaattcgcccccggtatccaacgggcctttccgaatcaccaaaatggacgaagacaaaatcgtctttgaaaaaacagataattactgggatgccaaagatgtttccctgaataaaatcaccgccagattcaccgagaccggcgaagacgcaagccgcctgtggaactcgggcgaagcgcgctggatttccggcgatgtggacattgacgcgctgacagaccgcagcggcattcaggtaaacgccatttttgccactcattactattttatccgttcaggtgaaaagccctggaatgaccatcgcctgcgccgagcccttattctggttctgccttgggacgagatccgcgcagggcattaccacccggcaaagacgctgatctaccctttgcccggctaccctaaaatcgcggggctttctgaaaccagcgccgatgaagcggtttctctgcttgccaaagcaggtttccccggaggcgcgggaattcccgaactggtattacgcataacaccatcattggaagccgcccgtataaccagccttatggcaaacgcctggaaagaacagcttggtattccggtacgggtggaagtggttccctactcccggtatttccaggcgctaaaagcagacggttataatgtaggctataccacatggataggcgactttgccgatccctatacctttctgcaaatgtggcggcgggattccaacctgaacgactccggctacaatgatgatgactacgaagcgttgatggaaaaatccatgcttgaagaaggttcggcgcggtgggcgattcttgccgaggctgagcagctcctccttgaacgcggctccgtacttcccatttccttcagccaggcgatcaacattgtagacatgggagaactggaaggctggttccccaacgctctggacatccatccctttaaatatcttacattcaaggcgttccgccccctgcccggggtggtcatgggaaatagcaggtag

SEQ ID NO: 24936 - protein, 362 aa, Unknown
  Obtained from environmental sample
  DOMAIN (5)...(272): Bacterial extracellular solute-binding proteins, family 5 Middle
  misc_feature (1)..(362): Xaa is any amino acid
MPPASFFPSMLSHHSFSPIHPSMLNVDDWTNSPPVSNGPFRITKMDEDKIVFEKTDNYWDAKDVSLNKITARFTETGEDASRLWNSGEARWISGDVDIDALTDRSGIQVNAIFATHYYFIRSGEKPWNDHRLRRALILVLPWDEIRAGHYHPAKTLIYPLPGYPKIAGLSETSADEAVSLLAKAGFPGGAGIPELVLRITPSLEAARITSLMANAWKEQLGIPVRVEVVPYSRYFQALKADGYNVGYTTWIGDFADPYTFLQMWRRDSNLNDSGYNDDDYEALMEKSMLEEGSARWAILAEAEQLLLERGSVLPISFSQAINIVDMGELEGWFPNALDIHPFKYLTFKAFRPLPGVVMGNSR

SEQ ID NO: 24937 - DNA, 1005 bp, Unknown
  Obtained from environmental sample
  misc_feature (1)..(1005): n is a, c, g, or t
atgttaggtgaaacccgcatattgccgaaaaactttgtcgaggacgtaataatgaaagtcccgtcccgcgacataatgaacaaactggcttcttcgatacttgccctgtatccctatgatgaagacccggagaatcaatctccggaaaacattctgcgccagtgcatagaattaatagcgcgtttcccggcaattgccgcatattcctatatgtcaaagaaacaccattttgaccgcgaaagtttaataatccacccctccgatccgtcattatcaagcgcggaaactgttctttcgcttataaggccggataaaaaatacaccccctacgaagctatgttattagaccttgccctagtgcttcacgctgaacacggcggcggaaataactccacgtttaccgtacatgttgtttcgtcttcggaaacagacacctactccgcgattgccgccggtatcggttcgctaaaaggctacaaacacggcggagcaaacgcgaaagtaatcggcatgatggatgagatcatgaagaatgtcaaaaactgggaaagcgaagaagaagtgtccgcctaccttgaaaaaattcttaaaggacaggcttatgacagaacaaaaaaaatctacggtcagggacacgcggtttatacactatcagacccgcgcgcgatcttgttacgcgataaagcaagagctctggcggaagaaaaaggaatgataaaagaatttaatctttattgcctgattgaaaagcttactcccatagtgtttaaaaaagttaaaggctcagataaggacatttgcagcaatgtggatttttattcaggctttgtttataaaatgcttgacattccccaggacttaaacacccctattttcgccataagcagaatagcgggctggtgcgcgcatcgcctggaagaaattatagccggcggcaggattatcaggcccgcgtacaagtgtgtccaaccgcggttgaaatatactgatgtaaatggtaggtaa

SEQ ID NO: 24938 - protein, 334 aa, Unknown
  Obtained from environmental sample
  DOMAIN (5)...(317): Citrate synthase
  misc_feature (1)..(334): Xaa is any amino acid
MLGETRILPKNFVEDVIMKVPSRDIMNKLASSILALYPYDEDPENQSPENILRQCIELIARFPAIAAYSYMSKKHHFDRESLIIHPSDPSLSSAETVLSLIRPDKKYTPYEAMLLDLALVLHAEHGGGNNSTFTVHVVSSSETDTYSAIAAGIGSLKGYKHGGANAKVIGMMDEIMKNVKNWESEEEVSAYLEKILKGQAYDRTKKIYGQGHAVYTLSDPRAILLRDKARALAEEKGMIKEFNLYCLIEKLTPIVFKKVKGSDKDICSNVDFYSGFVYKMLDIPQDLNTPIFAISRIAGWCAHRLEEIIAGGRIIRPAYKCVQPRLKYTDVNGR

SEQ ID NO: 24939 - DNA, 426 bp, Unknown
  Obtained from environmental sample
  misc_feature (1)..(426): n is a, c, g, or t
ttgaaggactggtggaatagcctctgcttttgcagcgcagagtttacgggcttgaacatattgaaacagccgcttgcgaattttcctggtgcaaattcaacaaggtttttcgctatacaaaaaaatagccctcccatagacgaggctttgcacacaaaaacttctgtggcatttattttggggaataataaacctggtgctttgcactcttgccttggctgctttgcaaaatatgatgtggatttaattcgcattgagagccgccctaaaagcgggagcccttgggaatatgttttttatgcggatttggctgggaatcctttgcagacacccgttaaaatggctttggatgaattgaaaacaatagcagaggttattttgctcggaagttatgcaaaaggcgaaagcaggggagtggaattttga

SEQ ID NO: 24940 - protein, 141 aa, Unknown
  Obtained from environmental sample
  DOMAIN (55)...(131): ACT domain
  misc_feature (1)..(141): Xaa is any amino acid
MKDWWNSLCFCSAEFTGLNILKQPLANFPGANSTRFFAIQKNSPPIDEALHTKTSVAFILGNNKPGALHSCLGCFAKYDVDLIRIESRPKSGSPWEYVFYADLAGNPLQTPVKMALDELKTIAEVILLGSYAKGESRGVEF

SEQ ID NO: 24941 - DNA, 1038 bp, Unknown
  Obtained from environmental sample
  misc_feature (1)..(1038): n is a, c, g, or t
ttgaataatatcaaaaaagcaatagcggaattcaaagcaggcaaaatattgcttatcgcagatagcgaaagccgcgagagcgagggcgattttgtttgcgctggctcgctttgcaccgaaaagcacataaattttatggtgactcatgggcgcgggcttgtttgcgcacccatcaccgaacaacgtgcagagcagctgaatttgcagatgatggcaagcagaaacacaagccgctttgaaacagcattcaccgtttctgtggaagcaaaagagggaacaaccaccggaatttccgcagcggaaagggctttaacctgccgtacgcttgcaaatttttcaaaacgcgcaaacgattttgtttgccccgggcatatatttccgctaaaagcgagaaatggcggctgccttgaaagagaaggacatacggaagcggttatagacctttgcaaattggctaaattgccgcaagtaggcgtgttgtgcgaagtgctgaattcagatggcacaatggctagaatgcctcaattaaaggctattgcaaaaaaacacaatataacacttgtcacggttcaagatataatagactttcgccttgcaaatgaaattttagtagagcgaattgcacagccttttgtgccaacaaaatttggaaatttcaaaaccatagcatacaaaaataaaataaacggcgaggaatatgtcgcttttatagcatcaaaggtgcccaaaaatccgtgcaatgttcgagtgcacagcgaatgtttaaccggagatatattccattcccttaaatgcgactgcggggcacagcttgaatattctatgaaatatatagccgcacaaggcggagttttcatttatatgcttgggcacgagggcaggggaattgggcttgcaaataagttaaaggcttacgaattgcaggaaaaaggattagacacggttgaagctaacataaaactcggctttaaggcagaccacaggaactacgcttatgccgctcatattttaaaaaagcttgngcataaaattccgtga

SEQ ID NO: 24942 - protein, 345 aa, Unknown
  Obtained from environmental sample
  DOMAIN (204)...(342): GTP cyclohydrolase II
  misc_feature (1)..(345): Xaa is any amino acid
MNNIKKAIAEFKAGKILLIADSESRESEGDFVCAGSLCTEKHINFMVTHGRGLVCAPITEQRAEQLNLQMMASRNTSRFETAFTVSVEAKEGTTTGISAAERALTCRTLANFSKRANDFVCPGHIFPLKARNGGCLEREGHTEAVIDLCKLAKLPQVGVLCEVLNSDGTMARMPQLKAIAKKHNITLVTVQDIIDFRLANEILVERIAQPFVPTKFGNFKTIAYKNKINGEEYVAFIASKVPKNPCNVRVHSECLTGDIFHSLKCDCGAQLEYSMKYIAAQGGVFIYMLGHEGRGIGLANKLKAYELQEKGLDTVEANIKLGFKADHRNYAYAAHILKKLXHKIP

SEQ ID NO: 24943 - DNA, 660 bp, Unknown
  Obtained from environmental sample
  misc_feature (1)..(660): n is a, c, g, or t
ttggccgaatttatggcctttttatttgaccttcacggacagcacaaccatgagtcccttttgaaaaaagaaaaccaccgccgctatcttgaccgttttgcaggtatcgaagacgaggttcttgccttttacaaaatttttctggagttaaccgacaagcgcaaatctttggaagcgtctttgaaaagcgaccgcgaaagggaagaaaggctggaaattttaaattatgccgtagacgagattaccaaagccgcgatccacgcgggggaaatccgcgagttggaaaacgaactgcaaaaactttcggattttgaaaggctggctggccttattcataccgcctcggacaatttttttgacggagaacaatcggtgttaagccttgcgcgcaaaacaaaaaattccgtagacggcgcaagcgcggtagattcatcattaagtgaaatctacagaaggctggaaaatctgtactacgaagccgaggatatcgccggcgattttcgcgcttacagggatagtttaacatttgatccgcgccggctggaagaagtaaacgaaagacttgccctgctgtacaaactgaaaaaaaagtatgttaaggcggaaaccaggcctcggtcgagaccggcggggaagaagaggcgatcctgtcttacatga

SEQ ID NO: 24944 - protein, 219 aa, Unknown
  Obtained from environmental sample
  misc_feature (1)..(219): Xaa is any amino acid
MAEFMAFLFDLHGQHNHESLLKKENHRRYLDRFAGIEDEVLAFYKIFLELTDKRKSLEASLKSDREREERLEILNYAVDEITKAAIHAGEIRELENELQKLSDFERLAGLIHTASDNFFDGEQSVLSLARKTKNSVDGASAVDSSLSEIYRRLENLYYEAEDIAGDFRAYRDSLTFDPRRLEEVNERLALLYKLKKKYVKAETRPRSRPAGKKRRSCLT

SEQ ID NO: 24945 - DNA, 741 bp, Unknown
  Obtained from environmental sample
  misc_feature (1)..(741): n is a, c, g, or t
atgagagaggctcaggcggagattgaggcgctttgcggcgcggaagaaaacagggagaaacttaaaaccgaaatttccgtgttggaaaaagacattaaggcaaaggctcaaagtttgcgccaaaagagaacgggagcggcggaaaaacttggggctttgatcacgggaatcctgaaaaacctgggaatgcctaacgccggttttcaggttaaaattattccaaaacagcaggacggacagacttccgtcggtccgtggggagccgaagacgtggaatttctcatttccgcgaacacaggcgagccgcttaaagaccttgcccgcattgcgtcggggggggagctttcccgcgtgatgcttgcgataaaaacggcgcttttgtccgaggaaaagaatgaagctgagggagttgaaacccttgtttttgacgagattgacacgggaattgggggggaagtcgcgttgaaagtgggggaatacctgactaaaatcggcaaatttaagcaaattttttgtgttacacatcttgccagtatcgccgtaagagccgataatcattttaaggtggaaaaaagaacagaaggcggcagaacttatacgggaatcgggcctttgagcgcggacggacgcaggaaagagatagcgagaatgctcgcaggagacgcgggagacgccgcgcttgcccatgcggacgatcttatgaagaatacggtaaacggagcggttaatggcaaaagttag

SEQ ID NO: 24946 - protein, 246 aa, Unknown
  Obtained from environmental sample
  misc_feature (1)..(246): Xaa is any amino acid
MREAQAEIEALCGAEENREKLKTEISVLEKDIKAKAQSLRQKRTGAAEKLGALITGILKNLGMPNAGFQVKIIPKQQDGQTSVGPWGAEDVEFLISANTGEPLKDLARIASGGELSRVMLAIKTALLSEEKNEAEGVETLVFDEIDTGIGGEVALKVGEYLTKIGKFKQIFCVTHLASIAVRADNHFKVEKRTEGGRTYTGIGPLSADGRRKEIARMLAGDAGDAALAHADDLMKNTVNGAVNGKS

SEQ ID NO: 24947 - DNA, 1116 bp, Unknown
  Obtained from environmental sample
  misc_feature (1)..(1116): n is a, c, g, or t
atgcttactaatgaaaaccctgatccccgaaccccgaaccccgatccccttccaaaacacagcgatccagggcaaaaaaccgcaaatcaggcccaaatgctggcaaataggctcaacaaaaaactaaaacacctcaaaaaatgggcaaaacgcctgaatttcgaggcattcaggctgtacgaccgcgacataccggagattccccttgttttggacctgtacggcgacattatctccggggccctgtacaaaaggccctacgaaaaggatccggcggaggaggccctttggcttgaaaccatgaagaaaaccctgtcgcaaagcgttgggatagccccggaaaacgtcataatcaagcaaagggagaggcaaaccggccttgcccagtatgaaaaaacttcgggaaaaggcctaatccgcgaaattcacgagggaaaatacaaattcaaggtaaatctgtccgattaccttgacaccggcctgtttttggatcgccgatccctgcgatccatggtcggcgaggacgcaaatggcaagcgtgtgttgaatttgttctgttacaccggatctttttccatatacgcggccggtggcggcgcgatttccaccgactcggtcgatctttccaacacctacctcaattgggcgcgtgaaaatttcgcccttaacggtttcaacacggcaatgctgcggctggatgaatttttgccgggggatcatgctcggggagcggcacacaagctgattcgcgccgatgctgtcacatttctgcgtcaggcggcggccctgccgacagatgcccggttgcgctgggattcaattatcattgaccctccggtattctccaattcgaccatggcccgcgccgactttgacttaaaccgggactacgaaaatttgttagccggctgcctcgccctgcttgctcccggcggcaaagtctggttcagcgccaacgcccgttctttcaaaacaagcgccgcggatatggaaatggcgctgacggatcggtttccgggtattaaggtttctgattacacagataaaatggcagatgaagatttcaaaggcaaaaaaataccgaaaacttttgttttagaaacaaataacaggtaa

SEQ ID NO: 24948 - protein, 371 aa, Unknown
  Obtained from environmental sample
  misc_feature (1)..(371): Xaa is any amino acid
MLTNENPDPRTPNPDPLPKHSDPGQKTANQAQMLANRLNKKLKHLKKWAKRLNFEAFRLYDRDIPEIPLVLDLYGDIISGALYKRPYEKDPAEEALWLETMKKTLSQSVGIAPENVIIKQRERQTGLAQYEKTSGKGLIREIHEGKYKFKVNLSDYLDTGLFLDRRSLRSMVGEDANGKRVLNLFCYTGSFSIYAAGGGAISTDSVDLSNTYLNWARENFALNGFNTAMLRLDEFLPGDHARGAAHKLIRADAVTFLRQAAALPTDARLRWDSIIIDPPVFSNSTMARADFDLNRDYENLLAGCLALLAPGGKVWFSANARSFKTSAADMEMALTDRFPGIKVSDYTDKMADEDFKGKKIPKTFVLETNNR

SEQ ID NO: 24949 - DNA, 609 bp, Unknown
  Obtained from environmental sample
  misc_feature (1)..(609): n is a, c, g, or t
atgaaggagataaatgaccgccagataattgatttggtcgaaaaattatgcatagacgcgaattgctatctcaataaggacatagaacaagaactgtccaaacgtttggaaagtgaagagtcgcctcttgggaaaaacgtaataaagacaattatcgagaacgcgaaagtcgcaagggaagacaaggttccaatctgtcaggatacgggcatggcggtagttttcgttgagcttggaaccggtgtgcgtttttcgggagacctggaagaggcgataaacgaaggcgtccgccagggatacaaaaagggctatttaagaaattccgtggtaagggatcctattgacagaccgaatactaatgataatacaccggcagtaattcattattcagtcacaaccggcgataaaataaaaatatccgtcgcgccaaaaggtttcggaagcgaaaacatgagcgcccttgcgatgctgaaaccatctgacggcattgagggaataaaaagttttattgtcaatacggtgtcaaaggccggagccaatccctgcccgcccgataattgtcggagtgggagtcggaggtactatggagaaatgcgcgctcttatgtaa

SEQ ID NO: 24950 - protein, 202 aa, Unknown
  Obtained from environmental sample
  DOMAIN (9)...(198): Fumarate hydratase (Fumerase)
  misc_feature (1)..(202): Xaa is any amino acid
MKEINDRQIIDLVEKLCIDANCYLNKDIEQELSKRLESEESPLGKNVIKTIIENAKVAREDKVPICQDTGMAVVFVELGTGVRFSGDLEEAINEGVRQGYKKGYLRNSVVRDPIDRPNTNDNTPAVIHYSVTTGDKIKISVAPKGFGSENMSALAMLKPSDGIEGIKSFIVNTVSKAGANPCPPDNCRSGSRRYYGEMRALM

SEQ ID NO: 24951 - DNA, 306 bp, Unknown
  Obtained from environmental sample
  misc_feature (1)..(306): n is a, c, g, or t
gtgccttccacccccgccggcttgttgggagaattgatgcctttcctggacttgattctgataatgaccgtaaaccccggttttggcggccagcaccttatccctgaatgtcttgataaactccgttttctggccggagagcggcaaaaacagaaccttaactgccttctttcggttgacggcggcataaacagcgaaaccgccgcctccgccattgccgccggcgcggacgtgctggtcgtcggctcggcgtttttcgccgcaccggacaaaaaaaaatttgtagataatttgcgtttacagtaa

SEQ ID NO: 24952 - protein, 101 aa, Unknown
  Obtained from environmental sample
  DOMAIN (1)...(89): Ribulose-phosphate 3 epimerase family
  misc_feature (1)..(101): Xaa is any amino acid
MPSTPAGLLGELMPFLDLILIMTVNPGFGGQHLIPECLDKLRFLAGERQKQNLNCLLSVDGGINSETAASAIAAGADVLVVGSAFFAAPDKKKFVDNLRLQ

SEQ ID NO: 24953 - DNA, 771 bp, Unknown
  Obtained from environmental sample
  misc_feature (1)..(771): n is a, c, g, or t
atgcaaaacgctcatttgcgccctaatacatatatgagcgatataaattattccagctgtcttacggattttcaggcgttatacctggataaaaaaaaccatgcccgcagggggctgcttgatttgcctccggcgcaaaggccccgcgagcggcttgtcaacaacggccccgaggcgctttccgattctgagcttttggctgtcattttgaacaccggaatcaaggggaaaggcgtcgccgagctggccggggaactattatccatgcttgataataataaggagattcccccggttgagaagctttcaaaactttcaggcatggggatgacgaaagcctgcgcggtggcggccatgctggaatttggcaggcggcgctggggtgcgtccggttccgccatcaggcagccggctgagatttacgcccttatacggcactatgccgacaggaagcaggagcgttttatcagtttgtccctcaacggcgcgcatgaggtgttgtccatccgcgtggttaccatcggccttgtcaacaggacaatagtccatccccgggaagttttcgccgatattatccaggatcgcgcggccgcgtttatcgttgcccataaccatccttcgggcaaacttgctccttccggtgaggacgacgaaattaccgaacggctcgcgaaagcggctgaaattctcggtttgcactttcttgatcatctgatcttctccgaatgtgattggtggagttaccgccagaacgaaaggattgtcaaatag

SEQ ID NO: 24954 - protein, 256 aa, Unknown
  Obtained from environmental sample
  DOMAIN (131)...(254): RadC, DNA repair protein
  misc_feature (1)..(256): Xaa is any amino acid
MQNAHLRPNTYMSDINYSSCLTDFQALYLDKKNHARRGLLDLPPAQRPRERLVNNGPEALSDSELLAVILNTGIKGKGVAELAGELLSMLDNNKEIPPVEKLSKLSGMGMTKACAVAAMLEFGRRRWGASGSAIRQPAEIYALIRHYADRKQERFISLSLNGAHEVLSIRVVTIGLVNRTIVHPREVFADIIQDRAAAFIVAHNHPSGKLAPSGEDDEITERLAKAAEILGLHFLDHLIFSECDWWSYRQNERIVK

SEQ ID NO: 24955 - DNA, 303 bp, Unknown
  Obtained from environmental sample
  misc_feature (1)..(303): n is a, c, g, or t
atgacaagtaaactaacgcgaatacaaaagatgatttatgaaattcgcgggcagaaggtcatgttcgataatgatcttgcggtgttgtatcgggtggaaaccaagtatcttaacaggactgtaaaaagacatttgaagcgttttccggttgatttcatgtttcaacttactgataaagagtgggaggaattttgcgggtgcctaatttggcaccngcanaanaagtncgaaaaaatgnaggttcaatcnccttatgtgtttacccgaacaagngtatcggtaatggctttcaggcccttttga

SEQ ID NO: 24956 - protein, 100 aa, Unknown
  Obtained from environmental sample
  misc_feature (1)..(100): Xaa is any amino acid
MTSKLTRIQKMIYEIRGQKVMFDNDLAVLYRVETKYLNRTVKRHLKRFPVDFMFQLTDKEWEEFCGCLIWHXXXKXEKMXVQSPYVFTRTXVSVMAFRPF

SEQ ID NO: 24957 - DNA, 426 bp, Unknown
  Obtained from environmental sample
  misc_feature (1)..(426): n is a, c, g, or t
atggtaaataaagtcagccaggctctcagggaagcagacggcataatactcggctctcccgtacattatgcttctgcttccggcgcggcgacctcattttttgaccgtttgtttttcagcctggagcctgaagccaaaagattaaaattcggcgcgtgtattgtcagttgcaggagagcggggtcaaccgccactttcgaccaattaaacaaatattttaccatttcgcaaatgcccgttgtatcgtcttgttattggaatggcatacatggaaatacaccagaagacgtatacgcagataaagaaggcgtgagaacattaacaatattggcaaacaatatggcatatctaatcaaatgcaaacatcaaagcaatgttgaaccgcctgaagagccgccgatggttatgacaaattttatacgctga

SEQ ID NO: 24958 - protein, 141 aa, Unknown
  Obtained from environmental sample
  misc_feature (1)..(141): Xaa is any amino acid
MVNKVSQALREADGIILGSPVHYASASGAATSFFDRLFFSLEPEAKRLKFGACIVSCRRAGSTATFDQLNKYFTISQMPVVSSCYWNGIHGNTPEDVYADKEGVRTLTILANNMAYLIKCKHQSNVEPPEEPPMVMTNFIR

SEQ ID NO: 24959 - DNA, 342 bp, Unknown
  Obtained from environmental sample
  misc_feature (1)..(342): n is a, c, g, or t
atggcaaatcagacggggatactttcagcttccacggcatttggcaagactgttgtcgttcttaggattatagcggaacggagactcaatacgttaatattggttcaccgcaaattgcttgccgaccaatgggcggagcgaataaatcagttcttggaaatcccaaagaaagatataggttattacagcgggtcaaaaaagaaacgagccggaattattgatatcgcggtcatgcagagcattgtaaagaaagacaaagtagaagattgggtagctgaatatggacaaatcattgttgatgaatgtcatcacatctccgccgcttcttttgagcggatataa

SEQ ID NO: 24960 - protein, 113 aa, Unknown
  Obtained from environmental sample
  DOMAIN (3)...(113): Type III restriction enzyme, res subunit
  misc_feature (1)..(113): Xaa is any amino acid
MANQTGILSASTAFGKTVVVLRIIAERRLNTLILVHRKLLADQWAERINQFLEIPKKDIGYYSGSKKKRAGIIDIAVMQSIVKKDKVEDWVAEYGQIIVDECHHISAASFERI

SEQ ID NO: 24961 - DNA, 888 bp, Unknown
  Obtained from environmental sample
  misc_feature (1)..(888): n is a, c, g, or t
atggagccggacgcaaacggcgagcgctttgaaataatagccggacaccgccgccgccttgcctgtcaaatgttatgcgatagaaaagagagcataacaacgcttgacgcggttatagttacaggcgacaaattaactttgcaactggtagaaaatttacaacgtagcgacttgaccgccgatgagcgcgagcgcggaatatggcaaatgtgccaaagcggattatcacaaaaagaggtagcggcgcgcctgtcaaagcccgaaccgtttatatcgcgtaatgtatcggcgtataaaatccgcgaggcggcgaaagccgctggaattgataccgccattatatcgacggcggcgctcaatgaaatacaggcggcgaaagcggcggattatccggaattggtaaaggaaatattgaataatggcggaacgtccgaagcggcgcgctccattatggaaaattacagggtatcacacggcaagcccgcaaagcctaaagctaaagaaaaaaccgccggaataagcgacccgctttccttacacccgtcacctgttacggatattgtgacggaggagttttcggcaagtgatatagacaccgaggttgacattataaacgaacctgaaaaaacgcaaaggaaaacaaccgaggctccgcttgcatgggcggataattacgaaccgccgccgcataaggaagtggatttcaatactgtttgtcttttaattttcgattatgtgaaagaattaaaagggcaatgcaaagccacgggcgcggcttgcgagggctgtactaattcaagcgaaattgacggcgttgaaacttgcaatatcttttataaattagaagctgttaatcaggtattggcaattttacataatgggctttaa

SEQ ID NO: 24962 - protein, 295 aa, Unknown
  Obtained from environmental sample
  misc_feature (1)..(295): Xaa is any amino acid
MEPDANGERFEIIAGHRRRLACQMLCDRKESITTLDAVIVTGDKLTLQLVENLQRSDLTADERERGIWQMCQSGLSQKEVAARLSKPEPFISRNVSAYKIREAAKAAGIDTAIISTAALNEIQAAKAADYPELVKEILNNGGTSEAARSIMENYRVSHGKPAKPKAKEKTAGISDPLSLHPSPVTDIVTEEFSASDIDTEVDIINEPEKTQRKTTEAPLAWADNYEPPPHKEVDFNTVCLLIFDYVKELKGQCKATGAACEGCTNSSEIDGVETCNIFYKLEAVNQVLAILHNGL

SEQ ID NO: 24963 - DNA, 717 bp, Unknown
  Obtained from environmental sample
  misc_feature (1)..(717): n is a, c, g, or t
atgaaacgtaataattcagcctcatttttgatcgcggtatctttttcgattttatttacggcctgcgtcgcgcagcagcagaagaaggtaatattccgcccggatacggagaataatccccagaaactgtccaggccttttgactcatgggaaataattgaatcccaggccggcattccggaatgggcgcgcctgtattttaacaacgcggttaatgagattgaggcattggacaggtttagcggaaagtatatatttatcggggaaaacggagggggcaatttcaacgccctgcagcagtgggcaaacggctatacagtggaacaggatctgcccaggctgattacccgaagggcggaacgcaggcttatctcctcagcctccctttatccagatgatgagtacggcgagtattatgaatttttgataagagacatatcaaacggggaatattcgggtgctgtcaaggagcagactttctggctcaagcgaaaaatacttaataatgttgaaacggatgatatcgccaacgcccaatcgaagccggatgccgcgcaggaacgttatgagtttttggtattgatcagcattgacaaggaaacactgcaaaaacaaattcagggaattatgacaagaataaaaacaaagataactccgacaagggaacaggcagcggcggtagccaggattaaaaatactttttttgaaggattctga

SEQ ID NO: 24964 - protein, 238 aa, Unknown
  Obtained from environmental sample
  SIGNAL (1)...(24)
  misc_feature (1)..(238): Xaa is any amino acid
MKRNNSASFLIAVSFSILFTACVAQQQKKVIFRPDTENNPQKLSRPFDSWEIIESQAGIPEWARLYFNNAVNEIEALDRFSGKYIFIGENGGGNFNALQQWANGYTVEQDLPRLITRRAERRLISSASLYPDDEYGEYYEFLIRDISNGEYSGAVKEQTFWLKRKILNNVETDDIANAQSKPDAAQERYEFLVLISIDKETLQKQIQGIMTRIKTKITPTREQAAAVARIKNTFFEGF

SEQ ID NO: 24965 - DNA, 942 bp, Unknown
  Obtained from environmental sample
  misc_feature (1)..(942): n is a, c, g, or t
ttgacgatgatcgatgaatacgggcttcaagcatttctaagcaaagtattccctcaggacggaggacgctgtcaaaaatgttacgccatgcgtcttgaaaaagccgctcttgccgcggcgcgggacgggtacgacgctttttcgacaaccttgcttgtaagcccatatcaggatcatgacgcaatcaggcgtataggcgcagaaaccgcggcaaaacacggagttgaatttttttacagggattttcgccctcacttccgcgaagggcaggcaaaagcgcgcgttgcgggattttatatgcaaaaatactgcgggtgtatcttttccgaagaagaaagttttaagcggaaaaaagaaaaaaaacagtcaaaaaacacgaatgaaacagcgcgtaccttactcgcagaagacgggcatatttttcacaggttagaattaataaccggcaaggaagggctggaaaagttaaaaagcacgatggttcttgtctttggattgggcggggtcggaagctgggcggcggaagctcttgtccgctccggaatagggaaaatcggcattatcgattcagacgctgtctgcgcttccaatgtcaacaggcagtcggaagccactaccctctctataggacagcctaaggcgcaggcgttgaaaaaacggctattggaaattaatcctgcctgcgttattaccgcgtatgatgaacttttctgccttgaaaacaaagacctctttgacattgaaagcgcggattatgttatcgacgcgattgactcgctaaaacataaacttgatcttatagagactgtctgcgccgcgaaagttaccctcttttcttcaatgggaatggcgcttaaaatagatccgtctatgattaaaacagaccgcttttggaaaactacggactgccctctggcgcggctttgtcaggcaggggcttaa

SEQ ID NO: 24966 - protein, 313 aa, Unknown
  Obtained from environmental sample
  DOMAIN (2)...(131): Uncharacterized BCR, COG1636
  misc_feature (1)..(313): Xaa is any amino acid
MTMIDEYGLQAFLSKVFPQDGGRCQKCYAMRLEKAALAAARDGYDAFSTTLLVSPYQDHDAIRRIGAETAAKHGVEFFYRDFRPHFREGQAKARVAGFYMQKYCGCIFSEEESFKRKKEKKQSKNTNETARTLLAEDGHIFHRLELITGKEGLEKLKSTMVLVFGLGGVGSWAAEALVRSGIGKIGIIDSDAVCASNVNRQSEATTLSIGQPKAQALKKRLLEINPACVITAYDELFCLENKDLFDIESADYVIDAIDSLKHKLDLIETVCAAKVTLFSSMGMALKIDPSMIKTDRFWKTTDCPLARLCQAGA

SEQ ID NO: 24967 - DNA, 318 bp, Unknown
  Obtained from environmental sample
  misc_feature (1)..(318): n is a, c, g, or t
atgggcgaaaaaaccggcattcctgcccgacaggatattccacaggctgatacatgggatctttcaaaactttttccggacgacgcggcatggaatgacggacttgccgcctatgaaaaaatggcggagaggattccgtcttttcagggcaccctggggaaatccgccgaatcccttgccgacttccttgacttcagccgggattttggcattctgggcgagcgtctatactattatgccgacctgcgccagaccgaggacgaaggctcaagcgctgcccngcagcatgnacccgnggggnaaaaaaaaaatttttaa

SEQ ID NO: 24968 - protein, 105 aa, Unknown
  Obtained from environmental sample
  misc_feature (1)..(105): Xaa is any amino acid
MGEKTGIPARQDIPQADTWDLSKLFPDDAAWNDGLAAYEKMAERIPSFQGTLGKSAESLADFLDFSRDFGILGERLYYYADLRQTEDEGSSAAXQHXPXGXKKNF

SEQ ID NO: 24969 - DNA, 306 bp, Unknown
  Obtained from environmental sample
  misc_feature (1)..(306): n is a, c, g, or t
ttgcccacacccacaaaaaaaagagagaaaaaattttatgttttttttttttttttttttttttttgtgggggggggggggggggggcccccctttttttttttttttttttccccccccccccccccccaagaaaaaaaancccccccgggggaagcccccgggggaagncccgggggggccccccccctttttttaggggcccccccctttttttttgggccccgcgggaagggaccccccccaattaaaattttaaaaattttttttttnccccncgggtncatgctgcngggcagcgcttga

SEQ ID NO: 24970 - protein, 101 aa, Unknown
  Obtained from environmental sample
  misc_feature (1)..(101): Xaa is any amino acid
MPTPTKKREKKFYVFFFFFFFFVGGGGGGPPFFFFFFSPPPPPQEKKXPPGEAPGGXPGGAPPLFLGAPPFFFGPRGKGPPPIKILKIFFXPXGXMLXGSA

SEQ ID NO: 24971 - DNA, 414 bp, Unknown
  Obtained from environmental sample
  misc_feature (1)..(414): n is a, c, g, or t
gtgttgtttttgttttgttttttttttnnnncccttgaaacccaaaacacaacacaaacaaagatagttgagttcccccccccccccctccccctttttttttttttttttttttttggggggggggggggggagagaaaaaaaaaaatagattttttttccgttgcccacacccacaaaaaaaagagagaaaaaattttatgttttttttttttttttttttttttttgtgggggggggggggggggggcccccctttttttttttttttttttccccccccccccccccccaagaaaaaaaancccccccgggggaagcccccgggggaagncccgggggggccccccccctttttttaggggcccccccctttttttttgggccccgcgggaagggaccccccccaattaa

SEQ ID NO: 24972 - protein, 137 aa, Unknown
  Obtained from environmental sample
  misc_feature (1)..(137): Xaa is any amino acid
MLFLFCFFFXXLETQNTTQTKIVEFPPPPLPLFFFFFFFGGGGGERKKKIDFFSVAHTHKKKREKILCFFFFFFFFCGGGGGGAPLFFFFFFPPPPPPRKKXPPGGSPRGKXRGGPPPFFRGPPLFFWAPREGTPPN

SEQ ID NO: 24973 - DNA, 759 bp, Unknown
  Obtained from environmental sample
  misc_feature (1)..(759): n is a, c, g, or t
atggttcaaaaacttattgccgaccccacttccgatatggcatctattgcccgtcagatttcaatggatccggcgcttaccggcgatttactgaaaatcgtcaattcagcccaatatatgctgtcaaaaaaagttgaaaatatctcggatgcggtaaaaatggtgggtatcaaaggcattaagaatttgctttattcctacggcacgcagaaagtattaggcgatgataccgttgacaaaaagatactttgggaacattcgtacaagacggcgttttacgctttcaatctggttaaaaatttcaagaacgaacccggtcttctggacgacgtatatgtcggcggaatattgcatgatatgggaaaaatcattttttccaatgtgcatcccgacttgcttaataaaataaagacattcagctcggaaagaaaccttccggcttccacttttgaagacctttccgcgggcatgaaccacgccgaactgggcgcgttaatcgcggaaaaatggaacttcccaccgaggctggtttcggcaatccgttatcatcatgagcccgacgcggttcccgacgacttaaaaaacatggtagacgcggtatacctggcgaatatgttctgcgagtatgaaaacaaaaatgtcagttttgaccagtttgatacaggcgcccttgaaaattacggactgaccagcaagaaaaagcttactaccattcttggccgtttccagtcaggttttaagaaagaaatgaagatttaa

SEQ ID NO: 24974 - protein, 252 aa, Unknown
  Obtained from environmental sample
  DOMAIN (83)...(205): HD domain
  misc_feature (1)..(252): Xaa is any amino acid
MVQKLIADPTSDMASIARQISMDPALTGDLLKIVNSAQYMLSKKVENISDAVKMVGIKGIKNLLYSYGTQKVLGDDTVDKKILWEHSYKTAFYAFNLVKNFKNEPGLLDDVYVGGILHDMGKIIFSNVHPDLLNKIKTFSSERNLPASTFEDLSAGMNHAELGALIAEKWNFPPRLVSAIRYHHEPDAVPDDLKNMVDAVYLANMFCEYENKNVSFDQFDTGALENYGLTSKKKLTTILGRFQSGFKKEMKI

SEQ ID NO: 24975 - DNA, 843 bp, Unknown
  Obtained from environmental sample
  misc_feature (1)..(843): n is a, c, g, or t
ttgattttggacattctttgtcaggatcagtgtaattccggcgaaagggaagcgaagaaaattcttgattcaataaaaagcggcgctacaacatttgaagatgccgccagaacccagtcgcaggacagttatgcaagcaagggcggggatacgggtatccgctattattatgaaattgaaaatgaaatctccggcgcggcagatcgtgaagctattttaaaccttcgtaagggagagataagtgattgtttcaagattaacgacagttgggtaatttttagggttgaagatgagataaaaccagccgattttaacgattactccgtaatggataaagtaaagtcatacttaaagagctttgacagaggccgcatggaagactggactgtcgcacaggcaaaagaatttatcagggatgcgcaggattcggggtttgaaaatgcggcgttgcaatggagtcttaataagtacagtttcggtccgcttccgataaattacgcaggagttgaactttttacaacacttgaatctttttcagattcagggattcctcagcaggaacttcaaaatttatcccgcaacgaaaatttctggaaaattgctttttctacaaaactaaatacttcttccgagccgcttgtacagggaaacaatgtgcttgtgtttatgcctgttgaacagattgatgctgaagaatccgtcataaataatattgcatatgtatatacatccgggttaagtatgttagctgaacaatcttttcagtcatatttcatgagtaatccaaagtcaaagctggatgatcgtttttgggatacattttttaaatacgtcacgccgtaa

SEQ ID NO: 24976 - protein, 280 aa, Unknown
  Obtained from environmental sample
  DOMAIN (5)...(97): PPIC-type PPIASE domain
  misc_feature (1)..(280): Xaa is any amino acid
MILDILCQDQCNSGEREAKKILDSIKSGATTFEDAARTQSQDSYASKGGDTGIRYYYEIENEISGAADREAILNLRKGEISDCFKINDSWVIFRVEDEIKPADFNDYSVMDKVKSYLKSFDRGRMEDWTVAQAKEFIRDAQDSGFENAALQWSLNKYSFGPLPINYAGVELFTTLESFSDSGIPQQELQNLSRNENFWKIAFSTKLNTSSEPLVQGNNVLVFMPVEQIDAEESVINNIAYVYTSGLSMLAEQSFQSYFMSNPKSKLDDRFWDTFFKYVTP

SEQ ID NO: 24977 - DNA, 945 bp, Unknown
  Obtained from environmental sample
  misc_feature (1)..(945): n is a, c, g, or t
ttggaggaaatgcggcagctccatggcaaggtgctgggctataacaacatccgcgacctcgatttggcctggaaggcggtttgtgcgtttgggctttccgttgaaagaattgcgccaatgggcgaagacgaagtgaagcgtctagtgccccatgcggcatccgcttccgtcgacaaagtctgctgtgtcgcggtaaagcacggtaccccctgcggtatagccatgggcgcaaccctttctgaagcttacgaaaagacatttgcctgcgatcccgtttcgatatatggcggcatagtggcctgcaattcaactgttgatgaagagacggcatcgaaactaggcgaactctttctggaaattgtagttgccccggattttgaaggcgatgctttggagactcttaaaaggagaaaaaacctgcgcatcataaaagccagatatgcccccaaggacatcaaagagtacgcctctgttgacggcggtcttctggttcaggagacggataagctgctcctcgaaaagtgggaagtggtaacccgcctcgcgccgactgcggaagacattcccgacctcatttttggtttgagggcggtaactttcgtaaaatcaaacgccatattgattgttaaagacatggccgcgacaggcataggcggcgggcaagtgaaccgcatctggcccacaacgcangcccttgaacgaagcgccgtcgccattaaaacagctgcagagaaaggcggtccctgggcggatggtcagtgcgccagggttctcgcctcggacgcgttctttccttttgcggacggggtcgaggccgccgccgccgccggaattaaagcaatcatccagcccggaggttctgtcaatgacaaactttccatcgaagcctgcgacagtctgggactcgctatggtatttaccgggacaaggcattttaagcattaa

SEQ ID NO: 24978 - protein, 314 aa, Unknown
  Obtained from environmental sample
  DOMAIN (1)...(232): AICARFT/IMPCHase bienzyme
  misc_feature (1)..(314): Xaa is any amino acid
MEEMRQLHGKVLGYNNIRDLDLAWKAVCAFGLSVERIAPMGEDEVKRLVPHAASASVDKVCCVAVKHGTPCGIAMGATLSEAYEKTFACDPVSIYGGIVACNSTVDEETASKLGELFLEIVVAPDFEGDALETLKRRKNLRIIKARYAPKDIKEYASVDGGLLVQETDKLLLEKWEVVTRLAPTAEDIPDLIFGLRAVTFVKSNAILIVKDMAATGIGGGQVNRIWPTTXALERSAVAIKTAAEKGGPWADGQCARVLASDAFFPFADGVEAAAAAGIKAIIQPGGSVNDKLSIEACDSLGLAMVFTGTRHFKH

SEQ ID NO: 24979 - DNA, 615 bp, Unknown
  Obtained from environmental sample
  misc_feature (1)..(615): n is a, c, g, or t
atggcactacttctggggaaggaaatgatagagaggttaaggggaattttaatacataaaactccgcttatggctgttgttgaatgtgggggggttggttatggggtcaacgtaagcgcacgtaccggagaaagactcccaaacgaaggttccgagatttcattgttgacccatctgattgtgcgggaagattccttaacgctttacggtttttttgatgttcaagaaaaagaattgtttttgaatatgatagatgtcaacggcattggcccaaaaatggcgcaaagaattttgagttctatttctcctaatgattttctctctttgattgctatggaaaattccgcagggctttcaaaaataaaggggataggcaaaaaaacatcggaaatgctggtgcttgcattaaaggacaaagccctttctatttccgctgtgggtggggaaaattcttcccttgccatgccttttgccgagcaagaggcggtgctcgccctccacacgcttggagtaaaagacccaggtgcaaaaaaagccgtagaaaaagctgtagaagttttaggcaagaatacggattctggcaaactcatcgcagaagctctaaggcatttgtaa

SEQ ID NO: 24980 - protein, 204 aa, Unknown
  Obtained from environmental sample
  DOMAIN (9)...(70): RuvA N terminal domain
  misc_feature (1)..(204): Xaa is any amino acid
MALLLGKEMIERLRGILIHKTPLMAVVECGGVGYGVNVSARTGERLPNEGSEISLLTHLIVREDSLTLYGFFDVQEKELFLNMIDVNGIGPKMAQRILSSISPNDFLSLIAMENSAGLSKIKGIGKKTSEMLVLALKDKALSISAVGGENSSLAMPFAEQEAVLALHTLGVKDPGAKKAVEKAVEVLGKNTDSGKLIAEALRHL

SEQ ID NO: 24981 - DNA, 834 bp, Unknown
  Obtained from environmental sample
  misc_feature (1)..(834): n is a, c, g, or t
gtgccgacctttatttctcgccacttttttaatattcctcattctataactattcccgtttacattaccattcacgatattatttttccggatatgcccgaattaacgtctaaaaccggacttatcgcccgtatgcggttttaccgcaaggcttacaaaaaatcgcaaaaaatatttaccgtttcaaaattttccaggtcaagaatacggcattatctgggaacatcaaagccggttattgtcacctattcggcgattcagccgatgtttcttgcgtaccgcgcaaatatccggaatgtgcaaaaaacgcagaccattgtgtttataggtaatataaaaaaacacaaggggctcgatcttttgcttgactcttttattcttgcaaaaaacgaaagtctgccgcacaggttagttatcattggcgcgaaagaaaattttcgtactactgataatacggtattacggaaaattgaatcccttggcagtgaagcggtaacatttaccggttttatttccgatgaactggttatggagtatctttcaaaagccgcccttcttgtacagccttcattgtacgagggtttttgcctgccgccgcttgaggcgatggttttgggcactcacgcgctgatttctgatattcctgtacttaaagaaatatacgctggttttcctgtgaccttcttccgcaacggagactcatctgacttaaaagaaaaaatgatgggactattatttaacaagaaaccgtcttccccaattttgtcagatgatttattattaaaatacacttttgataaaaccgcttcggttattttaaaggaattgaaatga

SEQ ID NO: 24982 - protein, 277 aa, Unknown
  Obtained from environmental sample
  DOMAIN (90)...(262): Glycosyl transferases group 1
  misc_feature (1)..(277): Xaa is any amino acid
MPTFISRHFFNIPHSITIPVYITIHDIIFPDMPELTSKTGLIARMRFYRKAYKKSQKIFTVSKFSRSRIRHYLGTSKPVIVTYSAIQPMFLAYRANIRNVQKTQTIVFIGNIKKHKGLDLLLDSFILAKNESLPHRLVIIGAKENFRTTDNTVLRKIESLGSEAVTFTGFISDELVMEYLSKAALLVQPSLYEGFCLPPLEAMVLGTHALISDIPVLKEIYAGFPVTFFRNGDSSDLKEKMMGLLFNKKPSSPILSDDLLLKYTFDKTASVILKELK

SEQ ID NO: 24983 - DNA, 1098 bp, Unknown
  Obtained from environmental sample
  misc_feature (1)..(1098): n is a, c, g, or t
atgaaagttgccatcatccactactggcttgtcaatatgcgcggcggggaaaaggtactagaagccctgatcgagatgtttccgcaagccgatatttatactcatgtatacaatcccaaagcggtttcgtctttaattaatagtcatcgcgttatcacctcccgcataaaccgtctgccttttgcgaaaaaactctaccaattttatatgcccctcatgcccaatgcgcttattgatttagatcttcaatcgtacgacttggttatatcaagcgaagcgggtccggcaaaaggcgtggttgccaatcccgatgcttatcatctatgttattgccacagcccgatgcgctacctttgggatatgtaccatgaatatttcaggggaactaacccaatggttcgtttttttatgaaacgcctgattccgcgtctgcggctctgggatgcggtatccgccaatatggtagatctctttgttgccaattcaacctatgtggcgagacgcatcaggcgctgttacaaccgtattgccacagttgtctatcctccggtggatatagaaaaatttctttcccttgaaagacgcccaagggatttttatcttttttttgggcagattacggggtataaaagggcggatattgccattgaagcctgtgttgcttcggggcggaagctggtagtagcaggggcgggcgcaaagaaaaaagaaataaacaggtataaaaaaaccggcctcgtcacattcaggggcagggtttccgatgatgaggcggcggccctgttcgccggcgcgcgcgctttgttgtatcccggcattgaagatttgggacttgtacccatagaagccaacgccgcgggctgtcccgtaatcgcctttagagaggggggagcggcggatacggtaaaagaaaacattaccggtcttttttttgacgaacagacgccggaatccctaatcgcggcaatggagcgttttgagcgggatgaagtaacattcagccggcggaaggtgtttaatgaacatgtacaacagttttccaaaactgcttttattgaccggatgcgtaaagtccttgaagaaagaaagcgcatataa

SEQ ID NO: 24984 - protein, 365 aa, Unknown
  Obtained from environmental sample
  DOMAIN (184)...(346): Glycosyl transferases group 1
  misc_feature (1)..(365): Xaa is any amino acid
MKVAIIHYWLVNMRGGEKVLEALIEMFPQADIYTHVYNPKAVSSLINSHRVITSRINRLPFAKKLYQFYMPLMPNALIDLDLQSYDLVISSEAGPAKGVVANPDAYHLCYCHSPMRYLWDMYHEYFRGTNPMVRFFMKRLIPRLRLWDAVSANMVDLFVANSTYVARRIRRCYNRIATVVYPPVDIEKFLSLERRPRDFYLFFGQITGYKRADIAIEACVASGRKLVVAGAGAKKKEINRYKKTGLVTFRGRVSDDEAAALFAGARALLYPGIEDLGLVPIEANAAGCPVIAFREGGAADTVKENITGLFFDEQTPESLIAAMERFERDEVTFSRRKVFNEHVQQFSKTAFIDRMRKVLEERKRI

SEQ ID NO: 24985 - DNA, 807 bp, Unknown
  Obtained from environmental sample
  misc_feature (1)..(807): n is a, c, g, or t
atgaactccataacatattctcttttaaagcttttgccaaaaaatgccattagtagggcatttggaaatttttcaagggcaaaaattcccatttttagcagttggtctgctgggtggtttgcaaaacgctataacataaatttagaagaatcagaagttcccgcagatggctttgccaatattcacgagcttttcacaagaaaattgaaaagcgatgccagaattatagaagacaatgccgaggttgtttgcccggtagatggcgttttaacggcttttggaatgctcaccgaaaaaccggaatatatgcaggcaaagggaaaatattaccgtttaaaaacactgctccgcaataaagaacttgctcaaaaattcataggaggcatttgggcaaccatatacctttcgccgcacaactaccaccgcatacactccccagtttcgggaaacgtgaccgccgcttattattgccccggaacgctgtggcccgtgaatgctggaagtgttgaaagaatagaggggcttttttcaataaacgaaaggctaataactcaaataaacacctacgatggcggcgaacttttgttagttaaaataggagccacaaacgttgggcgtattgccgtagattacaaaaaagactggttcacaaactcaatgccaccaatagcaagccgcaaagcccttttcacaaaatgggaacccgaacagcaaatttacgcctacacaaaaggtcaagagattgcccgctttgaaacgggcagtacagtgataattgttgcaacagagcaatcaaactgtcgataa

SEQ ID NO: 24986 - protein, 268 aa, Unknown
  Obtained from environmental sample
  DOMAIN (61)...(268): Phosphatidylserine decarboxylase
  misc_feature (1)..(268): Xaa is any amino acid
MNSITYSLLKLLPKNAISRAFGNFSRAKIPIFSSWSAGWFAKRYNINLEESEVPADGFANIHELFTRKLKSDARIIEDNAEVVCPVDGVLTAFGMLTEKPEYMQAKGKYYRLKTLLRNKELAQKFIGGIWATIYLSPHNYHRIHSPVSGNVTAAYYCPGTLWPVNAGSVERIEGLFSINERLITQINTYDGGELLLVKIGATNVGRIAVDYKKDWFTNSMPPIASRKALFTKWEPEQQIYAYTKGQEIARFETGSTVIIVATEQSNCR

SEQ ID NO: 24987 - DNA, 753 bp, Unknown
  Obtained from environmental sample
  misc_feature (1)..(753): n is a, c, g, or t
atgattcaatcattggatcggggaatagcaatactttttctgcttaaacaaaatggcagtgcgacagtaaccgaaattgcagaagaattgaacgtgcacaaaagttccgcttcccgtctggttaatacgctacgccaatatgatttaattcaacaggatcctggttctaaaaaattcaggctgggataccgtttgctttttctgggcgaaaatatacaaagaaatacccgtgtaatagaaaccgcaaggccgtttttgtacaagctcagttccgcccttagagaaagcgtacacttaagtaccttctataataaaaaagtatatgtggtggatcaaatacgcagcaacaagaaataccaaatgccggcggcattgggaatgatagaaccggcccatgcctcttctttagggaaaagtatctttgcatatcgtaccccggaattcataaccaaatatatgaatgacaacggtatgcacgcatttacggagaataccattaccgacattgattccctgcttccgcatctttccaaaatacggcgtcagggttatgcacttgacgatcaggaactaaagatcggcgttcgttgtattgcggcgccgattttcaaccgccagagtgaagtcaatttcagcgtcggcatatcaggccccgcaagtgactttaattctgaaagggttacaacgttttctcaattaataaaaaaaacctgtatggagataagtcaagagctgggatatcagggggattag

SEQ ID NO: 24988 - protein, 250 aa, Unknown
  Obtained from environmental sample
  DOMAIN (2)...(65): Sugar-specific transcriptional regulator TrmB
  misc_feature (1)..(250): Xaa is any amino acid
MIQSLDRGIAILFLLKQNGSATVTEIAEELNVHKSSASRLVNTLRQYDLIQQDPGSKKFRLGYRLLFLGENIQRNTRVIETARPFLYKLSSALRESVHLSTFYNKKVYVVDQIRSNKKYQMPAALGMIEPAHASSLGKSIFAYRTPEFITKYMNDNGMHAFTENTITDIDSLLPHLSKIRRQGYALDDQELKIGVRCIAAPIFNRQSEVNFSVGISGPASDFNSERVTTFSQLIKKTCMEISQELGYQGD

SEQ ID NO: 24989 - DNA, 576 bp, Unknown
  Obtained from environmental sample
  misc_feature (1)..(576): n is a, c, g, or t
atgaaatctctgaaaggaacccgcacggaaaaaaacatcctgaccgcctttgccggcgaatcgcaggcccgtaaccgttattcctttttcgccggcgcggcgaagaaggaaggcttcatgcagattgcggacatgtttcttgaaacggcggagcaggaaaaggaacatgccaagcgcctgttcaagtttttggaaggcggagacgtggaaatcgccggcgcctttccggcgggcgtcataggcgcgaccgaagcgaacctccttgcctcggctgccggggaacaccacgaatacacggaaatgtatcctgccttcgccaaaatcgcgaacgaagaagggttgggtgaaatcgccgcggtcatgcaagctgttgccgcggccgaggcttaccatgagaagcgcttcctggcgtttgcgaaaaacatcaaggaagggcgcgtctttgtccgggagcagagcgtaacgtggcattgccggaattgcggctgtacccttgaagggaagagcgccccggaagtttgcccggcctgcgcgcatcccaaggcgtattttgacgtggcctgcctgtgctggtag

SEQ ID NO: 24990 - protein, 191 aa, Unknown
  Obtained from environmental sample
  DOMAIN (11)...(139): Rubrerythrin
  misc_feature (1)..(191): Xaa is any amino acid
MKSLKGTRTEKNILTAFAGESQARNRYSFFAGAAKKEGFMQIADMFLETAEQEKEHAKRLFKFLEGGDVEIAGAFPAGVIGATEANLLASAAGEHHEYTEMYPAFAKIANEEGLGEIAAVMQAVAAAEAYHEKRFLAFAKNIKEGRVFVREQSVTWHCRNCGCTLEGKSAPEVCPACAHPKAYFDVACLCW

SEQ ID NO: 24991 - DNA, 606 bp, Unknown
  Obtained from environmental sample
  misc_feature (1)..(606): n is a, c, g, or t
ttgccagtaaaagaaattggggaaaaagcttttatagaaaatgaaacaattacaagcgtaacaatcccggaaggagtaacaagtattggtataggagcattttatggttgtataaagcttagttctgtaagtcttccaagtacccttaaaaaaataggctcatctgcattttattgctgcatagaccttacatcaattgcgcttccggcaggtttaacggatttaaataataatgtatttgctgtgacaggtattacatcatttcccaatccttggccaaaagctataacaattatttctgattcaattttttgtcagtcaaaattgcgtacaatagtaattcccgaagggattaccaaaatagaaaataaggctttttttatatgtaaagatttaaccagcgttacacttccatcaactatcagcagtataggtaatttggcttttgcaagttgcaattcattaacaacgttaaatatccctgaatcaataacaagtattaatttttatactaatgaaaataattcccattttagtagttctagcaaaatcaatctcgcatcgcaggttaggctaaaacagcttggttacaagggtgatttttaa

SEQ ID NO: 24992 - protein, 201 aa, Unknown
  Obtained from environmental sample
  misc_feature (1)..(201): Xaa is any amino acid
MPVKEIGEKAFIENETITSVTIPEGVTSIGIGAFYGCIKLSSVSLPSTLKKIGSSAFYCCIDLTSIALPAGLTDLNNNVFAVTGITSFPNPWPKAITIISDSIFCQSKLRTIVIPEGITKIENKAFFICKDLTSVTLPSTISSIGNLAFASCNSLTTLNIPESITSINFYTNENNSHFSSSSKINLASQVRLKQLGYKGDF

SEQ ID NO: 24993 - DNA, 1629 bp, Unknown
  Obtained from environmental sample
  misc_feature (1)..(1629): n is a, c, g, or t
ttgattgttgttttgggaagcggggcgtttgtactctccatgcggcaaattgtcagggacaacacgggcaacgagctttctaaaatgttggaaatcgagcggatcaaactggaatcatcggtaaacgccgagattgccattgcgcttaaaatggccgattcgcctctgatacagagatactttattgacccaaacgatgccgagctggagaaaatcgcgtttgaagagatagccggttaccgcagggcctttgcggcgaatactgtgttttgggtgaatgatcaggacaagaagttttactccgacgatgccttttcctttgtggtagatacctcggatcccggtaattactggtacttaatgactcttaatgagactgaaaagtataacttcaacataaactacaatccggatcttgataagaccaacctatggataaacgcaccggtattttcaagccaacataaaccaatcggtatattgggaaccggcattgaccttacagtatttatcgattcaatttattcaggatatacaggcagagccgcgctttacttttttaacgatttgggagaaataaccggagcaaaggattccagcctggtagcgtccaaaaaagaaattgataaagagctgggcgccgttgggacagaaattatttccagaatgaaaaatttaaaaccaaatgaaatacaggtttttaattattcagggggagaaatcgccattagtacggttccggctctgggctggtatgtcacggcggtaatgccccagacaatttccgattatctttctacgacaatgacagcgctttttttggcgatgcttgtggtagtggcgctgatcttcattgtctttaatttgtttatagcggggcttcttgggcctctgaagaaaatggttaaagccctcactcaaatatccgccaactgggatttgacccataggctggaagtccgccaacatgatgagatcggaacgcttgcggaatttttcaatatgacctttgataaactcatggaacttataaaaggcatcaaaactgaaagtgtttgtctgtttgataccggggatgaactttcagccaatatgagaaatgctacagtatccctcacaaggataaacgacaatgtccaaaccatgaatgaaaaaacatcatcccaggcgactgaggtggacacaactgtcagtacgatagagaaacttatcgcgcagttagggacattgaacaatcatatcgccgtccagtttgaaagcgtaaccaagtcctcatccgcggtagaacaaatgctggccaatattcattctgtcacgcagacattgattagtaacacagcaaacatcgaatccctggcaaagtcatccgatgaagggcggacggatctgcaaaaggtatcaggcgatattcagaaaatcgcacaggaatctgaagggctcttgaagatcaactcggtaatggaatcaatagccagccagaccaacctgctttccatgaacgccgccgtcgaagctgcccacgccggagaagcaggcaaaggctttgcggtagttgccagtgagattcgcaagcttgcgattaattcgagtgaacagtcaaagattatcggcgatgtgctgaaaagataa

SEQ ID NO: 24994 - protein, 542 aa, Unknown
  Obtained from environmental sample
  DOMAIN (422)...(536): Methyl-accepting chemotaxis protein (MCP) signaling domain
  misc_feature (1)..(542): Xaa is any amino acid
MIVVLGSGAFVLSMRQIVRDNTGNELSKMLEIERIKLESSVNAEIAIALKMADSPLIQRYFIDPNDAELEKIAFEEIAGYRRAFAANTVFWVNDQDKKFYSDDAFSFVVDTSDPGNYWYLMTLNETEKYNFNINYNPDLDKTNLWINAPVFSSQHKPIGILGTGIDLTVFIDSIYSGYTGRAALYFFNDLGEITGAKDSSLVASKKEIDKELGAVGTEIISRMKNLKPNEIQVFNYSGGEIAISTVPALGWYVTAVMPQTISDYLSTTMTALFLAMLVVVALIFIVFNLFIAGLLGPLKKMVKALTQISANWDLTHRLEVRQHDEIGTLAEFFNMTFDKLMELIKGIKTESVCLFDTGDELSANMRNATVSLTRINDNVQTMNEKTSSQATEVDTTVSTIEKLIAQLGTLNNHIAVQFESVTKSSSAVEQMLANIHSVTQTLISNTANIESLAKSSDEGRTDLQKVSGDIQKIAQESEGLLKINSVMESIASQTNLLSMNAAVEAAHAGEAGKGFAVVASEIRKLAINSSEQSKIIGDVLKR

SEQ ID NO: 24995 - DNA, 1011 bp, Unknown
  Obtained from environmental sample
  misc_feature (1)..(1011): n is a, c, g, or t
ttgtttagtttattactattgaaaataattgcggatatacatatccattccccctggtcaagggccacgagttcccggctcagtccggcaagccttgagcgatgggcggggatcaagggcatcggccttctgggaaccggcgattgcacccatcccagatggatagaagaactgcaagataaccttgaggataatgactcaggaagcggcttttaccggctgaaagaaaaagcccgttcggaatttgactcaggccccgcgcttgcggaagggttgcccgggccgggcggaacagatagccctctgcaagaatccaatgtgcattttgtcctcacaggcgagatcagcacgatctataaaaaagcgggaaagacccggaaggtccaccatgttgtcgtgctgccggatttcaaagcagccgctgttttcaacgcgaaactggaacgactggggaacatccattctgacggaaggccaatcctagggcttgattcagaagatcttctgtccctgctgcttgaggctgacgacagggctcttttgattcccgcccatatctggacgccctggttttccgtactcggcgcaaaatccggctttgattccattgaagagtgttatggttcattggcttcccatatccccgcgatagaaaccgggctttcttccaatcctcccatgaactgggctttaagcgggcttgaccgttatgcgattatttcaaattcagacgcccattcgccggataaacttggaagggaagcgaccatttttgaaatggaattatcctacgattctttcaggaaggctttgtatagcgccggaattatctctacggttgaattttttcccccaggagggggaagtaccattacgacgggcaccgaagctgcggatctgccctggtccggaagaagccgctcgactggacaatatctgtcctgtatgcggcaagcctcttacgcgaggagttatgggcagggttttagagcttgcggatcgtcctgttga

SEQ ID NO: 24996 - protein, 336 aa, Unknown
  Obtained from environmental sample
  DOMAIN (11)...(249): PHP domain
  misc_feature (1)..(336): Xaa is any amino acid
MFSLLLLKIIADIHIHSPWSRATSSRLSPASLERWAGIKGIGLLGTGDCTHPRWIEELQDNLEDNDSGSGFYRLKEKARSEFDSGPALAEGLPGPGGTDSPLQESNVHFVLTGEISTIYKKAGKTRKVHHVVVLPDFKAAAVFNAKLERLGNIHSDGRPILGLDSEDLLSLLLEADDRALLIPAHIWTPWFSVLGAKSGFDSIEECYGSLASHIPAIETGLSSNPPMNWALSGLDRYAIISNSDAHSPDKLGREATIFEMELSYDSFRKALYSAGIISTVEFFPPGGGSTITTGTEAADLPWSGRSRSTGQYLSCMRQASYARSYGQGFRACGSSC

SEQ ID NO: 24997 - DNA, 750 bp, Unknown
  Obtained from environmental sample
  misc_feature (1)..(750): n is a, c, g, or t
ttggtagacagcaaggttaatgaaacgtatgaatatctatacttctataattatgtacgattcggaggaagtatgggtaaattatctgttactttagtaccgtcatatagttgcaaccttgcttgcccctactgctatcaaggccaagataaaaccaactccacgatagagattaaagatattgacataatactcacgtttatctctaaaacaatagagaactccataatgataggagtgccgatcaccgaaatttctgcgaatttgtatggtggcgagccgatgcttcaaaaacgcgcgttgatacatttttccgatggatttaaaaatatcgcggaaaaatatcaatgtaaagtcgctatttcaatgacatcgaatatgactcttcttgatgatgatatgattgaatttattaaaaaatatcagataactatacaagtatccatagacggtacaaaggaacaacatgataaacgcagagtatttgcggacggttctggctcctatgatgtcatacttaagaacctcctacgactgcgggatgccggactaaagaaacttgttactatcagaataaatatagataaaaacaatttagatgaggcggagagcatatttaaggccgtttgtgaattttccgacgatgtgtacttcggatttcttgacacatttaagggatataatgactcattttcaggtcaatgtatatatggtcttatttatccgaacatcgaaaccgaaaacatttaa

SEQ ID NO: 24998 - protein, 249 aa, Unknown
  Obtained from environmental sample
  DOMAIN (32)...(209): Radical SAM superfamily
  misc_feature (1)..(249): Xaa is any amino acid
MVDSKVNETYEYLYFYNYVRFGGSMGKLSVTLVPSYSCNLACPYCYQGQDKTNSTIEIKDIDIILTFISKTIENSIMIGVPITEISANLYGGEPMLQKRALIHFSDGFKNIAEKYQCKVAISMTSNMTLLDDDMIEFIKKYQITIQVSIDGTKEQHDKRRVFADGSGSYDVILKNLLRLRDAGLKKLVTIRINIDKNNLDEAESIFKAVCEFSDDVYFGFLDTFKGYNDSFSGQCIYGLIYPNIETENI

SEQ ID NO: 24999 - DNA, 540 bp, Unknown
  Obtained from environmental sample
  misc_feature (1)..(540): n is a, c, g, or t
atgaggcggagagcatatttaaggccgtttgtgaattttccgacgatgtgtacttcggatttcttgacacatttaagggatataatgactcattttcaggtcaatgtatatatggtcttatttatccgaacatcgaaaccgaaaacatttaacacaatctatcagaaatatgggcaaccgttaacgacattgttcggtaaaaaagctccatgcgcgatggtctgcgagaactcgtatttaattgacccgctattgaatgtatataagtgtgatttgcttttaaatcgacctgaatatagcgtagggtatattgattgtaacgggcaattcataaaaaacgccgaattttataaacaaatgaatcgcgttccagagattttctcggagtgtttggcctgtaagtttctccctatctgcgcttgtggttgtgcgggtaaagcggcgattaatgacggcactatgaataaacctttttgtatgtattcagaagaaaaattaaccatttttttaaaagactacatcaaaaggctttctgcatga

SEQ ID NO: 25000 - protein, 179 aa, Unknown
  Obtained from environmental sample
  misc_feature (1)..(179): Xaa is any amino acid
MRRRAYLRPFVNFPTMCTSDFLTHLRDIMTHFQVNVYMVLFIRTSKPKTFNTIYQKYGQPLTTLFGKKAPCAMVCENSYLIDPLLNVYKCDLLLNRPEYSVGYIDCNGQFIKNAEFYKQMNRVPEIFSECLACKFLPICACGCAGKAAINDGTMNKPFCMYSEEKLTIFLKDYIKRLSA

SEQ ID NO: 25001 - DNA, 357 bp, Unknown
  Obtained from environmental sample
  misc_feature (1)..(357): n is a, c, g, or t
atgtatagcatagattatatacggcgtgcggtagcctacaaagatgaggggcataccttcagggaattaaaagattcgtttaatattccagcagaaacttattatcaatggaaagaaaagcttaaaaacggatacgatggggcaaaagtttttcgggaaaggtcacgaaagatagacaaggagaaactgaaaaaagccgtagaggaaaaaccggatatgtatctttatgaactggcacaactgtttgactgtacgccccaagcggtctttctcatgcttgaaaaactcaatataacacgaaaaaaaagtcctttacttattatgaaaagtccgaagagaagcgtacagaatttataa

SEQ ID NO: 25002 - protein, 118 aa, Unknown
  Obtained from environmental sample
  DOMAIN (1)...(117): Transposase
  misc_feature (1)..(118): Xaa is any amino acid
MYSIDYIRRAVAYKDEGHTFRELKDSFNIPAETYYQWKEKLKNGYDGAKVFRERSRKIDKEKLKKAVEEKPDMYLYELAQLFDCTPQAVFLMLEKLNITRKKSPLLIMKSPKRSVQNL

SEQ ID NO: 25003 - DNA, 561 bp, Unknown
  Obtained from environmental sample
  misc_feature (1)..(561): n is a, c, g, or t
gtgattttgaaatttctaattctctttatgaaaaatgaaaaactggaattggttcgcggggatattacccgcatggaagtagacgcaattgtaaatgccgccaattcaagccttgccggaggcggcggagttgacggggccatacaccgcgccgccgggccggagcttcttgatgaatgtatgagcatcgcgaaagaaaggcggaatattcctggcggcccttgtcctgccggggacgctgttatcaccggggcgggaaagctcccctgcaagaaagtgattcacaccgtgggcccgatctggcgcggcgacgcaagcggggaggcggagcttcttgcctcgtgttacagaaagagcctgcttcttgcggaagaggccgggctaaaaagcatagcctttccaaacatcagtaccggaattttcggctacccgaaagacaaggcggctcttgttgcgctggaaactgtacgcaaaactctggacgaaacgcccggcatagaacgggttgtctttgtctgctttgacgaagaaaatcttaatttgtatcggaaaaacttgtga

SEQ ID NO: 25004 - protein, 186 aa, Unknown
  Obtained from environmental sample
  DOMAIN (31)...(152): Appr-1-p processing enzyme family
  misc_feature (1)..(186): Xaa is any amino acid
MILKFLILFMKNEKLELVRGDITRMEVDAIVNAANSSLAGGGGVDGAIHRAAGPELLDECMSIAKERRNIPGGPCPAGDAVITGAGKLPCKKVIHTVGPIWRGDASGEAELLASCYRKSLLLAEEAGLKSIAFPNISTGIFGYPKDKAALVALETVRKTLDETPGIERVVFVCFDEENLNLYRKNL

SEQ ID NO: 25005 - DNA, 711 bp, Unknown
  Obtained from environmental sample
  misc_feature (1)..(711): n is a, c, g, or t
atgggctggcttttggaaatccgcgataaagacggagttgatctgtaccctgaaatacgtaaaaaagcgaaagcgaaaaacgcggcggaaaaacacagcgatatggttcgttacgattatattgataaactcgggttttactgcacggaatccagcgaacataacgccgaatacaaccctttctatattaaatcaaaatacccgcagttaattggtgaatttaatatcccgttagacgaatatccgcgcagatgtgtggaacagatcaaaggctggaaagccgaatatgaaagccttgcaaaaaaagacattattgaacatgaaagatcgcacgaatacgcctcgtacataatggaatccattgttacgggaaatacatataaaataggcggaaatgtgcttaacacgggcttaagtatcgaaaatctgcccgcgcaagcctgcgttgaggttccctgtcttgtagacggctcgggtataagggcgtgccatgcgggaaaactcccggttcagcttgccgcgatgaatatgacgcacgtcaatgtccatttaattgtcattgaagccgctgttacaaaaaagcgcgagcatatttatcatgcggcgatgcttgagcctcatacggcggcggagctttctcttgatcacatccgctctatgacagacgaattgctggaagcccacaaaccatggatgcctgagtataaataa

SEQ ID NO: 25006 - protein, 236 aa, Unknown
  Obtained from environmental sample
  DOMAIN (1)...(208): Family 4 glycosyl hydrolase
  misc_feature (1)..(236): Xaa is any amino acid
MGWLLEIRDKDGVDLYPEIRKKAKAKNAAEKHSDMVRYDYIDKLGFYCTESSEHNAEYNPFYIKSKYPQLIGEFNIPLDEYPRRCVEQIKGWKAEYESLAKKDIIEHERSHEYASYIMESIVTGNTYKIGGNVLNTGLSIENLPAQACVEVPCLVDGSGIRACHAGKLPVQLAAMNMTHVNVHLIVIEAAVTKKREHIYHAAMLEPHTAAELSLDHIRSMTDELLEAHKPWMPEYK

SEQ ID NO: 25007 - DNA, 573 bp, Unknown
  Obtained from environmental sample
  misc_feature (1)..(573): n is a, c, g, or t
atgctgaaaataacttttttaggagccggcagtacaatttttgttcgtaatgtgcttggcgattgtatgtcgagcgaagctttacgtgaatgtgaaattgccctgtacgatattgatgcgcaaagattaaaagaaagcgaacggattttaacagcgataaataaaggcaagggcggatattcaaaaatcacctgttatgccggtcttgaaaatcttgaaaaggcgctcaaagacgcagcttttgttgtgaacgccattcaggtcggcggttacgatcctgcaacaatcgccgattttgaaatccccaaaaaatacggactgcgccaaaccatcggcgacactttgggcataggcggcattatgcgcgctttgcggacaattcccgtcttggagcattttgcccgcgtcatggaaaaagtttgcccgaatgcgtggtttctcaattacaccaatccgatgtccatgctgacgggttttatgcaaagatacacaggcgtaaaaaccgtcggtcttgccacagtgttcaggttgttcatatggctttttaagggatggaaatggaagataagttga

SEQ ID NO: 25008 - protein, 190 aa, Unknown
  Obtained from environmental sample
  DOMAIN (3)...(190): Family 4 glycosyl hydrolase
  misc_feature (1)..(190): Xaa is any amino acid
MLKITFLGAGSTIFVRNVLGDCMSSEALRECEIALYDIDAQRLKESERILTAINKGKGGYSKITCYAGLENLEKALKDAAFVVNAIQVGGYDPATIADFEIPKKYGLRQTIGDTLGIGGIMRALRTIPVLEHFARVMEKVCPNAWFLNYTNPMSMLTGFMQRYTGVKTVGLATVFRLFIWLFKGWKWKIS

SEQ ID NO: 25009 - DNA, 546 bp, Unknown
  Obtained from environmental sample
  misc_feature (1)..(546): n is a, c, g, or t
ttggcattattttatctatacaacaatattctctttgttgcactaaacacatcatctaatgatgttacaagcacggaaatggcaatgccttacatagaaagttttgactcaactatttccgctgccaaagccatgtacagaggaaagtatgactggattatagttcagcaccacagatcctccagagccttgcaaacctttatggagagggaaattcggcattatatgaatgcaggttttgagaaactcatggaagatcacaaggtggattttgttttggctgggcacgaccacgtatatgccagagttaaattggagggcatatattatatgacttttacaactgcgagcggaataaaatattatgacttgcccaatatagcatacgaacaaactttgccagacaatgtatatgctcaaaacagaatacccggatatgcaatttttgaagttaatagcgatggcatttccgtatctgtttacgagatggataaaagcacgccaattgatacgtttgcggttaaagtttctacattagcaaaatga

SEQ ID NO: 25010 - protein, 181 aa, Unknown
  Obtained from environmental sample
  misc_feature (1)..(181): Xaa is any amino acid
MALFYLYNNILFVALNTSSNDVTSTEMAMPYIESFDSTISAAKAMYRGKYDWIIVQHHRSSRALQTFMEREIRHYMNAGFEKLMEDHKVDFVLAGHDHVYARVKLEGIYYMTFTTASGIKYYDLPNIAYEQTLPDNVYAQNRIPGYAIFEVNSDGISVSVYEMDKSTPIDTFAVKVSTLAK

SEQ ID NO: 25011 - DNA, 504 bp, Unknown
  Obtained from environmental sample
  misc_feature (1)..(504): n is a, c, g, or t
atgctgcaaacggtaaatacgggcggaacagccgcaaaagtatggtctagcggttttcaccacncaagcggcggcaaaactggaaccacaaatgattataccgatgcgtggtatataggtttcaccaagcaatacacaatgggcgtgtggattggaacagatgattttatacctatgggaccagggcacacgggtacagaagatgcgctgccagtgtggctaaattcaatgccactaattcataaaaatttgccagagttgcaattctcagttccgggtggagttttttcaaaaagaatttgcaactacacgggcaaagtagcaggctcatattgcaatcaatcaacaagctgcctttacaccgccagctccccagacattgaagagtgcgatggcaagcattttgagcaaccaaaagaaagcggagccaccatattcagcaacacttctgcccccgccgctcccaatacaaaaaccaccgctaaaacaagacaggtgttttaa

SEQ ID NO: 25012 - protein, 167 aa, Unknown
  Obtained from environmental sample
  misc_feature (1)..(167): Xaa is any amino acid
MLQTVNTGGTAAKVWSSGFHHXSGGKTGTTNDYTDAWYIGFTKQYTMGVWIGTDDFIPMGPGHTGTEDALPVWLNSMPLIHKNLPELQFSVPGGVFSKRICNYTGKVAGSYCNQSTSCLYTASSPDIEECDGKHFEQPKESGATIFSNTSAPAAPNTKTTAKTRQVF

SEQ ID NO: 25013 - DNA, 750 bp, Unknown
  Obtained from environmental sample
  misc_feature (1)..(750): n is a, c, g, or t
atgcctgttcttcatggtaaaaacggcgaggacgggacggttcagggactgttggaacttgcgggaatccctattgtcggctgtaacacgctttcatccgcgctttgtatggacaaggacagggcacacaaaatcgctcatatgatcggtgtccgaatacctggttctgtcgttcttgaaaatgaaatgaccgtggaaacagtttgggagcaaatagcaaatatgggctatcctatatttgtcaaaccagtaagggctggttcatcctatgggattaccaaagttttgaataaagatgagttgccggcagctatcaagctggcctatgagcatgatgacagagttatcattgaagaaaatatatcaggctttgaagtcggctgcgctattttaggcaatgataagcttgtagtaggagaattaggcgagatagagctttccggcggcttttttgattacaaggagaaatacactccggaaacatactcctatcatgttccggcgcgaatatcgccgcaaaaaactgaagaaatcaaaaccattgcgaagaagatatacagggctttaggctgcactggttttgcgcgtgtggatatgtttttaactccggcaggagaagttttttttaacgaagtgaacactatccccggatttactgaccacagccactacccgcatatgcttaaagctgttggcatgacatttgagcaaattataaatacggctatcggacagacagtgaaaaaatga

SEQ ID NO: 25014 - protein, 249 aa, Unknown
  Obtained from environmental sample
  DOMAIN (38)...(243): Carbamoyl-phosphate synthase L chain, ATP binding domain
  misc_feature (1)..(249): Xaa is any amino acid
MPVLHGKNGEDGTVQGLLELAGIPIVGCNTLSSALCMDKDRAHKIAHMIGVRIPGSVVLENEMTVETVWEQIANMGYPIFVKPVRAGSSYGITKVLNKDELPAAIKLAYEHDDRVIIEENISGFEVGCAILGNDKLVVGELGEIELSGGFFDYKEKYTPETYSYHVPARISPQKTEEIKTIAKKIYRALGCTGFARVDMFLTPAGEVFFNEVNTIPGFTDHSHYPHMLKAVGMTFEQIINTAIGQTVKK

SEQ ID NO: 25015 - DNA, 696 bp, Unknown
  Obtained from environmental sample
  misc_feature (1)..(696): n is a, c, g, or t
gtgcgggccgtatgggacgccccgcgcccaagggcacaacaacgagttcacatgcgtaccccctctgtcggtattgctcctgaaggttggccgtgtatcggcctgtgcgcgttttcatcctgcattttcgcgtgggtcggctgctggcccgcagcctgcgtattcctcgtcctgacctggttttccgtatattttttccgcgatccggaacgggtgacgccgagcgcgcccggtctggccgtaagcccggcggacggcaaggtcatcgtcatcgggccgcgcaaagacccgttgagcggcgaagaacgcatctgcatctcgattttcatgaatctgttcagcgtacatgtgaaccgttcgccgatagaggccgtggtcgaggccatacgctaccatcccggaaaattctttaacgcttcctttgacaaagcctccacggacaacgagcgttgcgcctacctgctgcgggatgcggacggcggcagttggaccgtgatccaaatcgccggacttgtggcgcgccgcatcgtgtgccgcgtggacgaaggcgatcgcctggcgcgtggccggcgcttcggcttgatacgcttcggttcgcgggttgacctttttcttcccgccgggtacattccggcatgtacggtcggggatcaggtgtttgcggcgcagagcatagtggcccgcaaagacgcctga

SEQ ID NO: 25016 - protein, 231 aa, Unknown
  Obtained from environmental sample
  DOMAIN (58)...(227): Phosphatidylserine decarboxylase
  misc_feature (1)..(231): Xaa is any amino acid
MRAVWDAPRPRAQQRVHMRTPSVGIAPEGWPCIGLCAFSSCIFAWVGCWPAACVFLVLTWFSVYFFRDPERVTPSAPGLAVSPADGKVIVIGPRKDPLSGEERICISIFMNLFSVHVNRSPIEAVVEAIRYHPGKFFNASFDKASTDNERCAYLLRDADGGSWTVIQIAGLVARRIVCRVDEGDRLARGRRFGLIRFGSRVDLFLPAGYIPACTVGDQVFAAQSIVARKDA

SEQ ID NO: 25017 - DNA, 624 bp, Unknown
  Obtained from environmental sample
  misc_feature (1)..(624): n is a, c, g, or t
atgattaaactagccgcctttttgggcaatcccggcgcggaatattcgcgtaacagacacaatgccggacgtatgcttgcgcaggcacttcccttttatgattctctttcatggcaaaaaaaatacaaagggctgtacgcttcgcatgatgaaaaacactttcttatgcccgaaacatacatgaacttatccggcgaatccgtgcaagccgccgccgcttttttcaaaattgacgtaaaggaaattatcgtaattcatgatgaattggaactgccgctgggcgttatttctttaaagtattcaggcgggcttggcggacataacgggcttcgttccatgaaaaaaagttttaacagcgcggatttttggcgcatacggataggtataggtcgccccgattccagacttcccggagaaggcgggcatgaaggaagcggagagggcgtttacgactgggttttgtcggatttttcaaagaatgagcaagagacgcttatgcccgttcttgatgccggcgcgaatcttttaatgaaaactattgaagacgaccctgaaactttattaaaagaatggacaaaaaagaaaataataattgaaaaaccggaaggcggtgaacaaaaatga

SEQ ID NO: 25018 - protein, 207 aa, Unknown
  Obtained from environmental sample
  DOMAIN (4)...(192): Peptidyl-tRNA hydrolase
  misc_feature (1)..(207): Xaa is any amino acid
MIKLAAFLGNPGAEYSRNRHNAGRMLAQALPFYDSLSWQKKYKGLYASHDEKHFLMPETYMNLSGESVQAAAAFFKIDVKEIIVIHDELELPLGVISLKYSGGLGGHNGLRSMKKSFNSADFWRIRIGIGRPDSRLPGEGGHEGSGEGVYDWVLSDFSKNEQETLMPVLDAGANLLMKTIEDDPETLLKEWTKKKIIIEKPEGGEQK

SEQ ID NO: 25019 - DNA, 549 bp, Unknown
  Obtained from environmental sample
  misc_feature (1)..(549): n is a, c, g, or t
atgacggcgcaggaagcatttaaagagttatacgacattgtagtaaggttgcgcggtcccggcggctgtccgtgggacattgagcaaacgccttcttcgcttagaggctcgttagttgaagaaacctacgagtgccttgaggctatcgatgaaaaagattcggctcacatagccgaagaacttggagatttatttttactcgcaacaatgattagctacatgcacgaacaggaaggaaaattttccgttgcggacgcgttatcaaatgtaggcaaaaaattaatccgccgccacccgcatgtgttcggcgaggtaaaagtaaaagacagcgccgaagttttaaacaactgggcggagataaaagtaaaacaagaagggcgaanaccgaaagattcaatacttgatgaagtaagcggcggacttccgccgatggagcgttcttttaaactgcaaaaaaaagccgccaaagcgggttttgattggcaagacattgaaggagtgatggaaaaattcaggaagagcttgaagaaatacgcaccgcaaaaatga

SEQ ID NO: 25020 - protein, 182 aa, Unknown
  Obtained from environmental sample
  DOMAIN (29)...(102): MazG nucleotide pyrophosphohydrolase domain
  misc_feature (1)..(182): Xaa is any amino acid
MTAQEAFKELYDIVVRLRGPGGCPWDIEQTPSSLRGSLVEETYECLEAIDEKDSAHIAEELGDLFLLATMISYMHEQEGKFSVADALSNVGKKLIRRHPHVFGEVKVKDSAEVLNNWAEIKVKQEGRXPKDSILDEVSGGLPPMERSFKLQKKAAKAGFDWQDIEGVMEKFRKSLKKYAPQK

SEQ ID NO: 25021 - DNA, 1017 bp, Unknown
  Obtained from environmental sample
  misc_feature (1)..(1017): n is a, c, g, or t
atgaatgactcaaaggccttcgaaaagcaggaagaactcaaggcgatgaccatttgctgcgacgcgataatcacttacgccaaccgctacgccgacgaagccgagcgccttgccgcgcttgaaacgaaccctgttcgcaaggaggagctgcttgccatcgcgcttaattgccgccgcgtcccagcacgcaaacctgagaatttctggcaggcccttcagatgtactggttcgttcatgtttctgtaactaccgagcttaacacctgggacgcgttctcgcccggcagactcgatcagcatctatatccgttctacaaaaaagagctccatgaaggaagcttaaacgaagagagggccagggaactcttgcagtgtttttgggtaaaatttaacaaccagccggcccctccgaaggttggcattacccttgccgaaagcggcacctacaccgacttttgcaacataaactctggcggcctgacttccgacggcagcgacggggtaaacgatgtcacctatatgattttggaagtcattgacgagatgcggcttgttcagccgagcagcaatattcagttaagcaagaaaaacccggacaagtttttgaacaaggcctgcaaggttattaagcggggaatgggacagccgtcggtgtttaacgcagacgctgttgtggaagaacttgtccggcagggaaagaagatagaagatgccagagacggcggaacatcaggctgtgtggaagccggaaccttcggcaaggaatgttacgccttaaccggctatttcaaccttgttaaggtgctggaaattacgctgaataacggctatgacccaatcgctaaaaaacagcttgggctaaaaaccggtgaaacctcttcgtttaaaactttcgaggatctattctccgcttacgaaaaacaggtaaggcattttattgatataaaagttgccggcaataatataatagaggcgctttattcaactatatgccctgcccgtttctttccatcgtaa

SEQ ID NO: 25022 - protein, 338 aa, Unknown
  Obtained from environmental sample
  DOMAIN (1)...(338): Pyruvate formate lyase
  misc_feature (1)..(338): Xaa is any amino acid
MNDSKAFEKQEELKAMTICCDAIITYANRYADEAERLAALETNPVRKEELLAIALNCRRVPARKPENFWQALQMYWFVHVSVTTELNTWDAFSPGRLDQHLYPFYKKELHEGSLNEERARELLQCFWVKFNNQPAPPKVGITLAESGTYTDFCNINSGGLTSDGSDGVNDVTYMILEVIDEMRLVQPSSNIQLSKKNPDKFLNKACKVIKRGMGQPSVFNADAVVEELVRQGKKIEDARDGGTSGCVEAGTFGKECYALTGYFNLVKVLEITLNNGYDPIAKKQLGLKTGETSSFKTFEDLFSAYEKQVRHFIDIKVAGNNIIEALYSTICPARFFPS

SEQ ID NO: 25023 - DNA, 864 bp, Unknown
  Obtained from environmental sample
  misc_feature (1)..(864): n is a, c, g, or t
atgacagattggccgaggcgttccgagcgtattgttaccggggtgcgggctattgacggccttttggcggtgggccgggggcagcggttgggtatttttgccgggtccggcgtaggtaaatcaaccctgctgggaatgattgcccgtaacaccaatgccgacgttaacgtggtcgcccttatcggtgagcggggccgcgaggtcaatgactttatcgagaatgatctggggccggaagggcttgcccgcagcgtgttagtggtaactccttccaactcgccgcctctggcgcgtctgcggggggcttatgtggcaaccgccgtcgctgaatttttccgcgatcaggggctggacgttatgttgttattcgattcggtaacccgctttgcccgcgccatgcgggagattggccttgcgtcaggcgaaccgcccgcgacgaggggctatacccccagtatgttcgactccatgcccaaattgctggaacgttccggcacttccgatgtggggagtatcaccggcttttatacgattcttgttgacggcgatgatatggacgagccggtggcggatacggtgcgcggtatacttgacggccacattgtgctgtcccgccgcctcgctcaggcttaccattacccggccattgacgtactgcaaagtatttcccgtcttgccccttcggtatcggggccgtcgcataacaaggccgccgcttccctgcgccgcagtatggcggcttatgccgaggtggaagaccttatcaatgtaggggcgtatcacgccgggtcgaatcctgccatagacgacgctatcgcccaaacaccacctatcgaggaattttttgatcagtcggttgaatga

SEQ ID NO: 25024 - protein, 287 aa, Unknown
  Obtained from environmental sample
  DOMAIN (13)...(223): ATP synthase alpha/beta family, nucleotide-binding domain
  misc_feature (1)..(287): Xaa is any amino acid
MTDWPRRSERIVTGVRAIDGLLAVGRGQRLGIFAGSGVGKSTLLGMIARNTNADVNVVALIGERGREVNDFIENDLGPEGLARSVLVVTPSNSPPLARLRGAYVATAVAEFFRDQGLDVMLLFDSVTRFARAMREIGLASGEPPATRGYTPSMFDSMPKLLERSGTSDVGSITGFYTILVDGDDMDEPVADTVRGILDGHIVLSRRLAQAYHYPAIDVLQSISRLAPSVSGPSHNKAAASLRRSMAAYAEVEDLINVGAYHAGSNPAIDDAIAQTPPIEEFFDQSVE

SEQ ID NO: 25025 - DNA, 1509 bp, Unknown
  Obtained from environmental sample
  misc_feature (1)..(1509): n is a, c, g, or t
atgactctcatcccgggcgctaataataacggatccggtgtacgctggctgccttcacgggccagccctgccggcagttcgtcagacggttgcctgcaacccaacggggcattcaccggtaccacgtatttcctgcagattgttaatgtcccggggccgttcgtaatttccttgaactataccgataccggcgacaccaatacaggacgtaaagctgttctttatattaacggtacccaggtacaggaaggcccggcaggtactgggtcaaaagactgcaaaactgtttcctatagttacacggggactgatagagttacggttcagttaggcagttcgaatggcatcaggctttttgatgtagagcttgcgcagtggattgcggttaacagcgttaccattgccgaaggtaatttctctatggcgacagggggcaccaggcagcttacggcgaacatacagcccgctaatgcctccaataaagcggtaacatgggaaagcaacaacacttccagggcaaccgttgattcaaacgggaaggtgacaatcgccagcaacgcgacgggcaacgtgaccattaccgccatttccgcggctgacaccagcaagaagggtacgtcaactattaccataagcaaagcggttacaggcgttaccgtgagcccgactaccgcctccgttgccgttggaagtacgacgaccattaccgcgacagtagctcccactaacgcgaccaataaaaatatcacctggtcgagcagcgacaccactgtggcgactgttgattcaaacggaaaggtgacgggcgttaaggcgggaagcgtgacgattaccgctacttctgcggctgactccagcaagaaagccacggcaactgtcaccgtaactgccgcaacctcaaacgtgccggttaccggtattagcatcgatgggggaaatttctccctctccgtcaatgcaacaaagacccttaccgtgacggtaacaccctctaacgcgaccaataaaaatgtcacctggtccagcggcactaccgccaatgcgaccgttgattcaaacggaacggtgaaaggcgttaaggcgggaacatcggtaattaccgcgacggcggcggacggttccaacgtaaaaggcacggtaaacgttaccgtatcgtccggccctgtcgccatgaccccgcaggagatattcgccgacttaaagggaaagaaagtaaccaccaacggctgggcggatcggtacaatagcggcgcgggtctttcttatcagaatccctcaagccttaccctgatagacgacgctacatatcccaacgcgacaaacaagcgcaaggcttttaccgacgcgattgattccaccagcaacaaattcatcattctttccggggatatagatctgagcgacggcaagataagcgacagcaacaagtcatactttgatcaattcaactcggaccacacacgtaaaaatgccgacattcatttaacctcaggtcccacaccaccttaa

SEQ ID NO: 25026 - protein, 502 aa, Unknown
  Obtained from environmental sample
  DOMAIN (128)...(209): Bacterial Ig-like domain (group 2)
  misc_feature (1)..(502): Xaa is any amino acid
MTLIPGANNNGSGVRWLPSRASPAGSSSDGCLQPNGAFTGTTYFLQIVNVPGPFVISLNYTDTGDTNTGRKAVLYINGTQVQEGPAGTGSKDCKTVSYSYTGTDRVTVQLGSSNGIRLFDVELAQWIAVNSVTIAEGNFSMATGGTRQLTANIQPANASNKAVTWESNNTSRATVDSNGKVTIASNATGNVTITAISAADTSKKGTSTITISKAVTGVTVSPTTASVAVGSTTTITATVAPTNATNKNITWSSSDTTVATVDSNGKVTGVKAGSVTITATSAADSSKKATATVTVTAATSNVPVTGISIDGGNFSLSVNATKTLTVTVTPSNATNKNVTWSSGTTANATVDSNGTVKGVKAGTSVITATAADGSNVKGTVNVTVSSGPVAMTPQEIFADLKGKKVTTNGWADRYNSGAGLSYQNPSSLTLIDDATYPNATNKRKAFTDAIDSTSNKFIILSGDIDLSDGKISDSNKSYFDQFNSDHTRKNADIHLTSGPTPP

SEQ ID NO: 25027 - DNA, 921 bp, Unknown
  Obtained from environmental sample
  misc_feature (1)..(921): n is a, c, g, or t
ttgtaccgatccgcccagccgttggtggttactttctttccctttaagtcggcgaatatctcctgcggggtcatggcgacagggccggacgatacggtaacgtttaccgtgccttttacgttggaaccgtccgccgccgtcgcggtaattaccgatgttcccgccttaacgcctttcaccgttccgtttgaatcaacggtcgcattggcggtagtgccgctggaccaggtgacatttttattggtcgcgttagagggtgttaccgtcacggtaagggtctttgttgcattgacggagagggagaaatttcccccatcgatgctaataccggtaaccggcacgtttgaggttgcggcagttacggtgacagttgccgtggctttcttgctggagtcagccgcagaagtagcggtaatcgtcacgcttcccgccttaacgcccgtcacctttccgtttgaatcaacagtcgccacagtggtgtcgctgctcgaccaggtgatatttttattggtcgcgttagtgggagctactgtcgcggtaatggtcgtcgtacttccaacggcaacggaggcggtagtcgggctcacggtaacgcctgtaaccgctttgcttatggtaatagttgacgtacccttcttgctggtgtcagccgcggaaatggcggtaatggtcacgttgcccgtcgcgttgctggcgattgtcaccttcccgtttgaatcaacggttgccctggaagtgttgttgctttcccatgttaccgctttattggaggcattagcgggctgtatgttcgccgtaagctgcctggtgccccctgtcgccatagagaaattaccttcggcaatggtaacgctgttaaccgcaatccactgcgcaagctctacatcaaaaagcctgatgccattcgaactgcctaactga

SEQ ID NO: 25028 - protein, 306 aa, Unknown
  Obtained from environmental sample
  misc_feature (1)..(306): Xaa is any amino acid
MYRSAQPLVVTFFPFKSANISCGVMATGPDDTVTFTVPFTLEPSAAVAVITDVPALTPFTVPFESTVALAVVPLDQVTFLLVALEGVTVTVRVFVALTEREKFPPSMLIPVTGTFEVAAVTVTVAVAFLLESAAEVAVIVTLPALTPVTFPFESTVATVVSLLDQVIFLLVALVGATVAVMVVVLPTATEAVVGLTVTPVTALLMVIVDVPFLLVSAAEMAVMVTLPVALLAIVTFPFESTVALEVLLLSHVTALLEALAGCMFAVSCLVPPVAIEKLPSAMVTLLTAIHCASSTSKSLMPFELPN

SEQ ID NO: 25029 - DNA, 573 bp, Unknown
  Obtained from environmental sample
  misc_feature (1)..(573): n is a, c, g, or t
gtgcgtaattcgaatatcattatgtcgcgtacaaatttaatagacgacctcggacttggagacgagattgatccgagtttaattcaatcttcaatcacaacggataacaattatgaaccggttgaaaagggacggcgcaagattgccgaagaaattctagggcgttcacggcggcttgtacctgaatacggaattgagcttattgatgtagttatccgtcaaatccgctatactgacgatcttacactcagcgtgtatgagcgcatgattaaagagcgtaaccaaatcgcacaggcgatccgttccgaaggtgagggaagaaaggccgctttactgggcagaatggtcaacgaacgaatggaaataagttctgcggcgtataatttagccgaagcaatacgcggagaagcggatgcggaagcggcggggatttacgctgaagcgtataacagggacaggggattctttgatttctggagggcaatagaatcgtacaggcaaactatgcctaaattcaacaaaacgcttaccacaagcatggaatatttcaagtatctttattcgccgagatag

SEQ ID NO: 25030 - protein, 190 aa, Unknown
  Obtained from environmental sample
  misc_feature (1)..(190): Xaa is any amino acid
MRNSNIIMSRTNLIDDLGLGDEIDPSLIQSSITTDNNYEPVEKGRRKIAEEILGRSRRLVPEYGIELIDVVIRQIRYTDDLTLSVYERMIKERNQIAQAIRSEGEGRKAALLGRMVNERMEISSAAYNLAEAIRGEADAEAAGIYAEAYNRDRGFFDFWRAIESYRQTMPKFNKTLTTSMEYFKYLYSPR

SEQ ID NO: 25031 - DNA, 396 bp, Unknown
  Obtained from environmental sample
  misc_feature (1)..(396): n is a, c, g, or t
ttgggcagggccgcctgcgcccagggagtccaagtcctttatacaagggttactgattatttcaatgtgatatttgcttcttcaagcaactacaggcacaaaccgttgcgggataaattcgcttccgtgcccctgctcatccttgacgactgggggcttaaaaagttttccgttgaagaaagccatgaactctcagagctgtttgaacggcgttatggccgggccgcaaccgtcatttcaggacagattccttccacctcctggcatgacttgtttcccgacccgacgcaagctgacgcaatcctcgaccgtattgtccataacgcctatgcctataatatctcaggtgagtccatgcggaaagccctcgggaaaaaggatcttgaaatgtcctga

SEQ ID NO: 25032 - protein, 131 aa, Unknown
  Obtained from environmental sample
  DOMAIN (1)...(112): IstB-like ATP binding protein
  misc_feature (1)..(131): Xaa is any amino acid
MGRAACAQGVQVLYTRVTDYFNVIFASSSNYRHKPLRDKFASVPLLILDDWGLKKFSVEESHELSELFERRYGRAATVISGQIPSTSWHDLFPDPTQADAILDRIVHNAYAYNISGESMRKALGKKDLEMS

SEQ ID NO: 25033 - DNA, 783 bp, Unknown
  Obtained from environmental sample
  misc_feature (1)..(783): n is a, c, g, or t
gtgcctattacgctggaagaaccgaatgtgctgcttcttgatatggccgagtacgccctgtgtacgggagacgccggtgagtggcggccaaaggaagaaatactcaggcttgacaataaactcagagccgagctgaaatggccgatccgtggagacggctgggcccagccctgggttgagcgcgacaccagcactccctttactttaaaactgcgctttacttttgaaagtgaaatagtcgtaaccggcgcggaacttgctttggaaaacgccgcgtcatccaaagttgcgcttaacggcggggcggcaggcgcggtcaagggctggtatgtggacaagtgtatcggcaaagtcggcctgccggcaatcaaggcgggaaccaatgtgctggaagtgagcttcccctacggacgcaaagttaatgttgaggccatgtacatcctgggcgatttcggtgtgaatgtcgcagtctcttcctgtgtcattaccaggccggtgcgcagccttggctttggcgacataacccgtcagggcctgcccttctacggcggcaacctgacctatcatctggaggtggagatcccgcttgatgaatcagttgaaaagtttacgcttagggctacccaataccgtgggcatttgttaaaggtgaaggcggacggaaaagattacgggcctttggtttattcgccctacgaagtggaaatccccaccggaaagggcaggcataaaattgaccttgttacttcggcagccggactcggccgaatctgtcagtgttaa

SEQ ID NO: 25034 - protein, 260 aa, Unknown
  Obtained from environmental sample
  misc_feature (1)..(260): Xaa is any amino acid
MPITLEEPNVLLLDMAEYALCTGDAGEWRPKEEILRLDNKLRAELKWPIRGDGWAQPWVERDTSTPFTLKLRFTFESEIVVTGAELALENAASSKVALNGGAAGAVKGWYVDKCIGKVGLPAIKAGTNVLEVSFPYGRKVNVEAMYILGDFGVNVAVSSCVITRPVRSLGFGDITRQGLPFYGGNLTYHLEVEIPLDESVEKFTLRATQYRGHLLKVKADGKDYGPLVYSPYEVEIPTGKGRHKIDLVTSAAGLGRICQC

SEQ ID NO: 25035 - DNA, 1035 bp, Unknown
  Obtained from environmental sample
  misc_feature (1)..(1035): n is a, c, g, or t
atgctaggattaatcaaaggagatgtaaacatgatcgccgtagttaaacagggagcaaacgagcagcagattgacagtttggtgtcgtggttccattcgcgtaatttaaagacaaacgtatccacgggggaataccagaccattatcggcctcataggcgataccagccagttggatatcgatcttctagaagggcttgaaatcgttgagtccgttaaacggatcagcgagccgtttaagcgggccaacaggaaattccatcccgcggacacggtaatagatataggcggctataaaataggcggcgggcattttcagatgattgccgggccgtgttctgtagagtcgcctgaacaaataacctgcattgccgaaagcgtcaaagcatcaggcgctgcccttctgcgcgggggcgtattcaaaccacgcacctcgccgtatgctttccagggtatgggggccgacggcatcgaactcttgttggcggccaaggccaaaacaggaatgcccatcgtttcggaaataatgaacaccgtgcatctgcctttgttcgagcatgtggacgtgatccaggtaggtgcgcggaatatgcagaattttgagctgttaaaggaagtggggcaatcgaagaagcccgtcctcctgaagcgaggattcgcgaacaccttacaggagcttttaatgagcgcggagtacatcatgtcggaaggaaacgaaaatgtaatcctgtgcgaaagaggaatacgcacatttgagacatacacgcgaaacacgctcgacctgtccgcggtgcctgtgctgaaggagcttacccatttgcccgttattattgacccaagccatgcggttggtgtatcccgctatgtgaaaccaatggcgctggcggctgtggcgtccggcgcggacggacttattatcgaggtacataacgatcctccgaacgctgcctgcgacggagcgcaatccctcacacctgaacagttcgccgatctcgcgggaagaatccaacgtattcgcgaggctattgcgtcgtaa

SEQ ID NO: 25036 - protein, 344 aa, Unknown
  Obtained from environmental sample
  DOMAIN (123)...(342): NeuB family
  misc_feature (1)..(344): Xaa is any amino acid
MLGLIKGDVNMIAVVKQGANEQQIDSLVSWFHSRNLKTNVSTGEYQTIIGLIGDTSQLDIDLLEGLEIVESVKRISEPFKRANRKFHPADTVIDIGGYKIGGGHFQMIAGPCSVESPEQITCIAESVKASGAALLRGGVFKPRTSPYAFQGMGADGIELLLAAKAKTGMPIVSEIMNTVHLPLFEHVDVIQVGARNMQNFELLKEVGQSKKPVLLKRGFANTLQELLMSAEYIMSEGNENVILCERGIRTFETYTRNTLDLSAVPVLKELTHLPVIIDPSHAVGVSRYVKPMALAAVASGADGLIIEVHNDPPNAACDGAQSLTPEQFADLAGRIQRIREAIAS

SEQ ID NO: 25037 - DNA, 459 bp, Unknown
  Obtained from environmental sample
  misc_feature (1)..(459): n is a, c, g, or t
gtgtttcgcgtgtatgtctcaaatgtgcgtattcctctttcgcacaggattacattttcgtttccttccgacatgatgtactccgcgctcattaaaagctcctgtaaggtgttcgcgaatcctcgcttcaggaggacgggcttcttcgattgccccacttcctttaacagctcaaaattctgcatattccgcgcacctacctggatcacgtccacatgctcgaacaaaggcagatgcacggtgttcattatttccgaaacgatgggcattcctgttttggccttggccgccaacaagagttcgatgccgtcggcccccataccctggaaagcatacggcgaggtgcgtggtttgaatacgcccccgcgcagaagggcagcgcctgatgctttgacgctttcggcaatgcaggttatttgttcaggcgactctacagaacacggcccggcaatcatctga

SEQ ID NO: 25038 - protein, 152 aa, Unknown
  Obtained from environmental sample
  misc_feature (1)..(152): Xaa is any amino acid
MFRVYVSNVRIPLSHRITFSFPSDMMYSALIKSSCKVFANPRFRRTGFFDCPTSFNSSKFCIFRAPTWITSTCSNKGRCTVFIISETMGIPVLALAANKSSMPSAPIPWKAYGEVRGLNTPPRRRAAPDALTLSAMQVICSGDSTEHGPAII

SEQ ID NO: 25039 - DNA, 912 bp, Unknown
  Obtained from environmental sample
  misc_feature (1)..(912): n is a, c, g, or t
atgggacagaattcggcacgagntttcccggntcttgccgaaaacggcattaaacttgtcagtcccgattcctacactgtcccacaaatggactatttggaatctttctttatcagggagatatacccggtcctcacccccctgcgtattgaagaagacaagcctctgcctttttttgaaagccgttgtataaatgccgcttttcttttaataccggatgattcttcctccacagacccggaacgcattgtcatggtgcagattcccccatcgctcagccggatcgtccggctgcccgccgagggggacatactccgctgggcgctgctggaagatataatgcttacatgggggggatacctgttccccggttacaatgtcaaagaaagcatgctgttcaaggtaaaccgggacgctgatttttccgttgacgaacgcagggacgaggatttcattgaggcaatggcggaggtaattgaagacagggaaaaatcggcgcctgtcaacatgatctattcaccgggctcaggcaggttaagggacgaactggcaaagcggttctccctggaaagcggtgacctgtacgagcttgagggccctttcaaccccggcggcctggccgaattggcgggcatcgctggtttcgagcagctgcatgaaaaagcgtggaagatatatccggctcccggttttagcgacgaagtttcgatttgggatcgtttaagtcagggcgatgttctgctccattttccctaccagtcatttgatcctgtagtccgtttcttccaggaggctgcggcggatccccatgttatctcaataaaaacggcgctttaccgcacgggcgggggcgcggggacaacccagcaggtttcactcattgtgcgatctcttgaaacaggcggcccttaa

SEQ ID NO: 25040 - protein, 303 aa, Unknown
  Obtained from environmental sample
  DOMAIN (1)...(302): Polyphosphate kinase
  misc_feature (1)..(303): Xaa is any amino acid
MGQNSARXFPXLAENGIKLVSPDSYTVPQMDYLESFFIREIYPVLTPLRIEEDKPLPFFESRCINAAFLLIPDDSSSTDPERIVMVQIPPSLSRIVRLPAEGDILRWALLEDIMLTWGGYLFPGYNVKESMLFKVNRDADFSVDERRDEDFIEAMAEVIEDREKSAPVNMIYSPGSGRLRDELAKRFSLESGDLYELEGPFNPGGLAELAGIAGFEQLHEKAWKIYPAPGFSDEVSIWDRLSQGDVLLHFPYQSFDPVVRFFQEAAADPHVISIKTALYRTGGGAGTTQQVSLIVRSLETGGP

SEQ ID NO: 25041 - DNA, 1227 bp, Unknown
  Obtained from environmental sample
  misc_feature (1)..(1227): n is a, c, g, or t
ttgaaagttgtagttattggcgcccaatggggtgatgagggaaagggaaagatcgttgattatctggcaaatgaggcgcagataatcgtccgttatgccggcggcgcaaatgcgggacatactatcgtcattggcggcgagcaatacgctttacacctgattccttccggtgttttttattccgataaaattgttattctgggtgcgggcatggtgattgatccggtcgcgttattcgatgaaattaaaatgctggaagaccggggcatcgacaccacaggccgggttttaatttctgaccgggcgcatctggtgctgccccgctacattaagattgacaaggaacgggacgcggcgcgcaaaaaaccaatcggcactacaggccggggcattgggattacctattccatgaaaagcgaccgcgaaggcatccgcattgcagaccttgcgtggaaagataaaatggcggaacttgaggctgaagaccgcgattttctggccccctataccgaaaggcttcttgccatgtcggttgatcttgcgtcgtatctggtacaccggaaaaattcgcaaatattgtttgaaggggcgcaggggactctgcttgatcttgatttgggaacctatccctatgtaagcagcggaatgtcctgcgccgcgggggcggcggtgggcggctgtatcgggccgagagccatcgacaaggtactgggagtttttaaggcctattcaacccgcgtgggaaacggccccctgcccagtgaatttgatcccaagtccgaggacgaattatgccgttttgtccgcgaaacaggccgcgagtacggcgttaccaccggaaggccccggcgctgcggctatctggatttagtctccctgcgttacgcctgcataaccaattcaatcgatagtctggtaatgacccaccttgacgtatacgacacttttgatgaaataaaagcctgcatcgcctaccgtatcggcgaccgcatcgtggaaaaattccccgcttccattgaagaacttaacagcgcgaaaccggtgctgcggactttcaccggttggaaaaaatcacttgccgacgctcttacctacgaggaatttccccttgccgcaatggagtacattgactttgtagaacgttattgtgaaacgccgattgatattgtttctgtcggctatgaccgcaaggcaacgattatccgcaagagtccatgggcaaaatag

SEQ ID NO: 25042 - protein, 408 aa, Unknown
  Obtained from environmental sample
  DOMAIN (2)...(401): Adenylosuccinate synthetase
  misc_feature (1)..(408): Xaa is any amino acid
MKVVVIGAQWGDEGKGKIVDYLANEAQIIVRYAGGANAGHTIVIGGEQYALHLIPSGVFYSDKIVILGAGMVIDPVALFDEIKMLEDRGIDTTGRVLISDRAHLVLPRYIKIDKERDAARKKPIGTTGRGIGITYSMKSDREGIRIADLAWKDKMAELEAEDRDFLAPYTERLLAMSVDLASYLVHRKNSQILFEGAQGTLLDLDLGTYPYVSSGMSCAAGAAVGGCIGPRAIDKVLGVFKAYSTRVGNGPLPSEFDPKSEDELCRFVRETGREYGVTTGRPRRCGYLDLVSLRYACITNSIDSLVMTHLDVYDTFDEIKACIAYRIGDRIVEKFPASIEELNSAKPVLRTFTGWKKSLADALTYEEFPLAAMEYIDFVERYCETPIDIVSVGYDRKATIIRKSPWAK

SEQ ID NO: 25043 - DNA, 1614 bp, Unknown
  Obtained from environmental sample
  misc_feature (1)..(1614): n is a, c, g, or t
atgatcagatcggccgagaattgttctgtctttaatgacggtggcgaaggctggattgaaaaaagcatatataattacgcgcaaaaagagcgtaacgccgttgccgggccggtttgggaaaagggatgggctgcgctttcaggcggcctgcctgattttaaccaggcggcagagctgcagcgcaagtattggggttctttctgggaaaacgcggatatccgtatcgagggagaccctcttaaccagcagggaatccgcttctgcatttttcagctgcaccagacctaccacggctacgatccttcaaataacataggggcgaagggccttactggcgaatcttataacggccataccttttgggacaccgaaacttactgccttcctttttatattttttccaatccgcaagcagcccggaatctgctggattaccgctacgcgacgcttgatgcggcaaaggaaagggcacatgcccttgactgtcgaggcgcctgttatcctatagctacgcttaatggagaggaaggatgcagtctttggcaacatgccagcctgcaattccagcccagtaccggcgtggcttttggtattgcccattatgccagggtaagcggggacagggaattcttgtacgaccgcggcgcggaaatgctggtggaaatcagccgctttcttgaatcgcgcggctcatggaacggaacaggttttggtttctatgcggtaatggggcccgatgaattccatatgatggtcaaccataattgttataccaattacatggcgaagaaaacctttgaatataccgtggaagtcctggatgaaatggaaaaacataagcctgaaaagtacctcgcgctttgcaaaaaaaacggactttcagaagcggagtggaaaaactttgcctgttgcgctgataaaatgatcatcctctacgacgaaaaaacaaaactgtttgaacagcacgaagggtacttttcccttccccacattgaaatatctcaaattcctgttactgattttccgctctacaataactggtcttatgatcgcatttaccgtactgatatgattaaacagcccgacgttttaatgttcttgtttttgcatagccgggaattctccgaagaaatcaaacgggtaaattatgaattttacgaaccccgtaccagccatgagtcttcactttcgccttcaatacattccatacttgcatctgaaattggaaaaccggctgatgctttccgtttttttgcctttgcaacgcggatggatctcgacaactacaaccgcaatacagccgaagggctgcacaccaccagcattgccgctgcatggatgaacatagtgtacggctttggcggccttcgcagtgacagtgcgcccagtggtgaaagcgaggggctcattctcaaccccagccttcctcggcaatggacagagtacgaattcagaattttctaccgcggcgcgcatatccgcgtcagggtttccgccggggaagtagcattgtccacagatgatctggtaagcgaagctatacctcttgtgatatacggcaagctctatcattttgattcaaacggcctgaggatacctttgtgtaccgcctga

SEQ ID NO: 25044 - protein, 537 aa, Unknown
  Obtained from environmental sample
  DOMAIN (473)...(527): Glycosyl hydrolase family 65, C-terminal domain
  misc_feature (1)..(537): Xaa is any amino acid
MIRSAENCSVFNDGGEGWIEKSIYNYAQKERNAVAGPVWEKGWAALSGGLPDFNQAAELQRKYWGSFWENADIRIEGDPLNQQGIRFCIFQLHQTYHGYDPSNNIGAKGLTGESYNGHTFWDTETYCLPFYIFSNPQAARNLLDYRYATLDAAKERAHALDCRGACYPIATLNGEEGCSLWQHASLQFQPSTGVAFGIAHYARVSGDREFLYDRGAEMLVEISRFLESRGSWNGTGFGFYAVMGPDEFHMMVNHNCYTNYMAKKTFEYTVEVLDEMEKHKPEKYLALCKKNGLSEAEWKNFACCADKMIILYDEKTKLFEQHEGYFSLPHIEISQIPVTDFPLYNNWSYDRIYRTDMIKQPDVLMFLFLHSREFSEEIKRVNYEFYEPRTSHESSLSPSIHSILASEIGKPADAFRFFAFATRMDLDNYNRNTAEGLHTTSIAAAWMNIVYGFGGLRSDSAPSGESEGLILNPSLPRQWTEYEFRIFYRGAHIRVRVSAGEVALSTDDLVSEAIPLVIYGKLYHFDSNGLRIPLCTA

SEQ ID NO: 25045 - DNA, 882 bp, Unknown
  Obtained from environmental sample
  misc_feature (1)..(882): n is a, c, g, or t
ttgtaccggagattttccatcctcaccgagggggcaatggaacttattctggaagctgcgcgtttttacctgtcatatctgtactactcgccggaacataaacgctatgaagctctggatgtcatcggccctgatgaataccatgagcgtgtacacaacaacgcctttacaaacaggatggtcttttctgtttttcagactgcctgtaattacatcgaaatattgcaaaaaaacaatcctgaatttattagcgatctgattaagcgtatcgatttcaatgacgatcagttgtttatggaaacggtaatacgtcaattctatcttcctaaaccggatgcgcggggcgtaatcgaacagtttgacggctatttccgcctggaagactgtactctggatgcagtcagatcgcggctgaaggatccaaaggaatactggggcggcggcgggggcgttgcgaccgcgacgcagattatcaaacaggccgacgttgtaacaatgctggcgctttttggcgatgattatccgaccgaggttaaaaaagccaatctggattactatgagccgaggacagaacatggctcaagtctttcttcctgtatgtacgccctgctttcctgcgataccggcaacagcgactgggcttatcccttctttatcaaaagtgccgagatcgatattaccggcaaatcaaaacattttgccggcctcgtttacattggtggcactcacccagcatcaaacggcggggcctggatgacggcaatactgggcttctgcggattttccgtagaaaacggcgccatacgaattattccccgtctgcctggacactgggaaaaagtttgtttttccgtgatacttcgcggtgtgaatacaggataa

SEQ ID NO: 25046 - protein, 293 aa, Unknown
  Obtained from environmental sample
  DOMAIN (1)...(268): Glycosyl hydrolase family 65 central catalytic domain
  misc_feature (1)..(293): Xaa is any amino acid
MYRRFSILTEGAMELILEAARFYLSYLYYSPEHKRYEALDVIGPDEYHERVHNNAFTNRMVFSVFQTACNYIEILQKNNPEFISDLIKRIDFNDDQLFMETVIRQFYLPKPDARGVIEQFDGYFRLEDCTLDAVRSRLKDPKEYWGGGGGVATATQIIKQADVVTMLALFGDDYPTEVKKANLDYYEPRTEHGSSLSSCMYALLSCDTGNSDWAYPFFIKSAEIDITGKSKHFAGLVYIGGTHPASNGGAWMTAILGFCGFSVENGAIRIIPRLPGHWEKVCFSVILRGVNTG

SEQ ID NO: 25047 - DNA, 921 bp, Unknown
  Obtained from environmental sample
  misc_feature (1)..(921): n is a, c, g, or t
ttggggaattttcgttttattcaggcagtactccctgcggacaatgttatggggctttcctgcgaaacgctggaaaaaaatattcctctggccgttttttccgtcctggttccggcttccggtatgtccgcgtcatcgcaaggaaaaattatcgaaggggaagacggggccttttccgtttatactatcgattcggacggaacaaaagcgattgaattttttgtttacggggctatttactccggtcttgatgtttccaggaataatcccatccaggcagctgaaacgcaggttaatgctgcgttgaaggaaggctgggacggtttgctgaagcggcataaagatcaatgggataaaatatggcacatcggggatgtggtaattgagggggacgagtatgcccagcgctgccttcgctacagcctttaccatctctggattatagctcccaggcattgcgggcaaattggcagagccctttcaataccggcgcgcgggctttccgggcagacttacaagggcgcgatcttttgggatacggaaatgtttatcgcgccctatttccttgctgtcaaaccggaactcgcggcccagttcatccgctaccggattcaaaccttgccgggggcaaaacgaaaagccgcagagtacggttaccggggggctttctttgcctgggaaagccaggaaaacggagacgacgcctgctctgatttcaacgttaccgatgtgttcaccggccgccccgtgaggacttacttccgcgacaaacaggttcacatcagcgccgacattgtgtactctgtacaaaaatatgtgattgtaccggagattttccatcctcaccgagggggcaatggaacttattctggaagctgcgcgtttttacctgtcatatctgtactactcgccggaacataa

SEQ ID NO: 25048 - protein, 306 aa, Unknown
  Obtained from environmental sample
  DOMAIN (139)...(306): Glycosyl hydrolase family 65 central catalytic domain
  misc_feature (1)..(306): Xaa is any amino acid
MGNFRFIQAVLPADNVMGLSCETLEKNIPLAVFSVLVPASGMSASSQGKIIEGEDGAFSVYTIDSDGTKAIEFFVYGAIYSGLDVSRNNPIQAAETQVNAALKEGWDGLLKRHKDQWDKIWHIGDVVIEGDEYAQRCLRYSLYHLWIIAPRHCGQIGRALSIPARGLSGQTYKGAIFWDTEMFIAPYFLAVKPELAAQFIRYRIQTLPGAKRKAAEYGYRGAFFAWESQENGDDACSDFNVTDVFTGRPVRTYFRDKQVHISADIVYSVQKYVIVPEIFHPHRGGNGTYSGSCAFLPVISVLLAGT

SEQ ID NO: 25049 - DNA, 864 bp, Unknown
  Obtained from environmental sample
  misc_feature (1)..(864): n is a, c, g, or t
ttgccaaacaaaccgaatattcatggtattgttacattctgctggcattggcgagctggcgcaaaaaatgaattttatacaaataaaaccgatttttttattccatggaaaaataggcagcttgataccgaaagcgataatttcacaacaataataaaagaccttgatagattggctttacgtttacagacactaaaagaaaaagatattccggtattatggagacctttgcatgaagcttccggcggatggttctggtggggagcaagcggaccaagaccatatatcgcattgtgggagtttatgtgggattatttaacttacgaaaaaggactagataaccttatttgggtttggaatggagatgatgaaaactggtttccggatccaaaaactgttgacataattggcagagatatttatgcgtcggattattcttcattaaaaactcaatttgagcggacaaaaaaaatgggtgataaagaatatattgtcgcccttaccgaaaatggaaaaatccccgatcctgatgaatgcattaaggacggtgctatgtgggcatggtttatgacatggaatgacggtctaaaaacaataggcgaatcgcataaagataatttttggacaggcgaatatcacaacacaaatactcacaaaaagaaagtatataaccatccttcggtaatcaccttggataagttgccgaaatttaacacttaccgcttggaaatataccgcaattttttaaatatttcccgtatgaacaaacgtcaatttttttcccgcttctttagcggcgttcaaaagaaaatctctgtccgtaggcggagcgttccaacggtaatctggatgataggctgttaa

SEQ ID NO: 25050 - protein, 287 aa, Unknown
  Obtained from environmental sample
  DOMAIN (1)...(233): Glycosyl hydrolase family 26
  misc_feature (1)..(287): Xaa is any amino acid
MPNKPNIHGIVTFCWHWRAGAKNEFYTNKTDFFIPWKNRQLDTESDNFTTIIKDLDRLALRLQTLKEKDIPVLWRPLHEASGGWFWWGASGPRPYIALWEFMWDYLTYEKGLDNLIWVWNGDDENWFPDPKTVDIIGRDIYASDYSSLKTQFERTKKMGDKEYIVALTENGKIPDPDECIKDGAMWAWFMTWNDGLKTIGESHKDNFWTGEYHNTNTHKKKVYNHPSVITLDKLPKFNTYRLEIYRNFLNISRMNKRQFFSRFFSGVQKKISVRRRSVPTVIWMIGC

SEQ ID NO: 25051 - DNA, 1125 bp, Unknown
  Obtained from environmental sample
  misc_feature (1)..(1125): n is a, c, g, or t
ttggacaaaaagccggcggacgctatcgggctgtcgggcccgttggtcaagtcaaccgtggcaatgaaggagtaccttgggcacatgcgcgagcggggccacaaagtgccggtgatactcggcggggccgcgctgacaaaggattacgtggaaaccgtctgccgcgaggagtaccagtgcgacgcagtctattacgcctcggacgcattcgacgggcttatgcacatggaaaaaatcatgtcaggcgcggcgcccaccacccacgaggttacggtagcccaaggctccggcaagcatgacgaccatgcaagcctcgattgcatcgagcttacgccgcagggccaatctggatgggtttcaagggggcacgccgcgcccacgccccctttttgggggaccaaggaaatcgccccgcccatagccgaagtgatggccctgatgagcgacgcatccgtgctgcaaaaccggtgggcgttcaagaggggggtgatgaccgacgagcaattcaaggccgtcataaacgaaaaagcggggccgctgctggagacgtggaagggccggctggtgtccgaaaagctggtctcgccaaaggctgcctatggctacttccgcgccggcgccgccagagactcgctgaaagtgtttgcccccgaccattctgggccactggccacgtttgactttccccgccaaccgtccggcaagcgccttgccgtcagcgacttttttagccctgcggacaacggcgcagacgtactggcgcttcaactggtgacactggggaatagcgtccccgccattcttgcagacctatacaaagagaacaggtacagcgattacttttacctgcacggccttgccgccgaagtgaccgagtgctgcgccaagtggctgcacagcagaatcaaggccgaattgaacatacaaggcggccagcggttcagcttcggctacccatcgtgcccggacttggcagggaatgggctgatactgaaactgttggacggcgcgaaactgggcgtgtccctgacggaaaccatgcagttagtcccagagttcacgacctgcgcccttgtggcctggcacccacaggcagcgcatttccaagtgaacagcgaacagtga

SEQ ID NO: 25052 - protein, 374 aa, Unknown
  Obtained from environmental sample
  DOMAIN (250)...(370): Vitamin B12 dependent methionine synthase, activation domain
  misc_feature (1)..(374): Xaa is any amino acid
MDKKPADAIGLSGPLVKSTVAMKEYLGHMRERGHKVPVILGGAALTKDYVETVCREEYQCDAVYYASDAFDGLMHMEKIMSGAAPTTHEVTVAQGSGKHDDHASLDCIELTPQGQSGWVSRGHAAPTPPFWGTKEIAPPIAEVMALMSDASVLQNRWAFKRGVMTDEQFKAVINEKAGPLLETWKGRLVSEKLVSPKAAYGYFRAGAARDSLKVFAPDHSGPLATFDFPRQPSGKRLAVSDFFSPADNGADVLALQLVTLGNSVPAILADLYKENRYSDYFYLHGLAAEVTECCAKWLHSRIKAELNIQGGQRFSFGYPSCPDLAGNGLILKLLDGAKLGVSLTETMQLVPEFTTCALVAWHPQAAHFQVNSEQ

SEQ ID NO: 25053 - DNA, 1482 bp, Unknown
  Obtained from environmental sample
  misc_feature (1)..(1482): n is a, c, g, or t
atgaaaacagtatgcggtatcgatctggggacacagagttgtaaagtcattatttacgatttcaaaaacaaaagcttaataacccaggcatcggcgcctgtcggcatgattgctgaaaacaacggtaccagggagcaaaaagccgaatggtacaatgacgccttaaaaaactgttttgataaaatagcctccgaaacaaaaaaaaccatcgcggccataggcgtttcaggccaccagcacagcctggtgccgcttgacgaaaaaggaaaaaccgtctacaacgtcaaactctggtgcgatacctccactacgcaggaatgtgaggaactgaccaaattggcgggcggcgagaaaaaacttatttccagggcgggactgcccatgcgccccggctacaccgctccaaaaatccagtggctgaagaaccacaaacccaaagcctttgcaaaaatacggcatattttattgccgcataattatataaactatcttctaaccggcgtttattgcgccgaatatggcgacgcttcgggcatggcgatttttgacgtgcgcaaacgaaaatgggccagggatatctgcaaattaatctcacctgaccttgaagcctggctgcccccgcttattgaggcggacgctattgcgggcagagtctcaaaagaggcggaaaaaatatacggaattccggaaggtacgctggtttcatcgggcggcggggacaatatgatgagcgcgattggaaccggcactgtgcgtgacggctttctttccatgagcctgggaacttccggcactctgtttggtttttcaaaaacgcccgtgattgacccgaccggaaatctcgccgccttctgttcgtcttcaggcggctggcttccgcttctctgtaccatgaactgcactgtagcaagcgaagaattccgcggtcttttgggactggacgttaaagcgtttgacgcggaagcagagaaagcgccgataggagcagacggaatagtgattctcccgttcttcaacggagagcgcactccgaacctgcccaacggaagagcgagcgttaacggcatcaccgctgctaacttcaaaaaagaaaaccttgcgcgcgcagcgcttgagtcggcaatcttcggaatgagaattggtcttgacggctttttggaacttggtttcaagccgaaagaaatacgcctgacaggaggaggagcaaaaagcccgctctggcagagtattgcagctaacgtcatgaacctgcccgtgcgcatccccgcaggctcggaagcggcggcaatgggaggagcgatacaagctctttggtgcttacagaaaagcgaaggaatgaaaactacaattgagaatctggctgacgaacacgtggcgttaggcgatacggtaaaacccgacaaaaagaatacgcagaaatacaatgaggcttactctgtatattcacggtatcttggggctttaagtcctatctataaataa

SEQ ID NO: 25054 - protein, 493 aa, Unknown
  Obtained from environmental sample
  DOMAIN (250)...(475): FGGY family of carbohydrate kinases, C-terminal domain
  misc_feature (1)..(493): Xaa is any amino acid
MKTVCGIDLGTQSCKVIIYDFKNKSLITQASAPVGMIAENNGTREQKAEWYNDALKNCFDKIASETKKTIAAIGVSGHQHSLVPLDEKGKTVYNVKLWCDTSTTQECEELTKLAGGEKKLISRAGLPMRPGYTAPKIQWLKNHKPKAFAKIRHILLPHNYINYLLTGVYCAEYGDASGMAIFDVRKRKWARDICKLISPDLEAWLPPLIEADAIAGRVSKEAEKIYGIPEGTLVSSGGGDNMMSAIGTGTVRDGFLSMSLGTSGTLFGFSKTPVIDPTGNLAAFCSSSGGWLPLLCTMNCTVASEEFRGLLGLDVKAFDAEAEKAPIGADGIVILPFFNGERTPNLPNGRASVNGITAANFKKENLARAALESAIFGMRIGLDGFLELGFKPKEIRLTGGGAKSPLWQSIAANVMNLPVRIPAGSEAAAMGGAIQALWCLQKSEGMKTTIENLADEHVALGDTVKPDKKNTQKYNEAYSVYSRYLGALSPIYK

SEQ ID NO: 25055 - DNA, 447 bp, Unknown
  Obtained from environmental sample
  misc_feature (1)..(447): n is a, c, g, or t
atggaaataaaagcaattttcccaaatgatgaattatggaataaaaccattaattatggaaaaaattgtagctggaaagcaggtcctatttttgcaaaacaaatggaacaaaataaatttaccgaatgggaaagagtttttgtggctgttgatgataataataatatagctggatattgtacttttgtaaaaagtgactgtattcctgatgttaaatacactccttacattagttgtatttttgtaggagaacaatatcgtggaaaaagattaagtgaaaaaatgatattgattgtaatagaatatgcaaaaaacaataaatttgatgaagtatatattgttagcaatcatgtaaatttatatgaaaaatatggatttataaaaattgatgaaaaaaaagattattggaataatgatgaaaaaatatataaacgaataataggataa

SEQ ID NO: 25056 - protein, 148 aa, Unknown
  Obtained from environmental sample
  DOMAIN (48)...(127): Acetyltransferase (GNAT) family
  misc_feature (1)..(148): Xaa is any amino acid
MEIKAIFPNDELWNKTINYGKNCSWKAGPIFAKQMEQNKFTEWERVFVAVDDNNNIAGYCTFVKSDCIPDVKYTPYISCIFVGEQYRGKRLSEKMILIVIEYAKNNKFDEVYIVSNHVNLYEKYGFIKIDEKKDYWNNDEKIYKRIIG

SEQ ID NO: 25057 - DNA, 513 bp, Unknown
  Obtained from environmental sample
  misc_feature (1)..(513): n is a, c, g, or t
atggaaattaatattcgtaaagccctactcgaagacgctaatatttttacagattgccatatttcatgctggcagtcagcatataaaaatattgtacctccaaaatacttagaaaatatgtctatagaaaaagaaaaattggaagagaaatataaaaactctttaacaaatccgggtgattttgcagtatattgtgctatgtatgctgaaaaaatgataggttttattatttataatatnagtcataatgaagataaatctagcataggtgaaatatgggcaatttatttaattgaagaattttgtggaaaaaattatgggaaaatattgttggattttgcaattaaagagttaaaacatatggagcaaaataaaatcattctttgggtatttgaagaaaatcatagagcaagacatttttatgaaaaaaataattttagttataatggaataaaaagagaggttgattggtatggtaagcctttagttgaattacaatatgtgcttaaataa

SEQ ID NO: 25058 - protein, 170 aa, Unknown
  Obtained from environmental sample
  DOMAIN (64)...(147): Acetyltransferase (GNAT) family
  misc_feature (1)..(170): Xaa is any amino acid
MEINIRKALLEDANIFTDCHISCWQSAYKNIVPPKYLENMSIEKEKLEEKYKNSLTNPGDFAVYCAMYAEKMIGFIIYNXSHNEDKSSIGEIWAIYLIEEFCGKNYGKILLDFAIKELKHMEQNKIILWVFEENHRARHFYEKNNFSYNGIKREVDWYGKPLVELQYVLK

SEQ ID NO: 25059 - DNA, 486 bp, Unknown
  Obtained from environmental sample
  misc_feature (1)..(486): n is a, c, g, or t
gtgtgcgctaggcgctggaacaccctttgtgccgttcttctccgccacatttttttgcgcccgaaaaaacgctacacgttttctcttatcgggcgcaaaaaaacgtcgtttaccgccggaacgttatgcgacagacggcgcggccaattaaacctgataaccgggcaaatgttcgcgatagatggatgcaaactgccgtcaaacgcgtcaaaagaatggtccgggacaataaaagagctgagaaagaaatgggacaaactgaaagaatatatagaaaggataataaagcagcaccgggaactggacaaagacgaaaaagcgaagaagatacaaaagccgtatgccaagacgatgggggaacccagggacagaagggaacggagcatagaaaggctggaaaaaactcgaaaaactgaacacattcctgaaaactgcggaaccgaggaagggagtgtcggcgggggaagtgcagtcaaatgtaactga

SEQ ID NO: 25060 - protein, 161 aa, Unknown
  Obtained from environmental sample
  misc_feature (1)..(161): Xaa is any amino acid
MCARRWNTLCAVLLRHIFLRPKKRYTFSLIGRKKTSFTAGTLCDRRRGQLNLITGQMFAIDGCKLPSNASKEWSGTIKELRKKWDKLKEYIERIIKQHRELDKDEKAKKIQKPYAKTMGEPRDRRERSIERLEKTRKTEHIPENCGTEEGSVGGGSAVKCN

SEQ ID NO: 25061 - DNA, 1227 bp, Unknown
  Obtained from environmental sample
  misc_feature (1)..(1227): n is a, c, g, or t
atgaaaaagacattcggcttgttaggcgaaaaacttggacacagcttctcaccattgatacacgggtatctcggtgaatatgattatttgttgtacgaggtatccgccggtgagcttgattcgttcatgactgacagacgctttggcgggattaacgtaaccatcccctacaaacaacaggtagtaccttactgcgttaccctttcccatgaggcccagactataggcagcgtgaacacgattataaaggatggtgacggggcgttgcacgggcacaacacggactaccatggttttaacgtgatgctggaacatggcggaatagatccgaaagggaaaaaagttttagtgttaggcgacggcggatctgcgaggactgtgaaggcggcgctggacggactgggcgcgcgggagattgtaacaatctcccgccggggaacggaccactacggcaacatcgagcgtcattatgacgcggatgtcatcgtcaataccacgcctgtcggcatgtatcctgaaaacggcagcagtccattgcgcctaaccggatttcggcaattaacaggcgtggctgatttgatctacaatcccacgcggaccaaacttctgcttgaagccgaggggcttggtattccccgtgtgaacggccttgcgatgcttgttgcccaggcggagaaggcaagccgattgtttttggacggatctgcaaggcccgagctggtgaataaaattcacgatttgattctcaaaagaacgcaaaacatagcccttatcggaatgcccggctgcggaaaaagcactattggcaggatactcgcccaaaaaatggggaggccctttgcggacattgacgtacagatcgagacagccgccggaaaaagaatcccgcaaatttttgccgatgacggagaagaaacattccgtcaacttgaaacgcgcgtactcgccgaagaagcaaaaaaaagcggcatggtactggcgacaggcggaggcgtagtgacgcggcctgaaaatctcgatctgctcaggcagaacagcttaattgtgtatttaaaacgcgatctaaccgaccttattacagacggccggccgctttcgcaaaatgtcgggattcaggcccttgccgaaaagcggctgcccttatacgaggcgtggagtgattgcgccgttcaggtaggagcaaaacctgaactaacggcggctttgatagaggaggctatacaatga

SEQ ID NO: 25062 - protein, 408 aa, Unknown
  Obtained from environmental sample
  DOMAIN (99)...(203): Shikimate / quinate 5-dehydrogenase
  misc_feature (1)..(408): Xaa is any amino acid
MKKTFGLLGEKLGHSFSPLIHGYLGEYDYLLYEVSAGELDSFMTDRRFGGINVTIPYKQQVVPYCVTLSHEAQTIGSVNTIIKDGDGALHGHNTDYHGFNVMLEHGGIDPKGKKVLVLGDGGSARTVKAALDGLGAREIVTISRRGTDHYGNIERHYDADVIVNTTPVGMYPENGSSPLRLTGFRQLTGVADLIYNPTRTKLLLEAEGLGIPRVNGLAMLVAQAEKASRLFLDGSARPELVNKIHDLILKRTQNIALIGMPGCGKSTIGRILAQKMGRPFADIDVQIETAAGKRIPQIFADDGEETFRQLETRVLAEEAKKSGMVLATGGGVVTRPENLDLLRQNSLIVYLKRDLTDLITDGRPLSQNVGIQALAEKRLPLYEAWSDCAVQVGAKPELTAALIEEAIQ

SEQ ID NO: 25063 - DNA, 1071 bp, Unknown
  Obtained from environmental sample
  misc_feature (1)..(1071): n is a, c, g, or t
ttgccactgatcagatcggccgagttcaaaaagagcatcgggcttccggcactggacgccacgcgggagagggaaaagttagccgacatcggcgaaaaggccggtgatgatatccgttctttcgcgtatattttatatacaacgctgtttgaaatcagccgcgcacaccaggtgaatatcataaacgccgagtccgatctcaataaaattatttcaggggctgtggaacacacggaaaaggtatttccgcagcacgcgcttgtagcctgtcagggcgtggaaggcgcgtattcgcagatcgcctgcgacaggctgtttgccgatcccaatattttgtatttcaccggctttgacggtgtgttttcggcaatccgcgacggcctctgccaatacgggatattgcccctggaaaacagcacggccggttcagtcaacatggtatacgaccttatgatgaagtacagtttcaaaatagcgcggagcgtacggcttaaaatcgatcacaacctgctggcaaaggcgggcgttaaaaaagaaaacatccgcgaaattttctcgcatgagcaggcgattcaacagtgcgcggggtacctgaaggggcttggcaagaacgtaaaagtcaccaccgtcaccaataccgccgaagccgcgaaaatggtcgcggaatccgaccgaaacgacgtcgcggctcttgcctcccattcgtgctgcgatttatacgctctgaaatgcctggaaagctcggtgcaggacaggggcaataattatacgcgcttcatctgtatctccaaaaacctcgaaatatatccgggcgccgaccgtaccagtattatgctgaccacatcgcacaagcccggttcgctttacaaggtgcttggcctgatatatgcccttggcgtgaacgtcgtaaagctggaaagccgcccgatccccgaccgcgattttgagttcatgttttatttcgatcttgaaacatcggtatattcaaaaaaattcagccagcttatgtgcgagctggaaaatttatgcgaggaatttcattacctcggcagttataccgaaatcgtttaa

SEQ ID NO: 25064 - protein, 356 aa, Unknown
  Obtained from environmental sample
  DOMAIN (88)...(267): Prephenate dehydratase
  misc_feature (1)..(356): Xaa is any amino acid
MPLIRSAEFKKSIGLPALDATREREKLADIGEKAGDDIRSFAYILYTTLFEISRAHQVNIINAESDLNKIISGAVEHTEKVFPQHALVACQGVEGAYSQIACDRLFADPNILYFTGFDGVFSAIRDGLCQYGILPLENSTAGSVNMVYDLMMKYSFKIARSVRLKIDHNLLAKAGVKKENIREIFSHEQAIQQCAGYLKGLGKNVKVTTVTNTAEAAKMVAESDRNDVAALASHSCCDLYALKCLESSVQDRGNNYTRFICISKNLEIYPGADRTSIMLTTSHKPGSLYKVLGLIYALGVNVVKLESRPIPDRDFEFMFYFDLETSVYSKKFSQLMCELENLCEEFHYLGSYTEIV

SEQ ID NO: 25065 - DNA, 867 bp, Unknown
  Obtained from environmental sample
  misc_feature (1)..(867): n is a, c, g, or t
ttgatcggcgaggccctgaattgtagcatagagcggcagttatgcggcaatcttggggatgttaataatttggcggatattttgccaaaagataagcttaatatcttgtatatagtcgctcgtccctacggtgaaagagatgtgggttttcaaacgctgataaggccgcttgttgatttcgcttacgccgagggagaaagctggccggttcatatagatttactgcgcccgccgacgcttgaccggctgagggaggttctcgatgagaagcgtaatttctatcatattgtgcatttcgacgggcacggcgagtataatgcgcaggacagtatgaatgtcatgggcggtcggctcttaagaacggccgggactttagtattcgaaaacgacaataatgagaatgagggggaattggtatcggcggaaatgctggggcagctgttacgtgaacataatatccccgttatggtgttgaacgcctgccggtcggccatgcttaataagctggcggagactccgtttgcttcagtggcggctagtctattgaaagccggaattcacagcgtcatagcgatgagttacatcatgtgggtaaatggagcaaaagaattcgtccccgctttttatcggcaattgttcaaaggtggcggcattgccgaagccgtgcggttggggcgtctgcagatgtaccgtaatcacgtgcgtgacagttcctgtgggaaagtggatttttatgactggattgtgcccgtgctgtaccaccaatcttcttctatagaaactatactgccccgtttgacgcccacccatgaaaaaaaagcgagtaagctgccggaagaaatgttgaacatagcgactatggcataa

SEQ ID NO: 25066 - protein, 288 aa, Unknown
  Obtained from environmental sample
  misc_feature (1)..(288): Xaa is any amino acid
MIGEALNCSIERQLCGNLGDVNNLADILPKDKLNILYIVARPYGERDVGFQTLIRPLVDFAYAEGESWPVHIDLLRPPTLDRLREVLDEKRNFYHIVHFDGHGEYNAQDSMNVMGGRLLRTAGTLVFENDNNENEGELVSAEMLGQLLREHNIPVMVLNACRSAMLNKLAETPFASVAASLLKAGIHSVIAMSYIMWVNGAKEFVPAFYRQLFKGGGIAEAVRLGRLQMYRNHVRDSSCGKVDFYDWIVPVLYHQSSSIETILPRLTPTHEKKASKLPEEMLNIATMA

SEQ ID NO: 25067 - DNA, 726 bp, Unknown
  Obtained from environmental sample
  misc_feature (1)..(726): n is a, c, g, or t
gtggaatttatgggcagatttgcagatacatatattaggaaagaacttcaagaacagcgggctgtgttctcactgtttggagcaaatttctaccgggctttgagttttgcgtgggaacttgatatgcgggatgatgtgttggctctgattcaggcgctggctctttatgcgtacaatgtaaggaattttgtcgaagcggagaggttgtacaaggaattagctgaaacggctcagaattataatatcattgaatatgaagccaatgcttaccatcaactgggagtgattgagacgaaacggtggaatttaactgccgctgagggctggtacaagcagtcactggtaataaagcagaaactgggtgacgaacatggcatggccattacttaccatcaactggggatggttgcagaagaacgaaatgatttagatgccgccgaggattggtacaagcagtcactggtaattgaacaaaaactgggtgacgagcaaggcattgccagtactaaccatcaactggggatggttgcagaagaacgaaatgatttagatgccgctgaggattggtacaagcagtcactggtaattgaacaaaaactgggtgacgagcaaggcattgccattacttaccatcaactggggatggttgcagaaaaacgaaatgatttagatgtcgccgaggattggtacaagcagtcgctggtaattgaacaaaaacntgggtga

SEQ ID NO: 25068 - protein, 241 aa, Unknown
  Obtained from environmental sample
  misc_feature (1)..(241): Xaa is any amino acid
MEFMGRFADTYIRKELQEQRAVFSLFGANFYRALSFAWELDMRDDVLALIQALALYAYNVRNFVEAERLYKELAETAQNYNIIEYEANAYHQLGVIETKRWNLTAAEGWYKQSLVIKQKLGDEHGMAITYHQLGMVAEERNDLDAAEDWYKQSLVIEQKLGDEQGIASTNHQLGMVAEERNDLDAAEDWYKQSLVIEQKLGDEQGIAITYHQLGMVAEKRNDLDVAEDWYKQSLVIEQKXG

SEQ ID NO: 25069 - DNA, 552 bp, Unknown
  Obtained from environmental sample
  misc_feature (1)..(552): n is a, c, g, or t
gtggcacctgcttcgcgcagtggcgcccgggcagggcaactagtaacttcaattgcagtacgagaattgtcagcagaattttatgagtggctttcaaatgaagaaattgctgctcgagacgcagcaattaatcgtatagcggatttccgggcgcgaatggtagcaatatcgcgcttgcatggaaatggtagattaccggctgaaattttatgtccgataccattttcgccgcgcttcaccatgcggtgcgatgttattccatcattagttgatttgaataccgctttccgggcacatttcggtcgagatttagtagtgcgatctggatatcgtggcaatcctggcacttctaatcacggttgggggctggcagtcgattttggtgggcagatgacgcaatttggaacttctgaattcaattggatgaacgcaaatgcgcggcaattcggttggggacatgctttttgggcagtgcctggcggaataaatccgcagccttggcactgggaggccatggatcaaattcgcgaaatgacgggcgtctggcgttaa

SEQ ID NO: 25070 - protein, 183 aa, Unknown
  Obtained from environmental sample
  DOMAIN (78)...(174): D-alanyl-D-alanine carboxypeptidase
  misc_feature (1)..(183): Xaa is any amino acid
MAPASRSGARAGQLVTSIAVRELSAEFYEWLSNEEIAARDAAINRIADFRARMVAISRLHGNGRLPAEILCPIPFSPRFTMRCDVIPSLVDLNTAFRAHFGRDLVVRSGYRGNPGTSNHGWGLAVDFGGQMTQFGTSEFNWMNANARQFGWGHAFWAVPGGINPQPWHWEAMDQIREMTGVWR

SEQ ID NO: 25071 - DNA, 522 bp, Unknown
  Obtained from environmental sample
  misc_feature (1)..(522): n is a, c, g, or t
atgaagtcgtatcttttgccggaagcggaacttgaccgtttccttatgaaattacttatagtttatcctcagcctgtagaagaacttgagatagtaaaaaacagttcaccgttatctgcaaattcagcaagcaggacaaagccgctttcgcctgttctttccggcgaagcgctcgcgcttttgcgtaacaccgcggatacaattcatattgatgaggaaataattaaatatattgtgtcggttgtaaccgctacaagacctgtttccgcaggacagccgtcggaaggcgtgtatcgttatatttcattcggcgcttctccgcgcgcgtcaattgcgctatacagatgcagccggatctttgctatgtttcacgggaggacatttgtcagtcccgaagatgttaaagaagcggcgcttccggttctgcggcacaggattgtactttcttacgaagcggaagcggaaggcatggatgcggacgctgttattgcaagaatattaaaccacattcctgtcccgtaa

SEQ ID NO: 25072 - protein, 173 aa, Unknown
  Obtained from environmental sample
  misc_feature (1)..(173): Xaa is any amino acid
MKSYLLPEAELDRFLMKLLIVYPQPVEELEIVKNSSPLSANSASRTKPLSPVLSGEALALLRNTADTIHIDEEIIKYIVSVVTATRPVSAGQPSEGVYRYISFGASPRASIALYRCSRIFAMFHGRTFVSPEDVKEAALPVLRHRIVLSYEAEAEGMDADAVIARILNHIPVP

SEQ ID NO: 25073 - DNA, 909 bp, Unknown
  Obtained from environmental sample
  misc_feature (1)..(909): n is a, c, g, or t
atggaaacaagcgaacttttacgcagtattaccgcgcttcctattatttcgcatggacttgcggaagaaatgctatccggaaatttcaggtcgatttttaaaggacagggaatggaatttgacgaagcgcgtcactacgaaccaggagatgatatccggtcaattgactggaatgtcagcgcgcgttttggttcgccgtttgtaaaaatgtacagggaagaacgtgagctgacaattttgattttattggacgtttcgccgtccatgcacaggggatacattgcccgccaaagattaagcccgtacgagcaggctcttatttccgcggcgttaatttctttttccgcagaacatacagatcagcaggcgggagcttttttctttgacaaagatattgaaagagtttttcctccgcacaaaggccgcaggcatataatggctcttgtaatggctgcgcttcagtatcaaaataaagtttcacaccgcagggacaattacggaagcaatatttcgtcagcattaaaaggagcgcaaaggtttttaaaaaagcgctctcttgtagttttaatttcagatttttacagcgttaactgggaacatgaattaacaaacctttgccgtaaacatgactgtattgcgcttagaatctgcgatccgcctgatcttccgtatcccgggttgatttcgctggaagaccctgaaacaggcgtaagaatcgaagcgccggcaggtttggaatcttttatggaaaactggactcaatggcaaaatgaacgttcggcaagctgggaagcccaatgccggcgcagcggcgcggtgtttctggagttgccgaccactgcggacgcgccttctgtattgttaaaattttttggcagccgaagccgtcagtacaagtcccggaaataa

SEQ ID NO: 25074 - protein, 302 aa, Unknown
  Obtained from environmental sample
  misc_feature (1)..(302): Xaa is any amino acid
METSELLRSITALPIISHGLAEEMLSGNFRSIFKGQGMEFDEARHYEPGDDIRSIDWNVSARFGSPFVKMYREERELTILILLDVSPSMHRGYIARQRLSPYEQALISAALISFSAEHTDQQAGAFFFDKDIERVFPPHKGRRHIMALVMAALQYQNKVSHRRDNYGSNISSALKGAQRFLKKRSLVVLISDFYSVNWEHELTNLCRKHDCIALRICDPPDLPYPGLISLEDPETGVRIEAPAGLESFMENWTQWQNERSASWEAQCRRSGAVFLELPTTADAPSVLLKFFGSRSRQYKSRK

SEQ ID NO: 25075 - DNA, 528 bp, Unknown
  Obtained from environmental sample
  misc_feature (1)..(528): n is a, c, g, or t
gtgagggagatccgcggggtcagccgtaggaaacagctgaagggcctggttattgccgcaggactcggggccatcgcctataccctctgccgcgcgtccggcgtttcaggctgcgtcggcgaatccggcgtctgctgcgccatggcgtcaggcgcaattacatggatggcgggcggtgccggacaggatgtccagaacgcggcgtccatggccttacaggccaatatcggcatcccctgcgatcccatccccggagggctggaattcccctgccttacccgtacagtccgcgctgcaattaccgctcccctctacgctgacatggccctcgcaggcattaacccgctgataccgtatcatgaaatgctcgcccttattgaacgaaccagaaccctctaccccgatgttatcaacggcccggattgcggcgttaattgcaccgccaccgccgaacactgtcagcgcttcctgtccgacgaagtgatggaaggcaagttaaaatgggacgcaaataaggcacagccatag

SEQ ID NO: 25076 - protein, 175 aa, Unknown
  Obtained from environmental sample
  SIGNAL (1)...(26)
  DOMAIN (2)...(131): Serine dehydratase alpha chain
  misc_feature (1)..(175): Xaa is any amino acid
MREIRGVSRRKQLKGLVIAAGLGAIAYTLCRASGVSGCVGESGVCCAMASGAITWMAGGAGQDVQNAASMALQANIGIPCDPIPGGLEFPCLTRTVRAAITAPLYADMALAGINPLIPYHEMLALIERTRTLYPDVINGPDCGVNCTATAEHCQRFLSDEVMEGKLKWDANKAQP

SEQ ID NO: 25077 - DNA, 753 bp, Unknown
  Obtained from environmental sample
  misc_feature (1)..(753): n is a, c, g, or t
atgatggtacagcttgaaaatatcactaagagtttcggcggcaatcatgtgatcaggggcgtaggccttacagtggaacagggggagattctttcgcttataggcccgagcggggcaggcaagacaacgctgctgcgcacaatcaactggctggaaaagcccgatacgggaagcgtcacggttgacggggtaagggtggaagccggttccgcaagccatgatgacattcaccggctccgatccaaatcgtcaatggtgtttcaacactacaatttattcaggaataaaacggccctgcaaaatgttacggaaagccttttgacagtaaaaaaaattcccaaagccgaagccgaacaacgggggcttgaactactccgttccgtaggaatgggaaacaaggcgggcgaatatccttcaaggctttccgggggacagcagcagcgggtcggcatagcccgcgccctggcggtggatccccatgtgatgctttttgacgagcctaccagtgcccttgatcccgaatgggtatcggaagtgctggatgtaataaagcgtattgtcatgcagggaatgacaatgatcctggtttcccacgaaatgcgctttgtcagggaaatcgcaagcagggttatacttatggacgggggatgcattgtcgaagacggagagccgaatcaaattttcaaccaccctcgcgaagaaagaacaaagcaatttttgcagaaaaatagggattatcaagttatcatataa

SEQ ID NO: 25078 - protein, 250 aa, Unknown
  Obtained from environmental sample
  DOMAIN (28)...(216): ABC transporter
  misc_feature (1)..(250): Xaa is any amino acid
MMVQLENITKSFGGNHVIRGVGLTVEQGEILSLIGPSGAGKTTLLRTINWLEKPDTGSVTVDGVRVEAGSASHDDIHRLRSKSSMVFQHYNLFRNKTALQNVTESLLTVKKIPKAEAEQRGLELLRSVGMGNKAGEYPSRLSGGQQQRVGIARALAVDPHVMLFDEPTSALDPEWVSEVLDVIKRIVMQGMTMILVSHEMRFVREIASRVILMDGGCIVEDGEPNQIFNHPREERTKQFLQKNRDYQVII

SEQ ID NO: 25079 - DNA, 387 bp, Unknown
  Obtained from environmental sample
  misc_feature (1)..(387): n is a, c, g, or t
atgcatcccccgtccataagtataaccctgcttgcgatttccctgacaaagcgcatttcgtgggaaaccaggatcattgtcattccctgcatgacaatacgctttattacatccagcacttccgatacccattcgggatcaagggcactggtaggctcgtcaaaaagcatcacatggggatccaccgccagggcgcgggctatgccgacccgctgctgctgtcccccggaaagccttgaaggatattcgcccgccttgtttcccattcctacggaacggagtagttcaagcccccgttgttcggcttcggctttgggaattttttttactgtcaaaaggctttccgtaacattttgcagggccgttttattcctgaataaattgtag

SEQ ID NO: 25080 - protein, 128 aa, Unknown
  Obtained from environmental sample
  DOMAIN (52)...(90): Protein of unknown function (DUF1602)
  misc_feature (1)..(128): Xaa is any amino acid
MHPPSISITLLAISLTKRISWETRIIVIPCMTIRFITSSTSDTHSGSRALVGSSKSITWGSTARARAMPTRCCCPPESLEGYSPALFPIPTERSSSSPRCSASALGIFFTVKRLSVTFCRAVLFLNKL

SEQ ID NO: 25081 - DNA, 366 bp, Unknown
  Obtained from environmental sample
  misc_feature (1)..(366): n is a, c, g, or t
atgaaactaaaacttatttatccaaaatggaataaacttcccggacagactacttttaatctgcccccccacgggcctgtggtatttgccgcttccctgcctgattatgttgacgtaaattttaccgatgaaaatgttcagacccttgactttaatgaagactgcgaccttgtggcaatttccatgatgctaagtacgcaggtaaagcggggctgggctatcgctgatgaataccgcanacgcggcaagcaggtcatctttggcggcatttccactatgctgcacgccgaggaaaccatgcagcacgcagactcggtgtttcttggcgaggccgaaacccgcatggaacaggttattgccgactga

SEQ ID NO: 25082 - protein, 121 aa, Unknown
  Obtained from environmental sample
  misc_feature (1)..(121): Xaa is any amino acid
MKLKLIYPKWNKLPGQTTFNLPPHGPVVFAASLPDYVDVNFTDENVQTLDFNEDCDLVAISMMLSTQVKRGWAIADEYRXRGKQVIFGGISTMLHAEETMQHADSVFLGEAETRMEQVIAD

SEQ ID NO: 25083 - DNA, 372 bp, Unknown
  Obtained from environmental sample
  misc_feature (1)..(372): n is a, c, g, or t
gtgcagattgctgtatcttcgtggacagccgaagccctgaaaaacacgatgcccatgagcgtattctcccgttctaccgaatgtcataaccaggacaaggtaagcatggggactatagccgcccgcgactgtgtgcgtatcaacaaactgacttctcaggtaactgccgccctgctgttagccgcttttcaggctatcgatctgcggctgaaaaaaggcgaacttaaattaagcgacctaggggagacggaaaaaacatacaacgaaattgccgccttttttaaaccgcttgaagacgaccgtccgctggaaaacgatctgcgcaagaccttaaaattaatagaggagcggcatttcagcctacgcccatga

SEQ ID NO: 25084 - protein, 123 aa, Unknown
  Obtained from environmental sample
  misc_feature (1)..(123): Xaa is any amino acid
MQIAVSSWTAEALKNTMPMSVFSRSTECHNQDKVSMGTIAARDCVRINKLTSQVTAALLLAAFQAIDLRLKKGELKLSDLGETEKTYNEIAAFFKPLEDDRPLENDLRKTLKLIEERHFSLRP

SEQ ID NO: 25085 - DNA, 828 bp, Unknown
  Obtained from environmental sample
  misc_feature (1)..(828): n is a, c, g, or t
ttgatgttacggattgtccgcttgcttaaattgatagccgttggaacgtcaagcaagtcggaacgcatgagcacgatgtcagcggattccatcgccacgtccgtcccgcttcctatggcgattccgatgtccgcctgggccagcgccggagcgtcgtttatgccgtctcccaccattgcgactttgcggccttcttgctggattttcttaacttcggcggatttgtcttgcggcagaacttccgcaagcacgcggtcaattcctacctgtcttgcgatggcgtttgcggtttttttattgtccccggtgatcatggcgacttcaattcccatcttgtggagccgctctatcgcctctttgctggaaggtttcagcacgtccgccaccgccacaattcccacggccttgccgttcagcgcgacatacatcggcgttttcccttcgcttgcaagccgatctggcgctgcctcaagttcagtaagggaaatgccccgctcgtccatgagttttctgttccctacaagtatggagatttccccactccacgttccaaattcccttattttagcctcaatgccccggcccggaatggctttgaaatccgttacaggcggcaggtcaagatcgcgtttttccgcttcgcgcacaatcgcggatgcaaggggatgctcggaattcctttcggcggcggcaaccagttggataaaaaggtcggtgttcttgcccttttcactgttccccagtccccactccccactccacacaacattcgtaacttcgggcttgccgacggtaatcgttccggttttgtcaaacacaatcgtttga

SEQ ID NO: 25086 - protein, 275 aa, Unknown
  Obtained from environmental sample
  misc_feature (1)..(275): Xaa is any amino acid
MMLRIVRLLKLIAVGTSSKSERMSTMSADSIATSVPLPMAIPMSAWASAGASFMPSPTIATLRPSCWIFLTSADLSCGRTSASTRSIPTCLAMAFAVFLLSPVIMATSIPILWSRSIASLLEGFSTSATATIPTALPFSATYIGVFPSLASRSGAASSSVREMPRSSMSFLFPTSMEISPLHVPNSLILASMPRPGMALKSVTGGRSRSRFSASRTIADARGCSEFLSAAATSWIKRSVFLPFSLFPSPHSPLHTTFVTSGLPTVIVPVLSNTIV

SEQ ID NO: 25087 - DNA, 693 bp, Unknown
  Obtained from environmental sample
  misc_feature (1)..(693): n is a, c, g, or t
atgcgaccgaaggtccccgccatcacgccccggcaggaaccgagggtgctggattggctgctggacgccgcccgccggatcgggagtcccctgtcgcaggcggaagaactttgcgccatcccccgtggttggcaactcggcttgcgggggaaacatcaatttaccaacgccgccttggccctggcggcctggacggaactggcgcgccgccatgcctggccgatgcgcgaggacttggcgcgcgaagcgctggaaaagacctttatcgccgggaggttgcaaaggattccggcaagccgcgccctgccggatcttttgctggacggggcgcacaacgcgcatgccttcgcggctctgcgcgaggcgttgcgggagatggacatacggccccgcgccgttattttttcctgtctggcggacaaggatctggaaaagatcgcccccttggcgctcgacctggccgggggcgcgcccctgcttattccgcccctttccgtggggaaacgcgccctcccgcccgagcggacagccgccgccttcggcggcgcggcatgtgtcatgcctggtcttgaggccgccctgcgcgttgccggacagggggatacttcgccgcaatcgccggtcctcgtgtgcggctccttgtatttattggcggatttttttacgctgcacccggaatacctgctgcattaa

SEQ ID NO: 25088 - protein, 230 aa, Unknown
  Obtained from environmental sample
  misc_feature (1)..(230): Xaa is any amino acid
MRPKVPAITPRQEPRVLDWLLDAARRIGSPLSQAEELCAIPRGWQLGLRGKHQFTNAALALAAWTELARRHAWPMREDLAREALEKTFIAGRLQRIPASRALPDLLLDGAHNAHAFAALREALREMDIRPRAVIFSCLADKDLEKIAPLALDLAGGAPLLIPPLSVGKRALPPERTAAAFGGAACVMPGLEAALRVAGQGDTSPQSPVLVCGSLYLLADFFTLHPEYLLH

SEQ ID NO: 25089 - DNA, 948 bp, Unknown
  Obtained from environmental sample
  misc_feature (1)..(948): n is a, c, g, or t
ttgtggaaacagatanatgacattcttgctgaatatattgaggaatctcgcgaacacctcagtcatgtagagcaaatttttgttgagatacagaaaacaggacaagtctcaccagggtctataaacgacctattccgcgcaatccacaccataaagggttccgcaggttttttgggcttaacaggtatagggactttaacccacaccatggaaagccttttagattctttgcgcgaaaacagattgtcaatgacagagcaaattacagaagctctcatagaaggcacggatatattaaatgatatgttcgatgatgttgacaatagcaatagcaaagataccagcgcattgatagcacaattgaaaaatttaaatagcggtgctcctgcacctgcggctcccaagcctgcggcagcagctccggcaccagctccggctgcggcaccagcagccgctccagaagaaaaacgttctgttgcagatgtgctcaatcaattccccgaacttgctcagtatgtaactccagagcaacaggcagaggcagctaaggcggctcctgcggcagcagctccagcacctgcggctccaccacctccacctccagcacctgcaccagaagcaaaaaaagaagaaccgaaaaaagatgctggcgcaccatcttccgagggcagcaaacacgaagaattcttgcgcataagggtggacattctagaccgccttatgatgcttgccggagaacttgttcttgttcgcaaccaacagcttatgcacttggatcaagcagatgctacactacgtagcattacccaaagccttgattctgttacaactgaactccaagaaactataatgcgtactcgaatgcagcccataggtaccgtgttctctcgcttctccagagtggtgcgtgaactatcgcgcaaattgagcaaaaacatagaattgtaa

SEQ ID NO: 25090 - protein, 315 aa, Unknown
  Obtained from environmental sample
  DOMAIN (227)...(286): Signal transducing histidine kinase, homodimeric domain
  misc_feature (1)..(315): Xaa is any amino acid
MWKQIXDILAEYIEESREHLSHVEQIFVEIQKTGQVSPGSINDLFRAIHTIKGSAGFLGLTGIGTLTHTMESLLDSLRENRLSMTEQITEALIEGTDILNDMFDDVDNSNSKDTSALIAQLKNLNSGAPAPAAPKPAAAAPAPAPAAAPAAAPEEKRSVADVLNQFPELAQYVTPEQQAEAAKAAPAAAAPAPAAPPPPPPAPAPEAKKEEPKKDAGAPSSEGSKHEEFLRIRVDILDRLMMLAGELVLVRNQQLMHLDQADATLRSITQSLDSVTTELQETIMRTRMQPIGTVFSRFSRVVRELSRKLSKNIEL

SEQ ID NO: 25091 - DNA, 411 bp, Unknown
  Obtained from environmental sample
  misc_feature (1)..(411): n is a, c, g, or t
atgaaagatacgaaaacaggttataaggcaataagtaaatacctaatcggttctccgtttaaaatcaggccgattgccgatttaatacgccgccgtccgtatcctgaggctgtttcaattctggaaaacatgcctcataaaggagcgcggttaatccgcaagacggtaaagtcagccgcttcaagcgctctttcagataataaaaaacttgacgaagatatgctttatgtaagcgatatttttattgatgaaggtccccgtcttaaaagaatttggtttcgcggcagggggcgtgctgatatgcagcagaaaaggttatgtcacataactgtagtagtagatgagaccgtaaaacatgataacgctaagcatggaaatgctaattcatcctccaaaaaggcggcgaaataa

SEQ ID NO: 25092 - protein, 136 aa, Unknown
  Obtained from environmental sample
  DOMAIN (10)...(115): Ribosomal protein L22p/L17e
  misc_feature (1)..(136): Xaa is any amino acid
MKDTKTGYKAISKYLIGSPFKIRPIADLIRRRPYPEAVSILENMPHKGARLIRKTVKSAASSALSDNKKLDEDMLYVSDIFIDEGPRLKRIWFRGRGRADMQQKRLCHITVVVDETVKHDNAKHGNANSSSKKAAK

SEQ ID NO: 25093 - DNA, 309 bp, Unknown
  Obtained from environmental sample
  misc_feature (1)..(309): n is a, c, g, or t
atgggacaaaaagtaaaccctacagggcttaggattgggattaataaaacttggaattcgcgctggtatgttgatccgaaggaatatgttgaagcactgcatgaagatttgaaattgcgcaagctcattatggatatgccggagacaaagggagctgatattgcggaactggaaattattcgtcatccgcagcggataactattacaattcatacagcccgtcccggtgtaatcatcggcgtaaagggcgcgaatatcgaaaaaaatcggcatgatctgcagaagaaagtaagcaaaaagtacagataa

SEQ ID NO: 25094 - protein, 102 aa, Unknown
  Obtained from environmental sample
  DOMAIN (65)...(101): KH domain
  misc_feature (1)..(102): Xaa is any amino acid
MGQKVNPTGLRIGINKTWNSRWYVDPKEYVEALHEDLKLRKLIMDMPETKGADIAELEIIRHPQRITITIHTARPGVIIGVKGANIEKNRHDLQKKVSKKYR

SEQ ID NO: 25095 - DNA, 330 bp, Unknown
  Obtained from environmental sample
  misc_feature (1)..(330): n is a, c, g, or t
atgaagcaggctattaccaatgcaattaaaaaaggcaatgcccagggagtaaaaattcgcctttccggccggctgggcggcgccgaaatgtcacgcacggaagaagccaaagagggacgcataccactgcataccctccgtgcggatatagactttgggtttgccgaagcccacacaacctttggttccataggggtaaaggtctgggtatacaacggcatgaaatacgggaaggaacaaaaggaagacgcgggcgcattgctccgcaaacggcgggaacggcttcctggtcatagaaatgagaaccatagaaccgaaggccggttttaa

SEQ ID NO: 25096 - protein, 109 aa, Unknown
  Obtained from environmental sample
  DOMAIN (1)...(70): Ribosomal protein S3, C-terminal domain
  misc_feature (1)..(109): Xaa is any amino acid
MKQAITNAIKKGNAQGVKIRLSGRLGGAEMSRTEEAKEGRIPLHTLRADIDFGFAEAHTTFGSIGVKVWVYNGMKYGKEQKEDAGALLRKRRERLPGHRNENHRTEGRF

SEQ ID NO: 25097 - DNA, 426 bp, Unknown
  Obtained from environmental sample
  misc_feature (1)..(426): n is a, c, g, or t
atgttaagtccgaagcgagttaggcatcgtaaagtacaacgcgggaatatgcccggaaacgcgaccaggggtaattcggttgctttcggtgattatggccttgttgccatggacagaatgtggattaccaaccggcagatagaagccgcccgtattgccatgaaccgtcatatcaagcgcggtggcaagctctggattcggatttttccggataagccgtattccaagaaacccgctgaaactcgcatgggaaagggaaagggagcgccggaatattgggtagcggtggtgaagccggggacggttatgtttgagctgggcggcatagaaaaaaacctggctgaggaagcaatgaagctggcgggagcaaagctccccatcaagtccaggtttgttgcccgtgcggatatggaattgggtggatag

SEQ ID NO: 25098 - protein, 141 aa, Unknown
  Obtained from environmental sample
  DOMAIN (1)...(132): Ribosomal protein L16
  misc_feature (1)..(141): Xaa is any amino acid
MLSPKRVRHRKVQRGNMPGNATRGNSVAFGDYGLVAMDRMWITNRQIEAARIAMNRHIKRGGKLWIRIFPDKPYSKKPAETRMGKGKGAPEYWVAVVKPGTVMFELGGIEKNLAEEAMKLAGAKLPIKSRFVARADMELGG

SEQ ID NO: 25099 - DNA, 477 bp, Unknown
  Obtained from environmental sample
  misc_feature (1)..(477): n is a, c, g, or t
atgtggggaggtattataatggaaaaaaattacgttccccgtcttaaaaagatttacaaggagcaaattgctcccgaattgtttaaagaatttaattacagctccaatatgcagatacccaagctggaaaaaattgtagtaagcatgggcgtcggcgaagctctgcagaataaaaaattgttagatgccgctgtcgatacattgactcaaattacaggacagaaagcggtaaagacaaaagcgaagaaaagtatcgctaactttaaaatcagagaagggcaggaaataggcgcgaaagtaactcttcgcggaactatgatgtatgaattttttgacagacttgtcaatgtctctcttccccgcgttaaggactttcatggaataagtcagaacgcgtttgacggacacggaaattattcgctcggaattcaagagcagattttttccctagatcgacttgacaagatgaaaaaatag

SEQ ID NO: 25100 - protein, 158 aa, Unknown
  Obtained from environmental sample
  DOMAIN (95)...(156): ribosomal L5P family C-terminus
  misc_feature (1)..(158): Xaa is any amino acid
MWGGIIMEKNYVPRLKKIYKEQIAPELFKEFNYSSNMQIPKLEKIVVSMGVGEALQNKKLLDAAVDTLTQITGQKAVKTKAKKSIANFKIREGQEIGAKVTLRGTMMYEFFDRLVNVSLPRVKDFHGISQNAFDGHGNYSLGIQEQIFSLDRLDKMKK

SEQ ID NO: 25101 - DNA, 324 bp, Unknown
  Obtained from environmental sample
  misc_feature (1)..(324): n is a, c, g, or t
atggctcaagtattgcataaatttaagataaaaaaagaagatactgtccaggtgattgccggaaaggacaagggaaaacgcggcagaatcttaaaaataaatcgcgacacagacagagttgttgttgaaggcataaacatagtcaagaaagcgatgaagaaaagaaaacaacaagacccgggcggaatagcngaaatngaagngnngattnctccctcttcaaagatcattgtttgcaagaaatgcggacctacccgcatcggttacaaacttgacggcgataaaaaggtcagattctgcaagaaatgtggggaggtattataa

SEQ ID NO: 25102 - protein, 107 aa, Unknown
  Obtained from environmental sample
  DOMAIN (10)...(43): KOW motif
  misc_feature (1)..(107): Xaa is any amino acid
MAQVLHKFKIKKEDTVQVIAGKDKGKRGRILKINRDTDRVVVEGINIVKKAMKKRKQQDPGGIAEXEXXIXPSSKIIVCKKCGPTRIGYKLDGDKKVRFCKKCGEVL

SEQ ID NO: 25103 - DNA, 372 bp, Unknown
  Obtained from environmental sample
  misc_feature (1)..(372): n is a, c, g, or t
atgattcaagttgaaaccttcctgaatgtggcggataattcaggtgccaagaaggtacagtgcatcaaggttttgggcggtacccacaggagatatgccgggattggggatatcgttgtagtagcggtgaaagaagccctgcccacatcaactgttaaaaagggaactgtggaaaaagctgtggtagtgcgtacacataaggagtttcgccgcccggatgggacatatatcaggtttgatgataacgcgtgtgttcttattgacgctgcgttaaatccaaaggggaaacgtatcttcggtcctgtcgcaagagaattgagggaaagaagcgaatttatgaaaatcgtatccctggcgccggaagtgttgtag

SEQ ID NO: 25104 - protein, 123 aa, Unknown
  Obtained from environmental sample
  DOMAIN (1)...(123): Ribosomal protein L14p/L23e
  misc_feature (1)..(123): Xaa is any amino acid
MIQVETFLNVADNSGAKKVQCIKVLGGTHRRYAGIGDIVVVAVKEALPTSTVKKGTVEKAVVVRTHKEFRRPDGTYIRFDDNACVLIDAALNPKGKRIFGPVARELRERSEFMKIVSLAPEVL

SEQ ID NO: 25105 - DNA, 549 bp, Unknown
  Obtained from environmental sample
  misc_feature (1)..(549): n is a, c, g, or t
ttgaatctcgaattattggaaaatatgataaaaaatatcatgtttgatagttattttaatgaagcaacttttcaatttaagttactcctaaaaatagcaaaaaattatgatgaatcaaaaatattccccgaaagaaatattaaaaaatatgatgcttctggaaaatatgtaaaaaaagtaatagacattgtattggaaaaagaaaatgctcaaccatatgtggctattgaacttaaaatgcccatgaatggacaacatcctgaacaaatgtataaaatggtcgaagacataaaatttcttgaacaaataaagaataattgtaactttgtcaaatgttactcaataactataacaaatgatagatgcttttgggatggtaaagagaataatggaatctattcattttttagaaataatgtagttttagaaggaaagataaataaaccgactggggataaattaaatagtttttttattttggatggtaaatatgaaattaaatggaaaaatataaacaacagttttaagtatttcattgtagaggtttaa

SEQ ID NO: 25106 - protein, 182 aa, Unknown
  Obtained from environmental sample
  misc_feature (1)..(182): Xaa is any amino acid
MNLELLENMIKNIMFDSYFNEATFQFKLLLKIAKNYDESKIFPERNIKKYDASGKYVKKVIDIVLEKENAQPYVAIELKMPMNGQHPEQMYKMVEDIKFLEQIKNNCNFVKCYSITITNDRCFWDGKENNGIYSFFRNNVVLEGKINKPTGDKLNSFFILDGKYEIKWKNINNSFKYFIVEV

SEQ ID NO: 25107 - DNA, 831 bp, Unknown
  Obtained from environmental sample
  misc_feature (1)..(831): n is a, c, g, or t
atgatgtccgtttttgaggacatgcccgactttgtacgaatgtttaccgtctggaagccggacgccattgacggaatggacgccgaaaatataggcagaatgggctcaaccgaaacaggacagttcgcatatgccctggcaagggacaccggggagataaagcctttaaccgctgtggttgttaatgaagtaatggctcaaattaccggacccaacgccaggttagtcgagatgagcgatcccgccccgtttaagaatatgggaaaggatacttatgcggtcaggattgcagtccccattctaaacaagcgcctcaatgaagtagtcggagccgtagggtgtcagttggatattagcatgatacaacccagggtggagcagactatcaaagatttcgaagaagtcacctcaatggttgtttactccgacaacgggtttgttttgggaaattacctgccggaatttataggaaagcagattgacacggaaacgcaatacggcccttacctaaaagaagtcaaagacgtaattaaaaacgcgcaggaatgggaaggtacggcttacgaccccgagctgaaaacaaatatggtaatggcggtagccaacattcccataggggtttctcctacaacatggtcggtaatggtcggttcaaccgaagcttacatcctgagagatgtcaacgcaatgagaacctttgtcattgttttggcgtctatagcccttgcggcggcggtggcgcttatataccttgctctcaatagtactaccaagcaatcgtcaatgtttcggagactcttaaggatatttccgaaggcgaaggcgatttaa

SEQ ID NO: 25108 - protein, 276 aa, Unknown
  Obtained from environmental sample
  misc_feature (1)..(276): Xaa is any amino acid
MMSVFEDMPDFVRMFTVWKPDAIDGMDAENIGRMGSTETGQFAYALARDTGEIKPLTAVVVNEVMAQITGPNARLVEMSDPAPFKNMGKDTYAVRIAVPILNKRLNEVVGAVGCQLDISMIQPRVEQTIKDFEEVTSMVVYSDNGFVLGNYLPEFIGKQIDTETQYGPYLKEVKDVIKNAQEWEGTAYDPELKTNMVMAVANIPIGVSPTTWSVMVGSTEAYILRDVNAMRTFVIVLASIALAAAVALIYLALNSTTKQSSMFRRLLRIFPKAKAI

SEQ ID NO: 25109 - DNA, 789 bp, Unknown
  Obtained from environmental sample
  misc_feature (1)..(789): n is a, c, g, or t
atgtacttcaataaaacattggaaaaaattaaaaacatgatcattaatatcaaagacgaggcaaccggtttgtcgcagataggcaatgatcttgccagcaatatgaacgagaccgccgcggctattaatcaaattaacgccaatattcaaagcatcaaaggacgcgttattaaccagagcaccagcgtttctcagactaatgctaccatggaacaagttatcaccaatatcaacaaacttaaccatcatgtagaaaatcagagcagtaatatgtccaaagcctcgtccgccattgagcagatggtagccaatatcggttctgtaactcaaacgttgattaagaacgctgataatgtaaactcgttgaaagaagcctcggaagtgggacgcgagggattgcaggaagtagcgaaggatatcaaagagatcgcccttgaatccgaaggtttaatgaaaatcaacgcggtaatgaaaaacatagccagccagaccaatctgctttcaatgaacgcggcgatagaagcggctcacgccggagacgccggtaaaggctttgcggttgtcgccgacgaaatacgcaaactggctgaagactccagcgcacagtccaagacgatcggttctgtacttaaaaagataaaggaagctatcgacaagataaccgactccacaacaaacgtgcttaacaagtttgaggcgattgattcaaacgtncatacggtagcggaacaagaagtaatatcccgcacgcaatggaagaacaaggcgagggaagcaacagatacttga

SEQ ID NO: 25110 - protein, 262 aa, Unknown
  Obtained from environmental sample
  DOMAIN (92)...(255): Methyl-accepting chemotaxis protein (MCP) signaling domain
  misc_feature (1)..(262): Xaa is any amino acid
MYFNKTLEKIKNMIINIKDEATGLSQIGNDLASNMNETAAAINQINANIQSIKGRVINQSTSVSQTNATMEQVITNINKLNHHVENQSSNMSKASSAIEQMVANIGSVTQTLIKNADNVNSLKEASEVGREGLQEVAKDIKEIALESEGLMKINAVMKNIASQTNLLSMNAAIEAAHAGDAGKGFAVVADEIRKLAEDSSAQSKTIGSVLKKIKEAIDKITDSTTNVLNKFEAIDSNVHTVAEQEVISRTQWKNKAREATDT

SEQ ID NO: 25111 - DNA, 558 bp, Unknown
  Obtained from environmental sample
  misc_feature (1)..(558): n is a, c, g, or t
ttgcggagggcgattctgccttttagttttgaaccctgccctattcccggcctctttgaaatacagccaaaggtattttccgacagccggggctatttttttgaagcctggtcgcggcgtgattttgaggccgccggcattactgcgccttttgtgcaggacaatcagtcccggtctgtcagaggtgtgctgcggggcctgcattttcagaaaactcacgcgcagggcaaactggttcgcgccattgaaggcgaaatttttgatgtcgcggtggacttgcggaccggttcccccacccggggcaaatggcacgccgttgctttaagcggcgaaaagcagaaccagttttacattcccgccgggtttgcccacggttttctggtgttaagcgacacggcggtttttgcgtacaaatgcacggatttttattatcccgaagacgagggcggtattatctggaatgatcccgcgattggcataaaatggccggacttggggatgggttatctgctttccgaaaaagataaaagattgcctggttatgataatagcttatag

SEQ ID NO: 25112 - protein, 185 aa, Unknown
  Obtained from environmental sample
  DOMAIN (10)...(184): dTDP-4-dehydrorhamnose 3,5-epimerase
  misc_feature (1)..(185): Xaa is any amino acid
MRRAILPFSFEPCPIPGLFEIQPKVFSDSRGYFFEAWSRRDFEAAGITAPFVQDNQSRSVRGVLRGLHFQKTHAQGKLVRAIEGEIFDVAVDLRTGSPTRGKWHAVALSGEKQNQFYIPAGFAHGFLVLSDTAVFAYKCTDFYYPEDEGGIIWNDPAIGIKWPDLGMGYLLSEKDKRLPGYDNSL

SEQ ID NO: 25113 - DNA, 885 bp, Unknown
  Obtained from environmental sample
  misc_feature (1)..(885): n is a, c, g, or t
atgaaaggtatcattctcgcaggcggatcaggtaccaggctctacccgattacaagagctgtctcaaaacagattcttccaatctacgacaaaccgatgatctattatcctttgtcggtgctgatgctggctaagatccgcgaagtgctgatcatttcaacaccccgcgatctgcctatattcagggaattatttggcgacggcgtctggcttggtatgcgctttgagtacaaggttcaggaaagcccgcgcggtctggccgacgcatttattcttggggctgattttatcaacggcgattctgcggcgctggtgcttggcgacaatattttttacggcaggggctttagccagaccctgcgaaacgccgctacgcaggtaactgaacatggcggcggggcgattttcggctactatgtgaaggatcccacggcttacggcgtggtggagtttgacgcccagggcaaggcgctttccattgaggaaaaacccgcaaagccaaagtctcattacgcggttccggggctgtatttttacgataacgaagtagttgagattgccagaaatatcaaaccctccgcacggggcgaaattgaaattaccgcagtgaacaacgcctatctggataatggccgcctctccgtggaagtgctgggccggggcatggcatggctggatacaggcacctacgatgggcttttggaggcttcaaattttattgaaactattcagaaacggcagggcgtatacgtttcctgtattgaggagattgcgtataacaacggctggttatccaaagacgggcttttaaaacttgcggtaacttataaaaccggatacggcgaatacctgaaatacattgcggagggcgattctgccttttag

SEQ ID NO: 25114 - protein, 294 aa, Unknown
  Obtained from environmental sample
  DOMAIN (2)...(243): Nucleotidyl transferase
  misc_feature (1)..(294): Xaa is any amino acid
MKGIILAGGSGTRLYPITRAVSKQILPIYDKPMIYYPLSVLMLAKIREVLIISTPRDLPIFRELFGDGVWLGMRFEYKVQESPRGLADAFILGADFINGDSAALVLGDNIFYGRGFSQTLRNAATQVTEHGGGAIFGYYVKDPTAYGVVEFDAQGKALSIEEKPAKPKSHYAVPGLYFYDNEVVEIARNIKPSARGEIEITAVNNAYLDNGRLSVEVLGRGMAWLDTGTYDGLLEASNFIETIQKRQGVYVSCIEEIAYNNGWLSKDGLLKLAVTYKTGYGEYLKYIAEGDSAF

SEQ ID NO: 25115 - DNA, 1224 bp, Unknown
  Obtained from environmental sample
  misc_feature (1)..(1224): n is a, c, g, or t
ttgcggacgacggccatagccaaaccgaggagcgccgcaccaggctggacaggacgctggacgccctggccggcaaatacggacgcggcgccgtggcgcgcggccggctgtaccgcggcaaggcggagaacaggaacgggcatgaacgcgattgaaccgggacactgggccgttgtccgcttgagcgcgctgggggacacgatcctgaccaccggcgtgctgcgctattggcatgagacgcgcggcctgacattcaccgtggtcacgcgcgcggcttttgccccggtgtttgccgggcatccggctgtgcgcgaagttgtgtctctggcggacgcggatctgcgcggccgtcccctgcgcgcccgctggcgcgaactggcgtccgcctatgccggctgcggtctgatcgacttgcacggcacggggcgcacgcggctgctcggcctgtactggacggggccggtgcggcgctatgccaaattggccttggagcgccgcctgtttctggcttcgggcgggcggctgtgcgcggccgcgctgcgcgcggccaatgtcagccagcgctatgccctggccttggagccgcgcggggcgctccctccgcctgttgcggcggtgctgccgcacatgcgcctgagcggagaagaactggccgatggcgcggccctggccgcccatgtatgcgcgggccaagcatgctcagaaggaagacaaagcggccttgcccgtcttgtcgccctgcatccctttgccgctcatgcgggcaaggtctggccggcggcgcgttggctggaactcatgcggctcctggacgaacagggcgcgccctggtgcgtgatcggccaaggcgccggtttggaaggcgtaccggccggccgcgatctgcgcaatcgctgttccatccgccagagcgcggccctgctcgcggcctgcgcggctctggtaaccggcgattccggccccatgcacctggcttcggctgtgggtacgccggtggtggcgctgttcggctccaccacgcgggagtgggggttttatccggccgggccgggcgcggcggttctggagcgggacatgccgtgccgtccctgcgatctgcacggggcgcggcgttgcgatcagggctacgcctgtctggacgggatcagcgcggcggaagcgctgcgggcgctggagagcgtcaggaataaggacttatccataaataggtggagcgcgcggtga

SEQ ID NO: 25116 - protein, 407 aa, Unknown
  Obtained from environmental sample
  DOMAIN (123)...(377): Glycosyltransferase family 9 (heptosyltransferase)
  misc_feature (1)..(407): Xaa is any amino acid
MRTTAIAKPRSAAPGWTGRWTPWPANTDAAPWRAAGCTAARRRTGTGMNAIEPGHWAVVRLSALGDTILTTGVLRYWHETRGLTFTVVTRAAFAPVFAGHPAVREVVSLADADLRGRPLRARWRELASAYAGCGLIDLHGTGRTRLLGLYWTGPVRRYAKLALERRLFLASGGRLCAAALRAANVSQRYALALEPRGALPPPVAAVLPHMRLSGEELADGAALAAHVCAGQACSEGRQSGLARLVALHPFAAHAGKVWPAARWLELMRLLDEQGAPWCVIGQGAGLEGVPAGRDLRNRCSIRQSAALLAACAALVTGDSGPMHLASAVGTPVVALFGSTTREWGFYPAGPGAAVLERDMPCRPCDLHGARRCDQGYACLDGISAAEALRALESVRNKDLSINRWSAR

SEQ ID NO: 25117 - DNA, 666 bp, Unknown
  Obtained from environmental sample
  misc_feature (1)..(666): n is a, c, g, or t
gtgcgcggccgcgctgcgcgcggccaatgtcagccagcgctatgccctggccttggagccgcgcggggcgctccctccgcctgttgcggcggtgctgccgcacatgcgcctgagcggagaagaactggccgatggcgcggccctggccgcccatgtatgcgcgggccaagcatgctcagaaggaagacaaagcggccttgcccgtcttgtcgccctgcatccctttgccgctcatgcgggcaaggtctggccggcggcgcgttggctggaactcatgcggctcctggacgaacagggcgcgccctggtgcgtgatcggccaaggcgccggtttggaaggcgtaccggccggccgcgatctgcgcaatcgctgttccatccgccagagcgcggccctgctcgcggcctgcgcggctctggtaaccggcgattccggccccatgcacctggcttcggctgtgggtacgccggtggtggcgctgttcggctccaccacgcgggagtgggggttttatccggccgggccgggcgcggcggttctggagcgggacatgccgtgccgtccctgcgatctgcacggggcgcggcgttgcgatcagggctacgcctgtctggacgggatcagcgcggcggaagcgctgcgggcgctggagagcgtcaggaataa

SEQ ID NO: 25118 - protein, 221 aa, Unknown
  Obtained from environmental sample
  misc_feature (1)..(221): Xaa is any amino acid
MRGRAARGQCQPALCPGLGAARGAPSACCGGAAAHAPERRRTGRWRGPGRPCMRGPSMLRRKTKRPCPSCRPASLCRSCGQGLAGGALAGTHAAPGRTGRALVRDRPRRRFGRRTGRPRSAQSLFHPPERGPARGLRGSGNRRFRPHAPGFGCGYAGGGAVRLHHAGVGVLSGRAGRGGSGAGHAVPSLRSARGAALRSGLRLSGRDQRGGSAAGAGERQE

SEQ ID NO: 25119 - DNA, 1026 bp, Unknown
  Obtained from environmental sample
  misc_feature (1)..(1026): n is a, c, g, or t
ttggcgggcggacaggctattgataaaacgggagagccgcttccaaaggaaacgcttgaaaaggcgaaacagtgcgacgcgctcctgttgggcgcggtcggcggccccaagtgggatacgcttccgggacatctgcgcccggaaagggcgctgttgggccttcgcgccgggcttgatgtcttcgcaaaccttcggcccgccgctctgcttccccagttaaaatcagcctgccctgttaaagacgaagtgttaatcgcgagcaacagcgaaagaaaagccgcgttcgatttattgattgtacgggaattaacaggcgggctttattttcgcaaagcgcgggagggattgacgaaccttcaaacggggcacagtccgggcgcggcttttgatacagagacatattcatggatggaaattgaaagggtgctgcgcgccggctatgaggcggcgggcgttaggcgcaaaaaactctgcgtagtggacaaggccaacgtgctggaatcgtcccgtttttggcgcgaagtcgccgctgtggtttcaaaagactaccccaacatagaaacaagctacctctacgttgacaacgcggccatgcagctgatcagggctccgggacaattcgacgttatagttacgtctaaccttttcggggacatactctccgacgaggcgtccgtgcttacaggttcaatcggaatgttggcgtcggcgagtcttggcgctgttgtgaacggtaaaacaagacccggaatgtacgagcctattcacggatccgcgcccgacatcgccggaaaggacatcgcaaatccgctcgcaacaatactttcggcggcgatgatgctccgttattcattcaatcttgagaaggaagccctgtccattgaaaacgctgtcaacaatgtgctggatcaggggttaaggacaggggacatagcgagcagaagctccgccggcagcggcagcgagaaaattgtgggtacaaaggcaatgggcgaagccgtgcttaaagccctggaaaaattatga

SEQ ID NO: 25120 - protein, 341 aa, Unknown
  Obtained from environmental sample
  DOMAIN (1)...(334): Isocitrate/isopropylmalate dehydrogenase
  misc_feature (1)..(341): Xaa is any amino acid
MAGGQAIDKTGEPLPKETLEKAKQCDALLLGAVGGPKWDTLPGHLRPERALLGLRAGLDVFANLRPAALLPQLKSACPVKDEVLIASNSERKAAFDLLIVRELTGGLYFRKAREGLTNLQTGHSPGAAFDTETYSWMEIERVLRAGYEAAGVRRKKLCVVDKANVLESSRFWREVAAVVSKDYPNIETSYLYVDNAAMQLIRAPGQFDVIVTSNLFGDILSDEASVLTGSIGMLASASLGAVVNGKTRPGMYEPIHGSAPDIAGKDIANPLATILSAAMMLRYSFNLEKEALSIENAVNNVLDQGLRTGDIASRSSAGSGSEKIVGTKAMGEAVLKALEKL

SEQ ID NO: 25121 - DNA, 756 bp, Unknown
  Obtained from environmental sample
  misc_feature (1)..(756): n is a, c, g, or t
atggtaccctgggaaggcgcgtctggaaccttgttttcctgcgacgcctttggttcttacggcgctatgggggacagggtctttgacgatcagtttaacgaaaaagagcacgctctttttgaagaggaatctttaaggtattacgccaatattgtttcatctttctcggttttcgtggaacgggcgattcaaaaattggtaagccttgaaattaaatgcgtggcccccagccacggccttgtatggcggaaagacccaaaaaagatcattgcccgatattcaaagtacgcgtcctgggccaaagggccggcggaaaaggagatcgccattatttggggctccatgtacggcaacaccagggccgcattggacgctgtaatatggggaatcgaaaaggaaggcgtgccctttatcctccatcgcgttccggacgagaatgtctcttatattcttgccaccgcttacaaaagctccggccttgttatcgccatgcctacctacgaatacgccgtctttcccccaatggcctatgtgctggacattttccggcgcaagcatatcttcggcaagaaggccctccgcatcggctcctggggctgggttgggggagcgaaaaaagaatacgacgctgcccttgaaagccttaaatgggacagtatcgaatcttttgaatgggcaggttatccatctgagacggatttcgcgattctggaagcaaaaggcaaggagctggccagagcggtgaaagcgggttaa

SEQ ID NO: 25122 - protein, 251 aa, Unknown
  Obtained from environmental sample
  misc_feature (1)..(251): Xaa is any amino acid
MVPWEGASGTLFSCDAFGSYGAMGDRVFDDQFNEKEHALFEEESLRYYANIVSSFSVFVERAIQKLVSLEIKCVAPSHGLVWRKDPKKIIARYSKYASWAKGPAEKEIAIIWGSMYGNTRAALDAVIWGIEKEGVPFILHRVPDENVSYILATAYKSSGLVIAMPTYEYAVFPPMAYVLDIFRRKHIFGKKALRIGSWGWVGGAKKEYDAALESLKWDSIESFEWAGYPSETDFAILEAKGKELARAVKAG

SEQ ID NO: 25123 - DNA, 675 bp, Unknown
  Obtained from environmental sample
  misc_feature (1)..(675): n is a, c, g, or t
atgaaaaaaatcatctctttttgctcaatgacagtaattgttttgtgtcttaccggatgcgtttcggaaagccacagaagcgcagacgttcatcaaacccgctcttcattaagaccctacaacggccagcgtgcacccatagcagtcggcagctttgacaaccgttccggctttcagcagggaatcttttcggacggagttgacaggcttgggggccaggctaaaaccgttcttataaaccacttgcagcaaataaaccgctttactgtacttgaccgcgacaacatggaaggggccaggcgggaagccgcaattagcggggaaacccaggaactgatgggcgcggcctacctcgtctccggggacgtcacggaattcggacgcagggaagttagcgactaccaggctttcggcatattgggacgcggtaaaagccagattgcttactccaaggtaagcctaaacatcgtggacatccgtaccggcgttgtcgtttattcggtgcagggcgctggcgaatacgagctttccgaaagggaagtcctggggtttggctcttcatcttcctacgattctaccctgaacggcaaagtgcttgatttggcaattgccgaagccgttgacaaactggctgaaggaatcgacaaaggcgcatggttaccttcaggcaagtaa

SEQ ID NO: 25124 - protein, 224 aa, Unknown
  Obtained from environmental sample
  SIGNAL (1)...(26)
  DOMAIN (7)...(223): Curli production assembly/transport component CsgG
  misc_feature (1)..(224): Xaa is any amino acid
MKKIISFCSMTVIVLCLTGCVSESHRSADVHQTRSSLRPYNGQRAPIAVGSFDNRSGFQQGIFSDGVDRLGGQAKTVLINHLQQINRFTVLDRDNMEGARREAAISGETQELMGAAYLVSGDVTEFGRREVSDYQAFGILGRGKSQIAYSKVSLNIVDIRTGVVVYSVQGAGEYELSEREVLGFGSSSSYDSTLNGKVLDLAIAEAVDKLAEGIDKGAWLPSGK

SEQ ID NO: 25125 - DNA, 654 bp, Unknown
  Obtained from environmental sample
  misc_feature (1)..(654): n is a, c, g, or t
ttgatatggacgggtactgctgcaagccttcgcagaggtgataatgtccacgcaaatcagattctccgtgagttattagatgcccaatacaaagaaatgaacgaaaatttcaagattttccgtctaaaagcgctggaatggacagtattattatcaagatcgacaataaattccaaaaatataaatgatgatactttactggaaacaaataattattacctgaaaagaatagaagaaagtacaaactttcaggaaatcaaggatatcctgctttgctttacagaccagatggcaggaaaaattttttcctttcacggagtacgtcatttttcggctatcagaaaagccgaacgttatatctggaaaaattatacaaagaagatcgggctgcaggaaatagccgatgcagcaggcctttcagcgtcgtactttagtacaatttttaaagaggaaatgggagaaaatctttccaattaccttaaccgtctacgggttgaaaaagcggctgccatgctgacctcaactaatatatctataagcatgattgcaacggcctgtggttttgaggaccaaagctggttttcaaaaatattcaagaataataccggttttactcccggtaaatatcgagaacaggggaacattttgggttag

SEQ ID NO: 25126 - protein, 217 aa, Unknown
  Obtained from environmental sample
  DOMAIN (115)...(161): Bacterial regulatory helix-turn-helix proteins, AraC family
  misc_feature (1)..(217): Xaa is any amino acid
MIWTGTAASLRRGDNVHANQILRELLDAQYKEMNENFKIFRLKALEWTVLLSRSTINSKNINDDTLLETNNYYLKRIEESTNFQEIKDILLCFTDQMAGKIFSFHGVRHFSAIRKAERYIWKNYTKKIGLQEIADAAGLSASYFSTIFKEEMGENLSNYLNRLRVEKAAAMLTSTNISISMIATACGFEDQSWFSKIFKNNTGFTPGKYREQGNILG

SEQ ID NO: 25127 - DNA, 900 bp, Unknown
  Obtained from environmental sample
  misc_feature (1)..(900): n is a, c, g, or t
gtgnccgatgccgctgttaataaagccgttgatgccaaagtcaatacggaagttaaagcggatgtcgatacggcaaatgcaaatattaaaacggatgtcaataccgttgcagatacggcggttaataaaaccgttgatactaatgtcaacatagaaaccaagccagatgtaaatacggctaatgtcaaggccgatgttaataccaacgcgcgtgtccatactagcgcgggcgcggaagcaaaggctgatgtcggcgccgctaatcctaatacggttgtgaatgctaacgcgaacgccggtacggaagtcaataatacggaggcaaaagcggacgtaaataccgcaagcgccaaggctgatgttaatgtaagcgttaataacgaaacgaataccgaggtcaacgcgggcgagaaggtttcaaagcgcgttgtcgacacggatcttccgataagcgcccacgagtccgccggccgtaggaggcgttcgagcgtggagtcggcgaaccgtttggcgtcgaagagcgcggagcgcgatatgggggcgaggccctcgtcttccggcgacagcgtcgagttgccgctgagcgtgatggcgttggcgcgcggcaagaaggcggcaaagggtgcggatggcgaggccggtaaatccgtcgccgagccgcggccgcaggcgaagagcgtccttgccgacggggagacgaccgagcttccggtgagcgttatggagtcgtctgagaagaagcacgtgtctaagaaaactcacgccggtcatgccggcggcgcgaagtccgcggcgaaggctgccggcgcgtcggtcgagtctgccgccgataagagtgaaaccgtcgccgcgaataagtccgccgacgaggccttgcggcgaagctcaaggaggcggtga

SEQ ID NO: 25128 - protein, 299 aa, Unknown
  Obtained from environmental sample
  misc_feature (1)..(299): Xaa is any amino acid
MXDAAVNKAVDAKVNTEVKADVDTANANIKTDVNTVADTAVNKTVDTNVNIETKPDVNTANVKADVNTNARVHTSAGAEAKADVGAANPNTVVNANANAGTEVNNTEAKADVNTASAKADVNVSVNNETNTEVNAGEKVSKRVVDTDLPISAHESAGRRRRSSVESANRLASKSAERDMGARPSSSGDSVELPLSVMALARGKKAAKGADGEAGKSVAEPRPQAKSVLADGETTELPVSVMESSEKKHVSKKTHAGHAGGAKSAAKAAGASVESAADKSETVAANKSADEALRRSSRRR

SEQ ID NO: 25129 - DNA, 804 bp, Unknown
  Obtained from environmental sample
  misc_feature (1)..(804): n is a, c, g, or t
atgaaagaagacggcacggtaaacagagccgtcctccccgcaatttttaaccccgacgatttgaatgccctcgaaatggctttggaagcaaagtctaaaatagcaggcgcgacattaagcattatcaccatgggacctccccgtgcggcttccgttatccgcgaaagcatctaccgcggtgcagacaacggctatctgctcaccgatgcccagtttgcaggctcggacacactggcaacttcctacgctttatacaaggctatcgaaaaatgcaagcccgaccttattttctgcggggtgcaggctatcgacggcgatacggctcaggttggaccgcaagtggctgaaaaaatgaatatcccgcaaatcacctacgcggaggaattgattgatattgatgcaaaaaaagtaaaaatcaaaaggcgtctggaacgcggtgtggaaacggttgaggggaattttcctctgcttgttaccgtacacagttcggctgcgccctgccgtttccgtaacgcaaaacgattgatgaaatacaaacacgcccgcacggcttccgaaatgcaggaggcggacagcaatcaggcagaactggttaaaaaccgtgattatctgaaaattgaagagtggaacgccgaaaccgtacaggcaaacggcgattttctgggactgtcaggttcgcccaccaaagtaaagaaaatcgacagcgtggtgctgacgcanaaagactccaaagttttttcaaattcggataccgaagtggaacaattggtgttggaactgcttgacagcagagtaataggataa

SEQ ID NO: 25130 - protein, 267 aa, Unknown
  Obtained from environmental sample
  DOMAIN (4)...(197): Electron transfer flavoprotein domain
  misc_feature (1)..(267): Xaa is any amino acid
MKEDGTVNRAVLPAIFNPDDLNALEMALEAKSKIAGATLSIITMGPPRAASVIRESIYRGADNGYLLTDAQFAGSDTLATSYALYKAIEKCKPDLIFCGVQAIDGDTAQVGPQVAEKMNIPQITYAEELIDIDAKKVKIKRRLERGVETVEGNFPLLVTVHSSAAPCRFRNAKRLMKYKHARTASEMQEADSNQAELVKNRDYLKIEEWNAETVQANGDFLGLSGSPTKVKKIDSVVLTXKDSKVFSNSDTEVEQLVLELLDSRVIG

SEQ ID NO: 25131 - DNA, 888 bp, Unknown
  Obtained from environmental sample
  misc_feature (1)..(888): n is a, c, g, or t
gtgttgcgtttaggggcgaaattgttcgcccgttttttgattttggggttatcaatggcaaaaatcctgaaaaaggaacagttgtccgacgccgtctggcgattccgcctccacgctccgcgtattgccggaaagcggagggcggggcagttcatcattttgcgtccgcgtgaagactccgagcgcatcccgctcacaatcgccaacgccgatgcgggcgagggatggatcgacatcatctttcaggcggtgggcaaaacgacgatgcagttacgcgaccttgccgagggcgagtcggtaagcgaccttgccggtccgctgggcaagcccacgcacatagagaaattcggcagggcgctttgcatcggcggtggggtaggcgccgccccgctgtacccgatagtatcagcgctgttcgcggcgggaaacgacgtgacgacgataatcggggcgcgtaccaaagaacttgtcatcctcgaagacgacataaaggcgtccagcaatcgcctcatgattgccacggacgacggtacctacggtacaagaggtttcgtctccgacgtttttaagggattgatgagcgccggtgaaaagttcgacgtagcctttgtcattggaccggtgattatgatgaaggtcacgaccgcgctgactgtcgcggtgggtatcaagacctacgcgtcgctgaacccgataatgattgacggaacgggaatgtgcggcggctgccgtgtaacgataggcggtcaaacgaaattcgcctgcgtagacggcccggagtttgacgcgtctcanatagcttgggatgaaatgattacgcggttaaacgcctataaatcgtttgaagcgcggacaagggaaaattaccacgcgtgtaagatagcataa

SEQ ID NO: 25132 - protein, 295 aa, Unknown
  Obtained from environmental sample
  SIGNAL (1)...(20)
  DOMAIN (19)...(113): Oxidoreductase FAD-binding domain
  misc_feature (1)..(295): Xaa is any amino acid
MLRLGAKLFARFLILGLSMAKILKKEQLSDAVWRFRLHAPRIAGKRRAGQFIILRPREDSERIPLTIANADAGEGWIDIIFQAVGKTTMQLRDLAEGESVSDLAGPLGKPTHIEKFGRALCIGGGVGAAPLYPIVSALFAAGNDVTTIIGARTKELVILEDDIKASSNRLMIATDDGTYGTRGFVSDVFKGLMSAGEKFDVAFVIGPVIMMKVTTALTVAVGIKTYASLNPIMIDGTGMCGGCRVTIGGQTKFACVDGPEFDASXIAWDEMITRLNAYKSFEARTRENYHACKIA

SEQ ID NO: 25133 - DNA, 855 bp, Unknown
  Obtained from environmental sample
  misc_feature (1)..(855): n is a, c, g, or t
gtggcgccggacgatctctacggcggcacctaccgcctcttcgcgcatatttctcagaagaacggcattaacttctcatatgtcagcacgttagagggtatagaaaagtcaatccgccccgagactaaagccgttttcatagagacgccgaccaaccccatgatgcaggtgatagacatagccgcggcggcgcggatagcgcatgaccgcaagttgattctcgtggttgacaatacgtttctaacgccgtactttcagcgccctatgaagctgggcgcggacatcgtcctgcatagcggtacaaagtaccttggcggtcacaacgatacgctggccggaatactggtgacgagcaatccaaatctatacgagcgccttatttttatagccaagacgataggcgcctgcctatcgcccttcgacagctttttaatcatccgaggaataaagacgctcgccgtccgcatggaccgcatgcaagagagcgcgttaaccatagcaaaatggctgactgagcacagcgccgtggaaaaggtccactacataggtttgcccggccaccccggctacgaaatttcccgccgccaagccggcggtttcggcggtatgatctctttcgccctaaaagattcggagatagcggtcagaacattggaacgtgtgaagatcataaaatacgcggagagtctgggcggcacggagagcctgataacataccccatgctccaaacgcacgccgacatgcccgaagaagagagaaacgccagaggaatcaacgccggattattacgtctgtccgtaggcctggaggccgtagatgatctgatcgctgatttaaaaaaggcaatgggttga

SEQ ID NO: 25134 - protein, 284 aa, Unknown
  Obtained from environmental sample
  DOMAIN (2)...(284): Cys/Met metabolism PLP-dependent enzyme
  misc_feature (1)..(284): Xaa is any amino acid
MAPDDLYGGTYRLFAHISQKNGINFSYVSTLEGIEKSIRPETKAVFIETPTNPMMQVIDIAAAARIAHDRKLILVVDNTFLTPYFQRPMKLGADIVLHSGTKYLGGHNDTLAGILVTSNPNLYERLIFIAKTIGACLSPFDSFLIIRGIKTLAVRMDRMQESALTIAKWLTEHSAVEKVHYIGLPGHPGYEISRRQAGGFGGMISFALKDSEIAVRTLERVKIIKYAESLGGTESLITYPMLQTHADMPEEERNARGINAGLLRLSVGLEAVDDLIADLKKAMG

SEQ ID NO: 25135 - DNA, 369 bp, Unknown
  Obtained from environmental sample
  misc_feature (1)..(369): n is a, c, g, or t
gtgctttatgctgtagctgtaggcggtttgacggtctacaggtttgtcgaagttgaatttacccaagatggacctccttatcaacccattgccttttttaaatcagcgatcagatcatctacggcctccaggcctacggacagacgtaataatccggcgttgattcctctggcgtttctctcttcttcgggcatgtcggcgtgcgtttggagcatggggtatgttatcaggctctccgtgccgcccagactctccgcgtattttatgatcttcacacgttccaatgttctgaccgctatctccgaatcttttagggcgaaagagatcataccgccgaaaccgccggcttggcggcgggaaatttcgtag

SEQ ID NO: 25136 - protein, 122 aa, Unknown
  Obtained from environmental sample
  misc_feature (1)..(122): Xaa is any amino acid
MLYAVAVGGLTVYRFVEVEFTQDGPPYQPIAFFKSAIRSSTASRPTDRRNNPALIPLAFLSSSGMSACVWSMGYVIRLSVPPRLSAYFMIFTRSNVLTAISESFRAKEIIPPKPPAWRREIS

SEQ ID NO: 25137 - DNA, 996 bp, Unknown
  Obtained from environmental sample
  misc_feature (1)..(996): n is a, c, g, or t
atgaggcgaacgcgtttgtcagagataggcaatgaccttgccggcaacatgaccgagaccgccgccgcggtaaacgaaatcaccgccaacatccagagcatcaagggcaggattattaaccagagcgccagcgttacccagaccaacgccaccatggaacaggttataaccaacatcaacaaacttaacgaccaggtggaaaaccagagcaccaatatctccaaggcttcgtccgccatagaggaaatggtagccaatgtcggttcggtaacccaaacccttgtaaggaacgttgataatgtaaacacgttaaaagaagcctccgaagtgggccgcggcggattacagggagttgtgacggatattaaggaaatagcccatgaatccgaagacctgttgaaaatcaacgcggtaatgaaagacatcgccagccagaccaacctgctttcgatgaacgcggcgatagaggcggcccacgccggggaggcgggcaggggcttcgccgtagtcgccgatgaaatccgcaaactggcggagagttccggcgagcagtccaagaccataggcgccgtgcttaaaaagataaaggaagcaatcgacaagatagcccattccacggaaaacgtgcttaacgagtttgaagcgattgactcaagcgtcaagacggtagtggagcaggaggacaatatccggaacgcgatggaggaacagggcgagggcagcaggcagatactggacggcattagcaatgtaaatgaagttacccggcaggtaaagggcggttccgagcaaatgctcgaaggcagcaaggaagtgataaatgaaagccacaaccttgaaacagtaacgcaggagatcacgggcggcatgaatgaaatggcctcgggcgcggagcaggtaaacgtagcggtgcaccacgtcaacgagatatgcgtaaagaaccgcgagagaattgagagtttgatgaaggaggtttcacgtttcaaagtagcttga

SEQ ID NO: 25138 - protein, 331 aa, Unknown
  Obtained from environmental sample
  DOMAIN (60)...(287): Methyl-accepting chemotaxis protein (MCP) signaling domain
  misc_feature (1)..(331): Xaa is any amino acid
MRRTRLSEIGNDLAGNMTETAAAVNEITANIQSIKGRIINQSASVTQTNATMEQVITNINKLNDQVENQSTNISKASSAIEEMVANVGSVTQTLVRNVDNVNTLKEASEVGRGGLQGVVTDIKEIAHESEDLLKINAVMKDIASQTNLLSMNAAIEAAHAGEAGRGFAVVADEIRKLAESSGEQSKTIGAVLKKIKEAIDKIAHSTENVLNEFEAIDSSVKTVVEQEDNIRNAMEEQGEGSRQILDGISNVNEVTRQVKGGSEQMLEGSKEVINESHNLETVTQEITGGMNEMASGAEQVNVAVHHVNEICVKNRERIESLMKEVSRFKVA

SEQ ID NO: 25139 - DNA, 549 bp, Unknown
  Obtained from environmental sample
  misc_feature (1)..(549): n is a, c, g, or t
atggggaggttgactatgtgtaaaaaaaagactggattttttacaaagcgcctcctgtatgtacaactgctgtttaccgcctttgcgtttttgttaatggttgtattaagctataccttcaccagcaaaatcgtgcgtaccaatctgttacgcaacgtggacaacatacttgattatgtagaatccaaaatcaactccgatctgctggagtcacgcaccatactggacgatttcgcgcaaacagtacagaatatggtccgtgacgctgattacgccgaaaaactgaccgattacaacaaggatatattaaaacatttacttttaaaggatcatgacactatcagcccaaacggcccgttcggctatatcgaanaatttcctgataaaccattcttctttaacggcatangctttcagccgtctgatgactggaagccggaggagcgtccctggtacaaggccgcaattgaggccaacggctgcattgcgctgaccgaaccttatacggacacggtgacaggcgaggttgttttttcatattcctgctga

SEQ ID NO: 25140 - protein, 182 aa, Unknown
  Obtained from environmental sample
  misc_feature (1)..(182): Xaa is any amino acid
MGRLTMCKKKTGFFTKRLLYVQLLFTAFAFLLMVVLSYTFTSKIVRTNLLRNVDNILDYVESKINSDLLESRTILDDFAQTVQNMVRDADYAEKLTDYNKDILKHLLLKDHDTISPNGPFGYIEXFPDKPFFFNGIXFQPSDDWKPEERPWYKAAIEANGCIALTEPYTDTVTGEVVFSYSC

SEQ ID NO: 25141 - DNA, 336 bp, Unknown
  Obtained from environmental sample
  misc_feature (1)..(336): n is a, c, g, or t
gtgcctgttgcccagcaggaaataaatcaacagatcaaattcaatgatgaactgtcaataattggcgaacatggactgtataaggaacggttttccgcgattttgactgattgtatccggtgtgaaattcttaaatccacgggatatgaagttgacgtaattgaattcgttgattttgcgaataccccaaaaaacgcgctgataagggcaaaacttgctaagaaacatttaaaagcggatttttcaaatattgaaagcattgtgcgaaagcttgaaatttctcccaaattgtttttactgataaagaagtggaatgaactttataaaaatatttag

SEQ ID NO: 25142 - protein, 111 aa, Unknown
  Obtained from environmental sample
  misc_feature (1)..(111): Xaa is any amino acid
MPVAQQEINQQIKFNDELSIIGEHGLYKERFSAILTDCIRCEILKSTGYEVDVIEFVDFANTPKNALIRAKLAKKHLKADFSNIESIVRKLEISPKLFLLIKKWNELYKNI

SEQ ID NO: 25143 - DNA, 363 bp, Unknown
  Obtained from environmental sample
  misc_feature (1)..(363): n is a, c, g, or t
atggaaataaagctcaacgagccgcaggtaaaggcggtaaaccagcttgaaggcgcaatcctgataatcgcgggggcaggctccggcaagacaagggtaataacctgccggatcgcgcggatgctcgaaaagggaattccgcagtcggcgatcctcgccctcacatttacaaacaaagccgcgcgtgaaatggaaagcagggtaaaggagatgacggggaaaaaactcacaagcctgacggtaagtacctttcacgctttcggtgtgaaaatactccgcgaggaaattgaaattctgggatacaggaaaaatttttccatctacgattccaccgacaggtgcgaactctcgtgccgattctga

SEQ ID NO: 25144 - protein, 120 aa, Unknown
  Obtained from environmental sample
  misc_feature (1)..(120): Xaa is any amino acid
MEIKLNEPQVKAVNQLEGAILIIAGAGSGKTRVITCRIARMLEKGIPQSAILALTFTNKAAREMESRVKEMTGKKLTSLTVSTFHAFGVKILREEIEILGYRKNFSIYDSTDRCELSCRF

SEQ ID NO: 25145 - DNA, 354 bp, Unknown
  Obtained from environmental sample
  misc_feature (1)..(354): n is a, c, g, or t
atgtcagataacggggaaaaaatcagcgccgccaaaaagaacgcgatgctgcttggtgagcttggggataacccaaaccgcagcgcgcgctttgtgtgcgccatggttttatactgcgggccaaaccgtttctttgcagcccaggaaaccatggaaggcgaactcgttaaaaacgcggaagccgcaaggggctcaggcggttttggctacgatcccattctttttattcccgaacttggccgcaccgtggcggagctttcggaagaagaaaaaaaccgttacagccatcggggcaaagccggaaaggcaatcgcgaaaattttatccggtatatcaataaatgaaaaaatttaa

SEQ ID NO: 25146 - protein, 117 aa, Unknown
  Obtained from environmental sample
  DOMAIN (1)...(108): Ham1 family
  misc_feature (1)..(117): Xaa is any amino acid
MSDNGEKISAAKKNAMLLGELGDNPNRSARFVCAMVLYCGPNRFFAAQETMEGELVKNAEAARGSGGFGYDPILFIPELGRTVAELSEEEKNRYSHRGKAGKAIAKILSGISINEKI

SEQ ID NO: 25147 - DNA, 408 bp, Unknown
  Obtained from environmental sample
  misc_feature (1)..(408): n is a, c, g, or t
atgttaggagaagataatatggcagccacaaaagaagaaattttagaagcgatcgcgtccatgacagttctggaagtatccgagctggtaaaaatgatggaagagaagttcggcgtttcagcggcagctcccgttgcggtagcggcagttggcggcgccggcggaggagcggcggctcctgcggcggaagagaagacagagtttaacgttattcttaaagcttacgatgatgccaagaaaattgccgttattaaagaagtccgcgccgtaaccggcctgggccttaaagaggcaaaagaccttgtagaaggagcgcccaaaccgttaaaagaaggcgctaccaaagaagaggcggcaaaaatcaaggatgcggttaccgcggcaggcggtactgttgagatccagtaa

SEQ ID NO: 25148 - protein, 135 aa, Unknown
  Obtained from environmental sample
  DOMAIN (67)...(135): Ribosomal protein L7/L12 C-terminal domain
  misc_feature (1)..(135): Xaa is any amino acid
MLGEDNMAATKEEILEAIASMTVLEVSELVKMMEEKFGVSAAAPVAVAAVGGAGGGAAAPAAEEKTEFNVILKAYDDAKKIAVIKEVRAVTGLGLKEAKDLVEGAPKPLKEGATKEEAAKIKDAVTAAGGTVEIQ

SEQ ID NO: 25149 - DNA, 558 bp, Unknown
  Obtained from environmental sample
  misc_feature (1)..(558): n is a, c, g, or t
ttggatgatcttgatatggaagaaaggctttctgacttccagcgcatcggttatcctgtatttcgcttgtcggcaaaaacaggaacgggcctggatgagttcaggcattttatcgcggggaaattttccgttttggtcgggcagtcggggacgggaaagtccagcctgataaacgccctgattcctgagctgcaagtaaaaacaggcgagataaacgaaaagtacagccgcgggaagcatacaacaacccagggagtattattggagagcatggataaaggtggagaagtgaattcgattcgtatcattgatacccccgggattcgccgctttgccatcgccggcctggaagagaaggaccttattttttttatgcgcgagtttgcgcctcttgcgggcaagtgcagcttcggcctttcctgttcccatagaaccgaaataggctgcaagatcatggaagccgttcacgccggagtgattcacgaagacaggtacgaaagttttctgagaatccaggacgaaatttccggcaaggatagctatcctgatacggattag

SEQ ID NO: 25150 - protein, 185 aa, Unknown
  Obtained from environmental sample
  DOMAIN (41)...(153): GTPase of unknown function
  misc_feature (1)..(185): Xaa is any amino acid
MDDLDMEERLSDFQRIGYPVFRLSAKTGTGLDEFRHFIAGKFSVLVGQSGTGKSSLINALIPELQVKTGEINEKYSRGKHTTTQGVLLESMDKGGEVNSIRIIDTPGIRRFAIAGLEEKDLIFFMREFAPLAGKCSFGLSCSHRTEIGCKIMEAVHAGVIHEDRYESFLRIQDEISGKDSYPDTD

SEQ ID NO: 25151 - DNA, 555 bp, Unknown
  Obtained from environmental sample
  misc_feature (1)..(555): n is a, c, g, or t
atggaaataaaggaattatcttcaaacttaattgatgactatttggagttctttgataatattgcttttagcgatcataaggaatggtcatggtgttattgcgctttttatcattttgatgatgatgacataaagaaactgcaggaaaccgggaaggaaaatctgcggagcgaagctgttgatctaataaaacaaaaaagtattcagggttatcttgcgtatgaagagaataaagttgttggctggtgcaattgcggtaacaaaaaaaactacagacgtcttcgtacatttaaggaattatgggaaggtgaagaagaaagtgtgaaaataaaatcggtcgtatgctttattgtcgcacctgaaatgcgtaataaaggaattgcaacaaaactccttgagcgtgtttgttcagacgctaaaaatgagggatattcgtatatagaagcatacccaataaaaggcggcaaaaattgttttgatcttttccatgggcctgaagaattgtataaaaaagaaggatttatttttataaagaatttgagtatggtacaatag

SEQ ID NO: 25152 - protein, 184 aa, Unknown
  Obtained from environmental sample
  DOMAIN (71)...(175): Acetyltransferase (GNAT) family
  misc_feature (1)..(184): Xaa is any amino acid
MEIKELSSNLIDDYLEFFDNIAFSDHKEWSWCYCAFYHFDDDDIKKLQETGKENLRSEAVDLIKQKSIQGYLAYEENKVVGWCNCGNKKNYRRLRTFKELWEGEEESVKIKSVVCFIVAPEMRNKGIATKLLERVCSDAKNEGYSYIEAYPIKGGKNCFDLFHGPEELYKKEGFIFIKNLSMVQ

SEQ ID NO: 25153 - DNA, 729 bp, Unknown
  Obtained from environmental sample
  misc_feature (1)..(729): n is a, c, g, or t
atggaagaggacgtgcttaacggctttgcggtactggaaaaaaacgtcaaaaaaatgggggatataaaagaaaaaaattccggggttatcagcggcattatatccctgggcaataaagtaaacaaaatacgcgatattgtgagggttattaacactattaccgaccagacaaaagtaattgcgtttaacgcagcgctggaagcggcgggcgcgggggaaaccggcaagcgtttcgcggtggttgccgccgaggtaaacaggctggccgacgacatagccgttcttacgcgccagattcgtgaacaggttgaggaaattcaaagctcttcctcttcgctgatagtctacagcgaggaaggttcagacagaatcgccgagggttataaacttatcaaggatctggaagatgtttttaaggagatcagggccggcgcggagataacttccaatcaggcgcaggctatcaccgtttccacccagcagcagttgaagtccagcgaaaaagtcagtttcgccatctccgaagtttcccaggaagtaaaactttttattaactcggtggaaacggcggcgttgtccgccggaaccctggcggaacgcacccgcgagctggaacgcttcctgactgcgcaaacagcggcgcaaatagcggcgcatacagggaaagaagcgatcggacaaggccatggcggttataaatccaaatacataaccaatcgccgtcgataa

SEQ ID NO: 25154 - protein, 242 aa, Unknown
  Obtained from environmental sample
  DOMAIN (2)...(214): Methyl-accepting chemotaxis protein (MCP) signaling domain
  misc_feature (1)..(242): Xaa is any amino acid
MEEDVLNGFAVLEKNVKKMGDIKEKNSGVISGIISLGNKVNKIRDIVRVINTITDQTKVIAFNAALEAAGAGETGKRFAVVAAEVNRLADDIAVLTRQIREQVEEIQSSSSSLIVYSEEGSDRIAEGYKLIKDLEDVFKEIRAGAEITSNQAQAITVSTQQQLKSSEKVSFAISEVSQEVKLFINSVETAALSAGTLAERTRELERFLTAQTAAQIAAHTGKEAIGQGHGGYKSKYITNRRR

SEQ ID NO: 25155 - DNA, 828 bp, Unknown
  Obtained from environmental sample
  misc_feature (1)..(828): n is a, c, g, or t
gtgtcgcttctcaacaccgacctgtgccaactgtgggccggtacctttaccagcctggacgcgcgggtacagcggaataccgcgaccgcgaaactggatctgctcctgtatctggctgtagtattggtatcgctgggaatcgccatcggttttgtggcgttcattacgctggatataaacaagtcggtcaggacccttaaaaccctgttcaggggtctcaacgagaacgatttaaccctgtctttgaaagttaactccatggatgaattcggcgagttgatgacagccttcaacggattcctcaatatactcagatcaacattcggaagcttcaaacagagcgcccaacttgtcgcaaattccgttttcgatctttcctcgtcatcaaaagaaatttcgactaccgccaacgagcagtccgccagcgtctccgagattgtcagtacgatggaaggcagcaagaacctgtcggaacagatcgcctataaaaccaccgaagtggccaatctcgccaaagaaacgcaggagttgagcagcaaaggcgccgaactcagagaagcgaatcagaccatgatggaagacatcaggaaccagaaccagaagatcataagcgagatacgcaacctttcggacatgattataaggatcagcgaggccatcaggatcattgacggcatcgccgaccagaccaagctgattgcgtttaacgcttctcttgaggcttcttcatccggggaagcgggggcgcggttctcggtagtcgcctcggaaataggcgtttcgcggacaatgtggttgaatcaacgcgggagatcaaacagaagatag

SEQ ID NO: 25156 - protein, 275 aa, Unknown
  Obtained from environmental sample
  DOMAIN (37)...(106): HAMP domain
  misc_feature (1)..(275): Xaa is any amino acid
MSLLNTDLCQLWAGTFTSLDARVQRNTATAKLDLLLYLAVVLVSLGIAIGFVAFITLDINKSVRTLKTLFRGLNENDLTLSLKVNSMDEFGELMTAFNGFLNILRSTFGSFKQSAQLVANSVFDLSSSSKEISTTANEQSASVSEIVSTMEGSKNLSEQIAYKTTEVANLAKETQELSSKGAELREANQTMMEDIRNQNQKIISEIRNLSDMIIRISEAIRIIDGIADQTKLIAFNASLEASSSGEAGARFSVVASEIGVSRTMWLNQRGRSNRR

SEQ ID NO: 25157 - DNA, 663 bp, Unknown
  Obtained from environmental sample
  misc_feature (1)..(663): n is a, c, g, or t
atggcggttcttgggtgtgatgacggctcaataaatgaaaacgataattgtaaaaacataactctggtttgtttaggcgacagtcttacagccggttatggcgctgctaagccttctgaagtagataagtcaaaatcttatcccgcttatttacaaaaaaaaaccggtattaataccgttattaacgcgggtgtaagcggagatacgaccgcgcaggctttagcccgtgtggattctgacgttctttcccataagcctgatatagtaattatattattgggggctaatgatttttttgatttcttacatattcccgtttcgacaacacaaagtaatcttcaaactattattaataatgttgataatgggaacagaaaaatctatctggcaaaattttatacggatgaggtggcagcgtcattcagtgacattttccctatccctatcccctccattattattgatctatatgttaatcaatatgataatatgtttaatactctcgcggcatcctcggataatattgaaataattgaggatatttggaacggagtatggggaaaacatatgtcagactttattcatccggacgctgaaggatatgaaattatggcggacaacatttataaagtgatggaaccatatttgcaaacattaaaataa

SEQ ID NO: 25158 - protein, 220 aa, Unknown
  Obtained from environmental sample
  DOMAIN (22)...(208): GDSL-like Lipase/Acylhydrolase
  misc_feature (1)..(220): Xaa is any amino acid
MAVLGCDDGSINENDNCKNITLVCLGDSLTAGYGAAKPSEVDKSKSYPAYLQKKTGINTVINAGVSGDTTAQALARVDSDVLSHKPDIVIILLGANDFFDFLHIPVSTTQSNLQTIINNVDNGNRKIYLAKFYTDEVAASFSDIFPIPIPSIIIDLYVNQYDNMFNTLAASSDNIEIIEDIWNGVWGKHMSDFIHPDAEGYEIMADNIYKVMEPYLQTLK

SEQ ID NO: 25159 - DNA, 954 bp, Unknown
  Obtained from environmental sample
  misc_feature (1)..(954): n is a, c, g, or t
ttgacattgacagaatcggccgagcggaagttacgataccatttcaaaaacatttatttaacgggttccaactccaaaatgctttcttcggaaatagccaccgcccttagaggcagaactttgcaatttgaaatattcccattgtctttttctgaattttgcgattttaagaatattgagaaaaatttttacagtccagcaaaaaaagctgttttagtaaatgctttcaatgaatatcttttcaagggcggttttccagaaattgcgctcactaaagatgttttttgcgaacaaattttgcaagaatattatcacgttatgatttttaaggatttggttgagagatatggcataaaaaacacaaaagttttgcgctatttaattaaaaggctactcgccaatttaaccaagccaacttccgtaaataaaattttcaacgaaataaaatccgccggaatcgccatttccaaaaatacgatttatgaacttatagacaggctggaatgcatatatatgtttttgcccctacctaaattcagcgtttcaccaatcaaggaattttctggaatatcaaagtattattgcatagacaacggctttaattatgctttgcaaggcggagtttctgaaaacaagggggtatttttagaaaatgcggtttatttgcatttgcgtagaaagcatccctttggtaaaggtttgttttatttcagggaaaaatacgaatgtgattttttgtgcttggaaaaacaaagcgtgagcgaattaatacaagtttgctggagtttggaaaatccagaaacagagaaaagagaaataaacggcttggtagaggcggcaaaagccactggttgcaggaatttgaaaattgtaaccgcagatttggagaagcgtattaaaatcggtgagtttgaggttttagtgcagcctgcttggaagtttatggtgggttga

SEQ ID NO: 25160 - protein, 317 aa, Unknown
  Obtained from environmental sample
  misc_feature (1)..(317): Xaa is any amino acid
MTLTESAERKLRYHFKNIYLTGSNSKMLSSEIATALRGRTLQFEIFPLSFSEFCDFKNIEKNFYSPAKKAVLVNAFNEYLFKGGFPEIALTKDVFCEQILQEYYHVMIFKDLVERYGIKNTKVLRYLIKRLLANLTKPTSVNKIFNEIKSAGIAISKNTIYELIDRLECIYMFLPLPKFSVSPIKEFSGISKYYCIDNGFNYALQGGVSENKGVFLENAVYLHLRRKHPFGKGLFYFREKYECDFLCLEKQSVSELIQVCWSLENPETEKREINGLVEAAKATGCRNLKIVTADLEKRIKIGEFEVLVQPAWKFMVG

SEQ ID NO: 25161 - DNA, 972 bp, Unknown
  Obtained from environmental sample
  misc_feature (1)..(972): n is a, c, g, or t
ttgtccgcgattttggaagagtttatgaaaggccgcgaacaatctatgattgtttccgccgcgagggctgataccgccgtcagcatggctcacgcttttaacggcagaaaaggcatctcgcttgttttgctgtacccttccggacagatacgcggtcttgatccttcgtctttcgcgcaaaacggcgggaatattattcccattcaggttaagggaacatttgacgactgccagcgtctggttgtcgaggtgataaaggacagggaattctcaactcgttataatgttacaagctctaacacgataaatcccggaaggcttctgccgcaggttttttattatctgtacgcctttattcaaataaagaataaattcagcaaagatttgtttttcagcgtgccatgcgggaacttcggcaaccttatcgccggtttgtacgcgtggaaattcggaatgccagtgaacgggtttatcgccgcgatgaatattaacaattctttcggcgattatatacgcggaaaaactttccgtcccaagccgcttgttacgacaaaatcaccttctttggacgtaagcgttccgctgaattacgagcgtcttgcgtctttttacgcggaagctccggccattatgcgcaatatagtttatcccgcctcaataaatgatgatttgaccatgcagacaatggagcaggtttataaaaaatacggtatttatattgattcaaatacagccgtcgcctttgcctcggcgcgtgaaattgcggacgaatataaattgaacgggcaggcgcatacggttgttctggcgacagggcatccggcaagggaagcaagccttaccggcgacgctgtggggcagagcataaatgttcccgattcaatactggcgcttaaaaaaagatgcgatccaatcgcgattattcagccccaattggacgcggttgaaagcgctatcgcaagctgtttttaa

SEQ ID NO: 25162 - protein, 323 aa, Unknown
  Obtained from environmental sample
  DOMAIN (1)...(273): Pyridoxal-phosphate dependent enzyme
  misc_feature (1)..(323): Xaa is any amino acid
MSAILEEFMKGREQSMIVSAARADTAVSMAHAFNGRKGISLVLLYPSGQIRGLDPSSFAQNGGNIIPIQVKGTFDDCQRLVVEVIKDREFSTRYNVTSSNTINPGRLLPQVFYYLYAFIQIKNKFSKDLFFSVPCGNFGNLIAGLYAWKFGMPVNGFIAAMNINNSFGDYIRGKTFRPKPLVTTKSPSLDVSVPLNYERLASFYAEAPAIMRNIVYPASINDDLTMQTMEQVYKKYGIYIDSNTAVAFASAREIADEYKLNGQAHTVVLATGHPAREASLTGDAVGQSINVPDSILALKKRCDPIAIIQPQLDAVESAIASCF

SEQ ID NO: 25163 - DNA, 1209 bp, Unknown
  Obtained from environmental sample
  misc_feature (1)..(1209): n is a, c, g, or t
ttgccgcttttggttaaacagggatataagaaaaatatatacgcgactccggcaacaagagatcttgccagtcttatcatgatggattccgcccgcattcaggcacacgacgcggtattcttaaagaagcaggctgaaaagaaaggcgaaaaattcacatggactcctctttacacggaacaggacgcaatcgcggcggtaggacaaacaataggagtttcatataacaggcctatgcctctggataatggcgtaagtttggaattttacgacgccggtcatattctcggctccgccatagcggaaataaagataaaaaagggcggcgaagaactgactattcttgccacgggagaccttgggcggaaaggcaaacctattatccgcaatcctgatattccaaagaatccgccggactatattatccttgaaagcacctacggggaccgccaacacggttccacggacgacgcccttaaaaaactcgcggaaatagcaaagcggactgtggaaaaaagagggagaatattaattccttctttcgcgattgaacgcacgcaggaacttgtttactattttcatcttttgacagacgacggcacaattcccgaagtgccgattttcgtagactcgccgatggcgactaacgccacgacaatttttcaggttcaccctgaatgttacggcgaagacataaaagaagcttttataaaacaccataaaaatccgtttggttttaacagtctgcactttacgacaagcgtagatgaatcaaaggccttaaacgaacataaaggacccttaataataatatcagcggacggaatgtgcgaagccgggcgcatacagcaccaccttattcacaacatacaggacccgaacacaacgatcatgactgtaggctacatggcggaaaacacgcttgggcggcgcatacgcaaccgcgagggcgaggtaaagattcacggcgaatggttcaagttaaaagcgcatgtcgaggaaattaacgcgttcagcgctcatgccgattattttgaaatgctggaatggcttaacgcgcttgacagatcgcgcttaaaagggatttttctggttcacggcgagaagaaggcgcaagtttttttacaaaaatatctaaaggaaaacgggtttcaggatgttgatgttgaaatagtgaaacgcgggaaaacttatgagttgacttcttaa

SEQ ID NO: 25164 - protein, 402 aa, Unknown
  Obtained from environmental sample
  DOMAIN (324)...(370): RNA-metabolising metallo-beta-lactamase
  misc_feature (1)..(402): Xaa is any amino acid
MPLLVKQGYKKNIYATPATRDLASLIMMDSARIQAHDAVFLKKQAEKKGEKFTWTPLYTEQDAIAAVGQTIGVSYNRPMPLDNGVSLEFYDAGHILGSAIAEIKIKKGGEELTILATGDLGRKGKPIIRNPDIPKNPPDYIILESTYGDRQHGSTDDALKKLAEIAKRTVEKRGRILIPSFAIERTQELVYYFHLLTDDGTIPEVPIFVDSPMATNATTIFQVHPECYGEDIKEAFIKHHKNPFGFNSLHFTTSVDESKALNEHKGPLIIISADGMCEAGRIQHHLIHNIQDPNTTIMTVGYMAENTLGRRIRNREGEVKIHGEWFKLKAHVEEINAFSAHADYFEMLEWLNALDRSRLKGIFLVHGEKKAQVFLQKYLKENGFQDVDVEIVKRGKTYELTS

SEQ ID NO: 25165 - DNA, 900 bp, Unknown
  Obtained from environmental sample
  misc_feature (1)..(900): n is a, c, g, or t
ttggtggaagctcttgaacaggcgttgaaattcagcaaaaataaattgatttcgtttttgtttgaaaaggaatataaaataataagcacggatttggcttgcgtgaaatgcggaatatcactgccagaaattgagccacgtcttttttcctttaacgacaagcaagggcaatgcccaatttgcaaaggtttgggaaaaagttaccagatagaagcctcaaagctcatagaccccgaactctcaatagaagatggggctattttagcgagcaatgccgaaggccgcctgctcttcagcgattatggaattgctgaatatagagccatagcgaggagaataggattttctttaaaaaccccttggaaggatttaccagcaaaagccaagaacgctatcttagacagcataataccaattctgcaagggctttgggaccaatggcatatacatctattgcaaaaatatatgctgattgaaccgtgcccagaatgcaaaggggagcggatttgcgcagctgcacgtgccatgaagtttcacggcaagggaatttctgaaatatcatctctatccgtggataattctgtgaaattttttgagaaacttaatctgagcgagaaagagaagaggataggcagggaaatttttagggagataaaagggaggctcggatttttgcaggcggttggccttggctacttaacgctcaacagaggctcggcaacacttagcggcggcgaggcacagcgtattcgccttgctgggcacgtgggtgctggcttgcaaggtgtgctatacgttttggacgaacccagcatagggttgcacgcccgcgacaacgaaaggcttttggatattctggaaaggctcagagcgcaggggaacagcccttgtggtggttga

SEQ ID NO: 25166 - protein, 299 aa, Unknown
  Obtained from environmental sample
  misc_feature (1)..(299): Xaa is any amino acid
MVEALEQALKFSKNKLISFLFEKEYKIISTDLACVKCGISLPEIEPRLFSFNDKQGQCPICKGLGKSYQIEASKLIDPELSIEDGAILASNAEGRLLFSDYGIAEYRAIARRIGFSLKTPWKDLPAKAKNAILDSIIPILQGLWDQWHIHLLQKYMLIEPCPECKGERICAAARAMKFHGKGISEISSLSVDNSVKFFEKLNLSEKEKRIGREIFREIKGRLGFLQAVGLGYLTLNRGSATLSGGEAQRIRLAGHVGAGLQGVLYVLDEPSIGLHARDNERLLDILERLRAQGNSPCGG

SEQ ID NO: 25167 - DNA, 402 bp, Unknown
  Obtained from environmental sample
  misc_feature (1)..(402): n is a, c, g, or t
ttgttagcaacatttactatattctatttcatgcattttatagacagaaccttaataagaaattctgttattttagcagtagatgattcccctgttctgttggatgcgttagatgcaattttgggcgacctttgcaagaaattcatcatgaccacaaccgcagctgaagccgtggacattataatagagaatatgccggatttagtgctattggatattgaaatgccaaagatgaacggttttgagctttttgaaaaattgaagaaatttacagcgatagccagaattccagttatctttataacctcttgggaagataaaagggtagaagccaaggcgttggagattggtgcggtggattacgtgacaaaaccattgacagtgcggctcgtgccgatctga

SEQ ID NO: 25168 - protein, 133 aa, Unknown
  Obtained from environmental sample
  DOMAIN (22)...(131): Response regulator receiver domain
  misc_feature (1)..(133): Xaa is any amino acid
MLATFTIFYFMHFIDRTLIRNSVILAVDDSPVLLDALDAILGDLCKKFIMTTTAAEAVDIIIENMPDLVLLDIEMPKMNGFELFEKLKKFTAIARIPVIFITSWEDKRVEAKALEIGAVDYVTKPLTVRLVPI

SEQ ID NO: 25169 - DNA, 468 bp, Unknown
  Obtained from environmental sample
  misc_feature (1)..(468): n is a, c, g, or t
ttggatttgagcatagatgaggctttgggcttttttaaagacctgcctaaaatcgctaagccattaaccgttttgcaagagatagggcttggctacgtgaagctcgggcagcccagcaccactttaagcggcggagaggctcagaggatgaaaatctccactgagcttcgcaggcctggtacgggcaaaaccctttacctactggatgagcctacaacggggctgcattttgaggatatacatcgcttgctggaatgcctgcaacgccttgttgacaaaggcaattcaatggtggttatagagcataatttggatgttattaaatgcgctgactggattatagacttagggccagatgctggcgatgggggaggtgctgtggtggcagaaggggagccggagaagatttgtgaagctgggaattcatatacgggcagttttttaaaaaaaatgccggttttttgttag

SEQ ID NO: 25170 - protein, 155 aa, Unknown
  Obtained from environmental sample
  DOMAIN (2)...(117): ABC transporter
  misc_feature (1)..(155): Xaa is any amino acid
MDLSIDEALGFFKDLPKIAKPLTVLQEIGLGYVKLGQPSTTLSGGEAQRMKISTELRRPGTGKTLYLLDEPTTGLHFEDIHRLLECLQRLVDKGNSMVVIEHNLDVIKCADWIIDLGPDAGDGGGAVVAEGEPEKICEAGNSYTGSFLKKMPVFC

SEQ ID NO: 25171 - DNA, 453 bp, Unknown
  Obtained from environmental sample
  misc_feature (1)..(453): n is a, c, g, or t
atggggggatctggcataatgctgcggctttcttccggattggaacgcgatataagaacgcatggcgaaaccgcttatcccaacgagtgctgcggcgttcttatcggagaagttgatgacgcgggaggtaaaaccgccaggtccgcgctgaccattgacaacgcgagggaagacgacgagcaataccaccgctttctcataacgccggaagacatgatgaaagcggaacaggcggcaagggcgatgaaacttgacgttatcggcttttaccactcgcaccccgaccatccctcggcgccttcgggttatgacaaggatcacgcgcttcctttttactcctatgtgattgtatcggtggacaagggaaaggcgcagattcttacaagctgggagcttacggacgacagaactgaatttatacaggaagaaataaataaggagagtaaaaaatga

SEQ ID NO: 25172 - protein, 150 aa, Unknown
  Obtained from environmental sample
  misc_feature (1)..(150): Xaa is any amino acid
MGGSGIMLRLSSGLERDIRTHGETAYPNECCGVLIGEVDDAGGKTARSALTIDNAREDDEQYHRFLITPEDMMKAEQAARAMKLDVIGFYHSHPDHPSAPSGYDKDHALPFYSYVIVSVDKGKAQILTSWELTDDRTEFIQEEINKESKK

SEQ ID NO: 25173 - DNA, 927 bp, Unknown
  Obtained from environmental sample
  misc_feature (1)..(927): n is a, c, g, or t
ttgatggggaaagtacgggaaggggataatatgggtattttggaacttgtcggcaacactccggtaattgaattaaaaagaatattcgatacatcaaacggcgtttccctgtttgccaaagcggaatattttaacccgagtggctccgtcaaagaccgcgccgcgaaagccatgatactgcatggcattaactcaagggagcttaccaaagataaaatcattttggattccaccagcggcaataccggcatcgcctacgccatgttcggcgcggcgcttgggtaccgggtaaaattgttcataccggcaaacgccagcggggaaaggaagaaacttattcgggctttcggcgcggaaattattgaaacagacccccttgaaggctctgacggcgcgtaccgcatggtaatggagttagccgcgaaagaaccggagaagtatttcttccccaaccagtatgacaatcccgaaaacccccgcgcgcattatgagacgaccggcgtagagatgtataaccagtgtaaacccacgcattttgtatccggaaccggaacttcgggaacatttatgggcatttccaaacggcttaaagaatttgatccgtccatacaaatcacgctcatgcagccggattcgcccttccacgggcttgagggaatgaagcatatggaatcgaccataactccgaaaatattcgacaagggcattgccgacttgcacataacggttaaaacagaggacgcttacaaaacggcgcgccggcttgcatccgaggaaggaatatttgtcgggataagctccggggcaaacgtgtacgccgcgatggaaacggcaaaaaacctgccggcgggctcgcgtgtcgccacgatactgtgcgataacggcagccgttatttgtcacagccattatggggggatctggcataa

SEQ ID NO: 25174 - protein, 308 aa, Unknown
  Obtained from environmental sample
  DOMAIN (13)...(294): Pyridoxal-phosphate dependent enzyme
  misc_feature (1)..(308): Xaa is any amino acid
MMGKVREGDNMGILELVGNTPVIELKRIFDTSNGVSLFAKAEYFNPSGSVKDRAAKAMILHGINSRELTKDKIILDSTSGNTGIAYAMFGAALGYRVKLFIPANASGERKKLIRAFGAEIIETDPLEGSDGAYRMVMELAAKEPEKYFFPNQYDNPENPRAHYETTGVEMYNQCKPTHFVSGTGTSGTFMGISKRLKEFDPSIQITLMQPDSPFHGLEGMKHMESTITPKIFDKGIADLHITVKTEDAYKTARRLASEEGIFVGISSGANVYAAMETAKNLPAGSRVATILCDNGSRYLSQPLWGDLA

SEQ ID NO: 25175 - DNA, 483 bp, Unknown
  Obtained from environmental sample
  misc_feature (1)..(483): n is a, c, g, or t
atgacagaaaacacatggagtcttgcctcgctgattgaacggggcggcatacactataatattcccggatcaaaccccaaagagatgcttgccggggtcattgatcttttaccgtcaattccgtcccttgatccgcaggaactgtaccgggaaatactggaacgggaagccctgatgtcaaccggagtaggccggggcattgccctgccgcatccccgcaatcccatgctggatagcgatcctttggtggtgattgcctttcccgttcaaccgcttgactggaacacccaggacggcagcaaggttcatacggtttttttgattgtttcgtcatcggcaaaacagcacctcaatacgttgtctaaaattaattttctctgtcagcaggaaaaattttcttccctgattaaagcgcgttcttcacaagaagacattatcgcggcgattcgggaagcggaagccagttgggcggggacatcataa

SEQ ID NO: 25176 - protein, 160 aa, Unknown
  Obtained from environmental sample
  DOMAIN (10)...(152): Phosphoenolpyruvate-dependent sugar phosphotransferase system, EIIA 2
  misc_feature (1)..(160): Xaa is any amino acid
MTENTWSLASLIERGGIHYNIPGSNPKEMLAGVIDLLPSIPSLDPQELYREILEREALMSTGVGRGIALPHPRNPMLDSDPLVVIAFPVQPLDWNTQDGSKVHTVFLIVSSSAKQHLNTLSKINFLCQQEKFSSLIKARSSQEDIIAAIREAEASWAGTS

SEQ ID NO: 25177 - DNA, 339 bp, Unknown
  Obtained from environmental sample
  misc_feature (1)..(339): n is a, c, g, or t
atggacattacagcgctggaaaaaaccgcgttaagcgtcagggcattaagcattgatgccattcaaaaggccaattcgggccatccgggccttccgctgggagcggcggagttaggcgcaattctgtacggagaattgttgaagcatgatcccgcggatcccgcatgggctgaccgcgaccgttttattttgtcggcgggacacggttcgatgtttctgtattcgctgctgcaccttgccggatataaagatatgtcactggaagatattaaaaatttccggcagatcggttcccgtgccgcgggtcatcccgaatacggcatggcccgccggtattga

SEQ ID NO: 25178 - protein, 112 aa, Unknown
  Obtained from environmental sample
  DOMAIN (5)...(112): Transketolase, thiamine diphosphate binding domain
  misc_feature (1)..(112): Xaa is any amino acid
MDITALEKTALSVRALSIDAIQKANSGHPGLPLGAAELGAILYGELLKHDPADPAWADRDRFILSAGHGSMFLYSLLHLAGYKDMSLEDIKNFRQIGSRAAGHPEYGMARRY

SEQ ID NO: 25179 - DNA, 738 bp, Unknown
  Obtained from environmental sample
  misc_feature (1)..(738): n is a, c, g, or t
atggcggcgatttgcaatggtatttccctgcatggcggcctgcgttcctattgttcaacctttatggtctttgcggactatctccgcccggcgctccgtctctccgcgctgatgaaacagccggtcgtttacgtgcttacccacgattcgatctttgtcggcgaagacggccccacccaccagccggttgaacaccttgcctctttgcgggttattccaaatgtccgcgtcctgcgccccggcgacgccgaagaaagcgccgaagcctgggctatggcgatggaatacgccgccggccccagcgcccttgccctttcccggcagaacattacggtctttcccaaagccgacccggactggaaaaatacaatccgtaccggcgcgtacatcgtcaaacatgctgaaagcgaaaagcccgacgcggtgattatcgccaccggttcggaagtaggccttgctttggaagccgccggaaaagcgggtaaaaagcttcgaattgtttccatggtcagcaaggaactgtttgaatcccagcctgccgcaatccgcgacgccattgtcccgccggacgcgcgggtcatcgtctgcgaggcgggcgtccgcagcggttgggaacgctgggccaaaccggaagacattttatcgatagaccgtttcggcgaatccggtccggcggacaaagccgccgcgcatctgggcatgaccgttgacgcgctggtgaagataatagcgaagtag

SEQ ID NO: 25180 - protein, 245 aa, Unknown
  Obtained from environmental sample
  DOMAIN (128)...(239): Transketolase, C-terminal domain
  misc_feature (1)..(245): Xaa is any amino acid
MAAICNGISLHGGLRSYCSTFMVFADYLRPALRLSALMKQPVVYVLTHDSIFVGEDGPTHQPVEHLASLRVIPNVRVLRPGDAEESAEAWAMAMEYAAGPSALALSRQNITVFPKADPDWKNTIRTGAYIVKHAESEKPDAVIIATGSEVGLALEAAGKAGKKLRIVSMVSKELFESQPAAIRDAIVPPDARVIVCEAGVRSGWERWAKPEDILSIDRFGESGPADKAAAHLGMTVDALVKIIAK

SEQ ID NO: 25181 - DNA, 852 bp, Unknown
  Obtained from environmental sample
  misc_feature (1)..(852): n is a, c, g, or t
gtgtggcttttgcgcctgcctcgcgtactgctcgctttttttgcgggcggctgccttgccgtgagcggcgctgtctgtcagtccattctgcgaaacccgcttgcctctccgtatattttgggggtttcttcaggagcgagtctcggggcggggataattattataagcgggattacgctgccctttctcggcggctttaccctgccgttaacgggttttgtctttgggcttgcgaccgtcttccttgtaaccgcgttttcatcgcgcattgacagaacaatgtcgaataacacgattatcctgtgcggcatggtgctttcgcttttcctgagcgcgatcttaacaacaataagcgccgtcttttctgacgaccttcgccgcattgcgctgtggcaaatgggaagttttgcgatgcggggctggacttatgtttatctcctgctgccgtttttcgcggcaggatgcgcgggggtttttctttatacaaaagaaatggacattttaagtttcggcgatgatcacgcaaaatccgccggagtggaaacaggaacgctgcgcataaaactgcttgctctctgcgcaatactgacaggcgcggcagtcgctctttgcggcgttatcggttttacagaccttattgcgcctcacgcggcgcggcgcatcatcggttcgcagcacaggtatttaatccccatgtcttttattctcggcggctcattgatggttctgaccgaccttatcgcaaggacagttatctctccttcggaacttcccgtaggcgcgattaccgccctaatcggcgcgcccttctttgcgtgggtctactttaaaagacgcaaggtatcgcgatga

SEQ ID NO: 25182 - protein, 283 aa, Unknown
  Obtained from environmental sample
  SIGNAL (1)...(23)
  DOMAIN (29)...(278): ABC 3 transport family
  misc_feature (1)..(283): Xaa is any amino acid
MWLLRLPRVLLAFFAGGCLAVSGAVCQSILRNPLASPYILGVSSGASLGAGIIIISGITLPFLGGFTLPLTGFVFGLATVFLVTAFSSRIDRTMSNNTIILCGMVLSLFLSAILTTISAVFSDDLRRIALWQMGSFAMRGWTYVYLLLPFFAAGCAGVFLYTKEMDILSFGDDHAKSAGVETGTLRIKLLALCAILTGAAVALCGVIGFTDLIAPHAARRIIGSQHRYLIPMSFILGGSLMVLTDLIARTVISPSELPVGAITALIGAPFFAWVYFKRRKVSR

SEQ ID NO: 25183 - DNA, 909 bp, Unknown
  Obtained from environmental sample
  misc_feature (1)..(909): n is a, c, g, or t
atggtgattaaggttaaggaaccgcttgaagcggaatacggcttaatccgcgaaaaccagattctttacacctatttgcaccttgcgccggacaaaccgcagaccgaagctctgctaaaggcaaagtgtatagcagtcgcttacgaaactatcaaggacaggaaagggcagcttccctgccttaagccaatgagccagatcgccggccgcctcgcgatacaggaaggggcgaaataccttgaaaagccgatgggcggcagaggcgtattgctttccggcgttccaggcgttccccacgcggaaatcgtggtgctgggcgctggcgttgtcggcgcaaacgcggtaaaaatcgcggtaggaatgggcgcccatgtcacggttgtggatattgaccttgacaagctggaatacctcgaagacatctacggttcaaaaattaccacgctctattcaacgccggaaaacatctttgaaattctgccaaaggcggatttggttattggcgcggttcttattcctggttcttcgacgcccaagctcatccaaaacaaacatctgcccaatatgaaaaaaggctcggttatcgtggatgtcgccattgatcagggtggttgtactgaagcaagccgtgttacttatcataacgaaccgatctatgagcagaacggcgtaatgttttattgtgtgggcaatatgccaggcgcggtagcctacacttcgacaaatgcccttggcaattccactctccgctacggtctttccatagcgaaacatggagcggaagcggcgctgaaaaaggacgcgggccttatggaagggttaaacgtttataaaggccttgttacatacaagggtgtagcggaagcgcatggattgacatacactccggcggctgaggtgattaagtag

SEQ ID NO: 25184 - protein, 302 aa, Unknown
  Obtained from environmental sample
  DOMAIN (98)...(245): Zinc-binding dehydrogenase
  misc_feature (1)..(302): Xaa is any amino acid
MVIKVKEPLEAEYGLIRENQILYTYLHLAPDKPQTEALLKAKCIAVAYETIKDRKGQLPCLKPMSQIAGRLAIQEGAKYLEKPMGGRGVLLSGVPGVPHAEIVVLGAGVVGANAVKIAVGMGAHVTVVDIDLDKLEYLEDIYGSKITTLYSTPENIFEILPKADLVIGAVLIPGSSTPKLIQNKHLPNMKKGSVIVDVAIDQGGCTEASRVTYHNEPIYEQNGVMFYCVGNMPGAVAYTSTNALGNSTLRYGLSIAKHGAEAALKKDAGLMEGLNVYKGLVTYKGVAEAHGLTYTPAAEVIK

SEQ ID NO: 25185 - DNA, 798 bp, Unknown
  Obtained from environmental sample
  misc_feature (1)..(798): n is a, c, g, or t
atggttagaagtttgtggaccggcgcttccggcatgataggccagcaggccaatatcgacacgatttccaataatctggcaaacgtcaacactgccggatataaaaagatgcgcgcggattttgaagaccttatctatcaaaccgtaaaagtcgcgggaactcccgctaccgaagacactgtagttccggtgggaattcaaatgggacacggcgtaaagctcgccgatactcagagggttttttcccagggggcgctgcaaaataccgaaataccgaccgacatggcaatccagggggacggcttttttaggatacagatgtacgacggttcctgggcctataccagaaacgggaattttaaaattgatgaaacaggccggatggttacaagcaacggttactggctgctgcctgatatcgtgatgcctcaaaattttcttcccaattccgttactgtgtcccaggacggcagggtttccgttgtcgttccgcagatcgacgatgagccaatccagatcggccagattgagctgtaccgctttcctaaccctgtaggccttaccgccgtcggggaaaacctttttaagataaccgccgcctccggggaaccgattcccggcgtacccggctacgagggcatgggcaagatagcgcacaaatttttggagatgtcgaatatttcggttgttcgcgaaatggttgaccttattgtcgcccagcgagcctacgaattcaattccagaacgatacagaccagcgacaacatgcttggaaacggcacaggtttgaagagatag

SEQ ID NO: 25186 - protein, 265 aa, Unknown
  Obtained from environmental sample
  DOMAIN (5)...(35): Flagella basal body rod protein
  misc_feature (1)..(265): Xaa is any amino acid
MVRSLWTGASGMIGQQANIDTISNNLANVNTAGYKKMRADFEDLIYQTVKVAGTPATEDTVVPVGIQMGHGVKLADTQRVFSQGALQNTEIPTDMAIQGDGFFRIQMYDGSWAYTRNGNFKIDETGRMVTSNGYWLLPDIVMPQNFLPNSVTVSQDGRVSVVVPQIDDEPIQIGQIELYRFPNPVGLTAVGENLFKITAASGEPIPGVPGYEGMGKIAHKFLEMSNISVVREMVDLIVAQRAYEFNSRTIQTSDNMLGNGTGLKR

SEQ ID NO: 25187 - DNA, 981 bp, Unknown
  Obtained from environmental sample
  misc_feature (1)..(981): n is a, c, g, or t
atggcggcttacatgaaaactccctgtatgccgaccaacgcccagtccggcgcgtttatcaaactgaacgccgacggcggcgttaccgtgtcagtcggcgcggtggacatgggtcagggtttgcatacaacaatggcgcagatcgccgcggaagcgctggatctgcccctggagaaggtcggggtcaacttcattgtagacacattgatttccccctatgactggcagacagtggcaagccggaccacctggggatcgggcaatgcggtcctgcttgcggctcaggacctgcttcaacaactgcgggaacaggcggccctggcatttggcgttgatccgcagcaggtggaaatcgcccgcggcgaagtcaggtgtaagggcaaaactctggcctggggagagttcgccacaggcctgcgaagcgcggccggttcgacgcttacccggcccgtcatgggccatgggtattttgtgccgtccggccttcaaaacccggatgccgaaaccggacagggcaacgcggcggcggactggaccctcggctgtgccggagccgaggtagcggtggatctgcgcaccggagaaatcactgtcctgcgtttgatcaatgtcatcgacgccgggacaatcatcaatccgaaaaacgcgcgggaacaggtaatcggcggaatgataatggccgccggaagcgccctgtcggaaaaagttgtctttgataacaagaccggagctatcaggaatatgtccctggttgactataaagtgcccggtattgaggatattcccgcggagatcgaaattattttcgtgcaaacccctgatgaaacaggcccgtacggcgcgaaaggactcggcgagcatggagcagtcggtactgccccagccctgcttaacgcgatttatgacgctgtgggcttgcggttttccgcattgccggtaacgcctgagtgtattacggggaggctgggacatgattcgtga

SEQ ID NO: 25188 - protein, 326 aa, Unknown
  Obtained from environmental sample
  DOMAIN (1)...(262): Aldehyde oxidase and xanthine dehydrogenase, molybdopterin binding domain
  misc_feature (1)..(326): Xaa is any amino acid
MAAYMKTPCMPTNAQSGAFIKLNADGGVTVSVGAVDMGQGLHTTMAQIAAEALDLPLEKVGVNFIVDTLISPYDWQTVASRTTWGSGNAVLLAAQDLLQQLREQAALAFGVDPQQVEIARGEVRCKGKTLAWGEFATGLRSAAGSTLTRPVMGHGYFVPSGLQNPDAETGQGNAAADWTLGCAGAEVAVDLRTGEITVLRLINVIDAGTIINPKNAREQVIGGMIMAAGSALSEKVVFDNKTGAIRNMSLVDYKVPGIEDIPAEIEIIFVQTPDETGPYGAKGLGEHGAVGTAPALLNAIYDAVGLRFSALPVTPECITGRLGHDS

SEQ ID NO: 25189 - DNA, 867 bp, Unknown
  Obtained from environmental sample
  misc_feature (1)..(867): n is a, c, g, or t
gtgttgctgctgacatgggccgagtatgcactggacgctggcgagtggcggccaaaggaagaaatcctcaggcttgataacaaactaagaaccgaactgaaatggccgacccgcggggacagctgggctcagccctgggtcgagcgcgatgtcagtactccccataccttaaaactgcgttttagctttgaaagcaaaattgccgtaaccggcgcggaacttgttttggaaaacgccgcgtcatccagcattgcgcttaacggcgaggcggcgggcgcggttaagggctggtacgtagacaagtgcattggcaaagtccgcctgccggcaattaaggcgggaaccaatgtgctggaagtgagtttcccctacggtcgcaaagttgatgttgaggccatgtacctgctgggcgatttcggcgtgaatgtcgcaggctcttcctgtgttattaccagaccggtgcgcagtcttggcttcggcgacattacctgccagggccttcccttctacggcggcaacctgacctatcacctggaggtggaaattcctgccgacaaatttacgctaagggccacccaataccgggggcatttgctaaaagtgagggtggacggaaaagattacgggcctttggtttattcgccatacgaaatggaaattccagccggaatgggcaggcacaagatagaccttgtttacttcggaagccggatcaacactttcggccaactgcactgcgtggaaagaaatcccaaattctggtgggggccaaactcatggcgtacggcaggcgcgaattggtcttacgagtatcagttctggccccagggtgtgctgaagtcgcctgagattgcttacccatgttag

SEQ ID NO: 25190 - protein, 288 aa, Unknown
  Obtained from environmental sample
  misc_feature (1)..(288): Xaa is any amino acid
MLLLTWAEYALDAGEWRPKEEILRLDNKLRTELKWPTRGDSWAQPWVERDVSTPHTLKLRFSFESKIAVTGAELVLENAASSSIALNGEAAGAVKGWYVDKCIGKVRLPAIKAGTNVLEVSFPYGRKVDVEAMYLLGDFGVNVAGSSCVITRPVRSLGFGDITCQGLPFYGGNLTYHLEVEIPADKFTLRATQYRGHLLKVRVDGKDYGPLVYSPYEMEIPAGMGRHKIDLVYFGSRINTFGQLHCVERNPKFWWGPNSWRTAGANWSYEYQFWPQGVLKSPEIAYPC

SEQ ID NO: 25191 - DNA, 1368 bp, Unknown
  Obtained from environmental sample
  misc_feature (1)..(1368): n is a, c, g, or t
atgggattgacgcggtaccggacacacaatgttctaaacgcggttattctgccgcataatgcgggattaggagcaatcgcggcgggtgatcttgatagaggcgcaaaagcggcatacacggcaggacgcataactgcacaagaaatgctggcggcaggcgcgcgctggacttttgcgccggtactcggcgttgcggaagatgttcggtggggccgtacttacgaaagcttcagcgaaagtgtaaacattgtaactgtcatgggcgtaaatgttatcaaaggtttgcaggataacggcgcagccgcgtgcatgaaacattttttgggcgaaggccaaaccatagacgggcgcaatcagggcaacgctctgctggatcgcgccggaattgaacgcatacttccgccgtacagggcggctattgaagcgggagcaatttcgcttatgccttcgttttccggcgtgaacggcgttaaaatgcacgaaagtaaagatttacttaccgatctgttaaaaaaagagatgggttttgaaggctttgtaatttccgactgggcggcgcttacgcaattatccggaggcagttataaggcgcagatagcaaacgcaatcaacgcgggcgttgatatggttatggcaactaacggccgcggcagctgggtaagttttataaaatatttacaggaactggttgaggaaggaactgtgccgatggcgcgtattgacgacgcggtactgcgtatcctgcggttcaagcagagcataggtttatttgacacgccgctgacaaaaaaagcaggcgcaatcggaactgaaaaaaaccggacggcggcccgtgcgctcgtcgcggaatctctcgtgcttttacagaataaaaataatgttatcgccaaactgccgtcatataaaaatattctggtagcgggacagggtgcgcgcgatatcggtatgcagtgcggcggctggacaataacatggcagggaaagcacggtcccatcaccaaaggtacaacgattctggaaggcatacaggccgcagtaaaaggcaaggcggatattacatacgccgaaaacggaaggacacagggaacatttgacgctgtgattgccgtaatcggagaaggcccttacgcagaaacagacggagacagactcgataaaatagatatccgcgaaagagatatgagcatgttacgggaagtttacggttatgattgtccggttatcgttatcatgctgtcaggacgtccaatgacaataggtgatgaatataaagagtgggacgcttttattgcggcctggcttccgggcagcgaaggaggcggcattgcggatgtacttttcggcagtaaggattctcggccgatctga

SEQ ID NO: 25192 - protein, 455 aa, Unknown
  Obtained from environmental sample
  DOMAIN (285)...(453): Glycosyl hydrolase family 3 C terminal domain
  misc_feature (1)..(455): Xaa is any amino acid
MGLTRYRTHNVLNAVILPHNAGLGAIAAGDLDRGAKAAYTAGRITAQEMLAAGARWTFAPVLGVAEDVRWGRTYESFSESVNIVTVMGVNVIKGLQDNGAAACMKHFLGEGQTIDGRNQGNALLDRAGIERILPPYRAAIEAGAISLMPSFSGVNGVKMHESKDLLTDLLKKEMGFEGFVISDWAALTQLSGGSYKAQIANAINAGVDMVMATNGRGSWVSFIKYLQELVEEGTVPMARIDDAVLRILRFKQSIGLFDTPLTKKAGAIGTEKNRTAARALVAESLVLLQNKNNVIAKLPSYKNILVAGQGARDIGMQCGGWTITWQGKHGPITKGTTILEGIQAAVKGKADITYAENGRTQGTFDAVIAVIGEGPYAETDGDRLDKIDIRERDMSMLREVYGYDCPVIVIMLSGRPMTIGDEYKEWDAFIAAWLPGSEGGGIADVLFGSKDSRPI

SEQ ID NO: 25193 - DNA, 798 bp, Unknown
  Obtained from environmental sample
  misc_feature (1)..(798): n is a, c, g, or t
atgatcagatcggccgagcagcgtgaaaaaagatttcatcacaatcaaaataaaaaaagaaagccatttttgttctttaaaaaggaagaagaaaaaatagatgaattcttaattgatcaggtaagtataatcatcatgaaaaacacgctgataacttttcaggaaataccggatgatccatttgacggaataagagagaaaattttaagcggtgttggagaaattcgcaaggcgggagtggattatctgacatacgaaatcattgatgcggttatagatgattattttcttgtgttaaatcatattgaagatgatattgaaaattttgaagatcgcgctacaaaaacaagcgatgatatgtttattcaggaactacaggatactaaaaaatatcttttgcaaataaagaaagcaatttctccattaagagaaaatgtttcattaatcttgcatcagaatcaatttcttttaaaaaataaatttaaaccgtttgtacagaatttactggaaaatttacataatgcggaaataactgtggaacattaccgtgaatggttatcaaacataatggatgtaaatttatcggttttgtctcaccagacaaacaaagtaatgaaagtattggcgattatatcgacgatttttatacctttaacttttatagtaggaatatacggcatgaattttgattatatgcctgagttaaggcagcaatggggttacccggctgttttaagcggcatgactcttaccgcaatgataatgataattatttttaaaatcaggcgttggttttaa

SEQ ID NO: 25194 - protein, 265 aa, Unknown
  Obtained from environmental sample
  DOMAIN (10)...(265): CorA-like Mg2+ transporter protein
  misc_feature (1)..(265): Xaa is any amino acid
MIRSAEQREKRFHHNQNKKRKPFLFFKKEEEKIDEFLIDQVSIIIMKNTLITFQEIPDDPFDGIREKILSGVGEIRKAGVDYLTYEIIDAVIDDYFLVLNHIEDDIENFEDRATKTSDDMFIQELQDTKKYLLQIKKAISPLRENVSLILHQNQFLLKNKFKPFVQNLLENLHNAEITVEHYREWLSNIMDVNLSVLSHQTNKVMKVLAIISTIFIPLTFIVGIYGMNFDYMPELRQQWGYPAVLSGMTLTAMIMIIIFKIRRWF

SEQ ID NO: 25195 - DNA, 603 bp, Unknown
  Obtained from environmental sample
  misc_feature (1)..(603): n is a, c, g, or t
atggcgaaggtaaagcttaccaagaatgagcttaaaaagcagaaagattccctgaagatgtaccagcgctatctgcctacgctgatgcttaaaaagcagcagttgcagggggagatacgggtcaccgaaatgcggattaaagaactgcgcagcgaaaaagataagttggatgaagccttcaaaacatgggttgccgtttttggcgagcgctttatttttaccgcggatattctgaagatcagccgcctgaatacggcgcaggggaatattgccggcgtggcgatacctatttttcagggcgccgaatttaccgtcgccccctacgatttggcacgtaaacccctctggcttgacattgccgttgaaaaaatgaaacaggtaatcctccttgaccttgagacgcagatacttgaagaacagcgcaggcggcttgaccgtgagttgcgtataacgactcagcgggtgaatttgtttgaaaaaattaaaatccccgaaacaaagggacatatcaaaaaaatccaggtttatctgggcgatcagcaaacctccgcggtggtgcggggaaaaatcgccaagagcggactggttaaggcggcgcagtaa

SEQ ID NO: 25196 - protein, 200 aa, Unknown
  Obtained from environmental sample
  DOMAIN (2)...(196): ATP synthase subunit D
  misc_feature (1)..(200): Xaa is any amino acid
MAKVKLTKNELKKQKDSLKMYQRYLPTLMLKKQQLQGEIRVTEMRIKELRSEKDKLDEAFKTWVAVFGERFIFTADILKISRLNTAQGNIAGVAIPIFQGAEFTVAPYDLARKPLWLDIAVEKMKQVILLDLETQILEEQRRRLDRELRITTQRVNLFEKIKIPETKGHIKKIQVYLGDQQTSAVVRGKIAKSGLVKAAQ

SEQ ID NO: 25197 - DNA, 564 bp, Unknown
  Obtained from environmental sample
  misc_feature (1)..(564): n is a, c, g, or t
atgataacctcacttgaacaacttcctccgctgctggcggcttcggtcagcgccgaagaaaaaaaatacattacggaaacatgcggacgcggcttgctgccttttgccgtaactgaacatttcgcgtcgcttgccggtcccgaaaaagacgatcccataaggcggcagttttttcccgatccgcgcgaggcgttacgcgatcccttcgcgctggatgatccgttaggcgaaatgctataccgcgccgcgccgcagcttgtccaccagtatcgcgacagggcgctgctgcttgccgcgaatacctgcgccgggtactgccgccattgtttccggcgtttttggctgtccgcgccgccgcccctgtccgctgagtgtctgcggcccgccttcgcctatctggcggcgcacacggaaatccgcgagcttcttgtttcaggcggcgatcctctcacattggacaatgccgcccttgaggatttgttccgccggctgcgcgccgcgcgtcccgatcttatgctgcgcgtgtgtaccagggttcccattacagagccgtcccgcgtttga

SEQ ID NO: 25198 - protein, 187 aa, Unknown
  Obtained from environmental sample
  misc_feature (1)..(187): Xaa is any amino acid
MITSLEQLPPLLAASVSAEEKKYITETCGRGLLPFAVTEHFASLAGPEKDDPIRRQFFPDPREALRDPFALDDPLGEMLYRAAPQLVHQYRDRALLLAANTCAGYCRHCFRRFWLSAPPPLSAECLRPAFAYLAAHTEIRELLVSGGDPLTLDNAALEDLFRRLRAARPDLMLRVCTRVPITEPSRV

SEQ ID NO: 25199 - DNA, 816 bp, Unknown
  Obtained from environmental sample
  misc_feature (1)..(816): n is a, c, g, or t
ttgtccaccagtatcgcgacagggcgctgctgcttgccgcgaatacctgcgccgggtactgccgccattgtttccggcgtttttggctgtccgcgccgccgcccctgtccgctgagtgtctgcggcccgccttcgcctatctggcggcgcacacggaaatccgcgagcttcttgtttcaggcggcgatcctctcacattggacaatgccgcccttgaggatttgttccgccggctgcgcgccgcgcgtcccgatcttatgctgcgcgtgtgtaccagggttcccattacagagccgtcccgcgtttgacacaaataccgttgctctattggcggaatttcgtccgctgagggttgtggtgcatatcaaccacccgcgggagctttcctcgccggccagggcttgtcttggcagttgtgtaggcgctgacattcccgtactggtgcagaccgtgttactgcgcggcattaacgacgagcctgaactgctggcgcaattattcagtgactgccttgaaattggccttttgccgtattacctgttccagcttgatctcgccccgaacaccgcgcatttcagggttccgcttaagcgcggcattgaactatacggcgaacttggcggattaatatccgctccgggcttgccagcctacgcggtagaccttcccggcggcggggggaaaatccgcctgcatgaaaatgtcattgtcggaaaaaaaaatacccctgaaggatatgtttatatactaaaagataataacggaaaagaatggtactatccttcggatgatgtaccagaagattttatttcctga

SEQ ID NO: 25200 - protein, 271 aa, Unknown
  Obtained from environmental sample
  misc_feature (1)..(271): Xaa is any amino acid
MSTSIATGRCCLPRIPAPGTAAIVSGVFGCPRRRPCPLSVCGPPSPIWRRTRKSASFLFQAAILSHWTMPPLRICSAGCAPRVPILCCACVPGFPLQSRPAFDTNTVALLAEFRPLRVVVHINHPRELSSPARACLGSCVGADIPVLVQTVLLRGINDEPELLAQLFSDCLEIGLLPYYLFQLDLAPNTAHFRVPLKRGIELYGELGGLISAPGLPAYAVDLPGGGGKIRLHENVIVGKKNTPEGYVYILKDNNGKEWYYPSDDVPEDFIS

SEQ ID NO: 25201 - DNA, 303 bp, Unknown
  Obtained from environmental sample
  misc_feature (1)..(303): n is a, c, g, or t
ttgcaggaaaacatccgctattttgttttaaaagccaaagaaaaaggctttaacctctgcaaagcaggagaaagcgcgattgcaccggttcttgtaggcaaagattccgacgcttttgatctttctcaagtcatgtttgaaaagggaatttttgttccccctgcagtttaccccgcagtccccgcaaatatgtcgcgtatgcgtttctgccttacaagctgccacaataaaacgcaaatagattccgctcttgacactctgcaggagttagccggcaagatgaacattaatttacggggttag

SEQ ID NO: 25202 - protein, 100 aa, Unknown
  Obtained from environmental sample
  misc_feature (1)..(100): Xaa is any amino acid
MQENIRYFVLKAKEKGFNLCKAGESAIAPVLVGKDSDAFDLSQVMFEKGIFVPPAVYPAVPANMSRMRFCLTSCHNKTQIDSALDTLQELAGKMNINLRG

SEQ ID NO: 25203 - DNA, 531 bp, Unknown
  Obtained from environmental sample
  misc_feature (1)..(531): n is a, c, g, or t
atgaagttggattcttttttaaacaaagtagcaattctggcaaaaaaacgcgattatgaaggcgcattaaacgcccttaaagatgaagaagaaagatattacggttcttttaaatactattacctgtacggaattatatgcctttattacggcaattacgcggaggcgcatgagaattttaatcttgcaagaaaaattaaaataaacgatcccgacttaatgctttgttttgcggttctttatctgaaacgcatggacaccgtacaggccgtacattattatcttgaagtgcaggaacttgaccataaaaataaaatcgcaaaaaaagcccttgccgttatcagaaaatattccgcaggagaggtcctgtccgactggatgacgganaacctctggaaattatttcctcccattccggctccttccgttacgccaaaggcaattttaaatattttactaataaccgccgcgggctgttatttttgttttaggaatacttataaccgtaaaagtattacccagcccttttaa

SEQ ID NO: 25204 - protein, 176 aa, Unknown
  Obtained from environmental sample
  misc_feature (1)..(176): Xaa is any amino acid
MKLDSFLNKVAILAKKRDYEGALNALKDEEERYYGSFKYYYLYGIICLYYGNYAEAHENFNLARKIKINDPDLMLCFAVLYLKRMDTVQAVHYYLEVQELDHKNKIAKKALAVIRKYSAGEVLSDWMTXNLWKLFPPIPAPSVTPKAILNILLITAAGCYFCFRNTYNRKSITQPF

SEQ ID NO: 25205 - DNA, 963 bp, Unknown
  Obtained from environmental sample
  misc_feature (1)..(963): n is a, c, g, or t
ttgcctgttggttttcagctcataggggacgctttctcagaggaaaaactcgtaggagccgcgcagggtttatcaacaccgcacagatcaccatacaaaaaagcccggaggaaaagcggtatgagttgggaaatagttatgggtttggaagtccacgccgaattgtcaacaaagtcaaagattttttgtggctgcaccacggattttggcggtgagccgaacactcatgtatgccctatttgttccggtatgccgggcgttttgccaaagctgaaccgcaacgtagtggaatatgctatgcggctcggcattgcgctcaactgcgctatcacgagatatggcaaatttgaccgcaaaaattacttttatcccgatttgccaaaagcctatcaagtatctcaactctatgccccaatttgcactaacggaaatatggaaatagaaatagatgggcaaaaaagaccaataagaatacgcgagatacacatggaagaggatgcgggcaagttagttcacaatccgcaaaacggtaatacctatatggatttcaaccgctgcggcgttcctctcttggaaatagtatcacaacccgattttagaaacagcgaagaggttatcgcttatctagaaaaactgcgggaaactttgctttatttgggtatatgcgattgcaaaatgcaagagggttcaattcgtgcggacgtgaacctttcggttcgtcaaacgggcggtgaattgggtgtgcgcaccgagatgaaaaacctgaattcatttaaagcgatagcccgtgccattgcgtgtgagtctgcgcgccaaattggagttttagaaggcggtgggaaaattgagcaaganacacgccgctgggacgatgacaaaggcatctcctatgccatgcgttccaaagaggatgcgcacgattatcgttatttccctgaacctgattatgcccatcaagggtga

SEQ ID NO: 25206 - protein, 320 aa, Unknown
  Obtained from environmental sample
  DOMAIN (41)...(279): PET112 family, N terminal region
  misc_feature (1)..(320): Xaa is any amino acid
MPVGFQLIGDAFSEEKLVGAAQGLSTPHRSPYKKARRKSGMSWEIVMGLEVHAELSTKSKIFCGCTTDFGGEPNTHVCPICSGMPGVLPKLNRNVVEYAMRLGIALNCAITRYGKFDRKNYFYPDLPKAYQVSQLYAPICTNGNMEIEIDGQKRPIRIREIHMEEDAGKLVHNPQNGNTYMDFNRCGVPLLEIVSQPDFRNSEEVIAYLEKLRETLLYLGICDCKMQEGSIRADVNLSVRQTGGELGVRTEMKNLNSFKAIARAIACESARQIGVLEGGGKIEQXTRRWDDDKGISYAMRSKEDAHDYRYFPEPDYAHQG

SEQ ID NO: 25207 - DNA, 747 bp, Unknown
  Obtained from environmental sample
  misc_feature (1)..(747): n is a, c, g, or t
ttgctcgctgccttatggggctcaatttttgaaaccgagaaaattaatgaagaagaactgagcaaactacgcgaacaagacacgctttccgttatgatggaggattttggaaaagccttccccgaaatcaagcgaattttgataagcgaaagagaccagtttttggcgggcagaattttaaaagcagagggcaaaaaagttttggctgttataggggcggggcatttgcaaggcattaaaaacatcattgaaagcgggcaagaaattccgccggaagaagagctttgcaaaatcccaccgccgagcaagctatggcttaccataggttggctgatacccgctattattatctcgtccttaatttacataggcgttcaacggggcgcagatgaagtagcggactccctctatctttgggtgctctgcactggagttctcgccgcagccggtgctgtttgcgcacttgctcatccctttgctataatagcagctttgttcatagctccgcttacaggtttaacccctttaatcggcgttggagtgttcaccgcattcattcaggcatatttttgcccaccgagaatttccgaaatggaaaccgccgcagaagacatttggaaattgagccgctggtggaaaaacagattcacaagggtcattctggcttttattgtccctgggcttttcgcagctccaggcaagttcattttctttgcaaaaatcggcaaaaccattagcgaggggtga

SEQ ID NO: 25208 - protein, 248 aa, Unknown
  Obtained from environmental sample
  DOMAIN (1)...(91): TraB family
  misc_feature (1)..(248): Xaa is any amino acid
MLAALWGSIFETEKINEEELSKLREQDTLSVMMEDFGKAFPEIKRILISERDQFLAGRILKAEGKKVLAVIGAGHLQGIKNIIESGQEIPPEEELCKIPPPSKLWLTIGWLIPAIIISSLIYIGVQRGADEVADSLYLWVLCTGVLAAAGAVCALAHPFAIIAALFIAPLTGLTPLIGVGVFTAFIQAYFCPPRISEMETAAEDIWKLSRWWKNRFTRVILAFIVPGLFAAPGKFIFFAKIGKTISEG

SEQ ID NO: 25209 - DNA, 510 bp, Unknown
  Obtained from environmental sample
  misc_feature (1)..(510): n is a, c, g, or t
atgatttatgagaaatgcagagatatcctgttacaggaatgtgaattgattcaaactgcggtcaatgaacaggaaaagatacgccaggctgtttcaaaccgcgattgggctgtctttgaagatcatttaacaattatgaactcaatcgaaaacaagatagtatctctggaaaaaaagcgcgaacagctttttatcgtttttaaaacgcttatacatcaacagagtttttctgaaaatcttgactcaaaagggcagttcttcgcactggtttcggttcttcctgaaaatcaacgcgatgaattgtcggctatctatcttagcctgaaacaagaagctataaagttacgcacggcgaatgaaatgttattcgcctatttgtcgggaattaaatcgacattaaaagatttttttgatctggcgttccctgaacgcggcggaaaattgtacacaaaagatggaatgcatttttcaaatgatatgcacagtatgttgttaaaccgcagtttttaa

SEQ ID NO: 25210 - protein, 169 aa, Unknown
  Obtained from environmental sample
  misc_feature (1)..(169): Xaa is any amino acid
MIYEKCRDILLQECELIQTAVNEQEKIRQAVSNRDWAVFEDHLTIMNSIENKIVSLEKKREQLFIVFKTLIHQQSFSENLDSKGQFFALVSVLPENQRDELSAIYLSLKQEAIKLRTANEMLFAYLSGIKSTLKDFFDLAFPERGGKLYTKDGMHFSNDMHSMLLNRSF

SEQ ID NO: 25211 - DNA, 1665 bp, Unknown
  Obtained from environmental sample
  misc_feature (1)..(1665): n is a, c, g, or t
atggccgagggatcttacaaagggaaaacctataccatttccgccgtttcgcgcaacatccataatgaaatcccggacaaggtgcggataacctattttctgtcggacaggctcaaggccatacaccctatgccgggcgaaattgaagactttttaaaagaatacgcggggttttccaggggaaaaattcaattctcagtcaaagacccggcaaaggccaggcttgcggaggtggtggaacagcttggcattatcccccagcagatacggacggttgaacaggatcaggccagcgtcgtcaccgtatataccggcattgtgatagagtaccttgacgatatacaggttatgcccgtggtgttttcccttgagactcttgaatacgatttaacctcgcgtatccgttcaatggcgcggggcagttcccgcatcctgggcgttctttactcgggcgatccccgcagtttcagcgagaactaccggtacctgatgaattcctttgtacagtccggctaccagatcaggttattaaacccgggagaagaaatccccgaaacggttcccgccattatcgcgcttgacggcgttgaaggttttgacgaggccgccctgtaccaactggacagatttattcaaaacggcggaaaggccttttttaccgttaagggcgtccatataaatatcgacggcgaccttggagcccggcccgtatatgacagaggccttctggaaatgctttcctcttacggcgtaacggcgcttcccgaaatcgtaatggacaggacggctctgatgatgcaataccaaaccgcctcgccttcgggcgccgttcaggtaaggataacgcgttatccgcagtggatccgcgtgttaggcgaaaacggaaatcccgcgcatcctgccagtgccaatttcagcggactggatatgtattgggcaagcccccttgaattgcatgaagtggcaggcgtcgatgcggtccccttgtttaccaccacaaatgaggcgtggtcaatgagggagccgttttatacaagccctgaaatacccatgatgttcagcaaggactcaagtattaccgcgggcgcgaagattcttggcgtgagcctgacggggactttcccctcatggttcgccggaaaaccaaaacccgaacaggaggacggttcccagcttcctgacatgcccgccgaagccaaaccttcgcggcttataatcgctggcgacacggattttgccacgtcgtttatgaatgtcacggatgcccagagcaatatagacttcttcatccaggctgccgactggatgagcaacgatgatgacatcatcggaatacgctcaaaggaatcgcgatccaacaggcttgacaggataattgatcctgaaaaaaggtcagccgctatgcgcttcgcgcagattgtaaatgttttccttattcccttgctggttataatcgcgggtcttttgctcgcctggaggcggcgtacccagggtacgagtagcaaaggtacgcgcgccggcatgcgcggtgcgccagtaggcggtgcgccagtaggcggcgcgccagtaggcggcgcgccagtaggcggcgcgccagtaggcggcgcgccagtaggcgcgaagataaaggagaacggaaggaaggagccgcaaaatgacgtataa

SEQ ID NO: 25212 - protein, 554 aa, Unknown
  Obtained from environmental sample
  misc_feature (1)..(554): Xaa is any amino acid
MAEGSYKGKTYTISAVSRNIHNEIPDKVRITYFLSDRLKAIHPMPGEIEDFLKEYAGFSRGKIQFSVKDPAKARLAEVVEQLGIIPQQIRTVEQDQASVVTVYTGIVIEYLDDIQVMPVVFSLETLEYDLTSRIRSMARGSSRILGVLYSGDPRSFSENYRYLMNSFVQSGYQIRLLNPGEEIPETVPAIIALDGVEGFDEAALYQLDRFIQNGGKAFFTVKGVHINIDGDLGARPVYDRGLLEMLSSYGVTALPEIVMDRTALMMQYQTASPSGAVQVRITRYPQWIRVLGENGNPAHPASANFSGLDMYWASPLELHEVAGVDAVPLFTTTNEAWSMREPFYTSPEIPMMFSKDSSITAGAKILGVSLTGTFPSWFAGKPKPEQEDGSQLPDMPAEAKPSRLIIAGDTDFATSFMNVTDAQSNIDFFIQAADWMSNDDDIIGIRSKESRSNRLDRIIDPEKRSAAMRFAQIVNVFLIPLLVIIAGLLLAWRRRTQGTSSKGTRAGMRGAPVGGAPVGGAPVGGAPVGGAPVGGAPVGAKIKENGRKEPQNDV

SEQ ID NO: 25213 - DNA, 549 bp, Unknown
  Obtained from environmental sample
  misc_feature (1)..(549): n is a, c, g, or t
atgtcaaaaaaattagagcgccttttggaacttgaagccaataattttagcggctacgaagtttccgaactggagcttcgtgtcaatcgcaaagtaggcgatctgtgtatcaagggggttatcgatcgcgtctctgtttcgcctgacggcgctcccgtcattatcgattacaagactggcaatcttccgaaacaaacggaggcgaaagacctgccggaaaatccccttttggaatttcagatgccgctttacataaagctttacgaagagagggcagaggccaaagaagaagcctcgcaaagagtacagggcgcttttttctacagcgtgaacgacagaaggatcaagtccgaggtggggaagacagcaggtggaaaaagcaaaactccaagtcgcgaagagtacgaacctttccttgaagcggcggaaaaacaaatcgaagaatttggccgaaaggtgaaggcccttgatttcactccacacgaaatacgattcggggattgccttaaatgcaagtacaggaccatatgcagaacggtgtatttttag

SEQ ID NO: 25214 - protein, 182 aa, Unknown
  Obtained from environmental sample
  misc_feature (1)..(182): Xaa is any amino acid
MSKKLERLLELEANNFSGYEVSELELRVNRKVGDLCIKGVIDRVSVSPDGAPVIIDYKTGNLPKQTEAKDLPENPLLEFQMPLYIKLYEERAEAKEEASQRVQGAFFYSVNDRRIKSEVGKTAGGKSKTPSREEYEPFLEAAEKQIEEFGRKVKALDFTPHEIRFGDCLKCKYRTICRTVYF

SEQ ID NO: 25215 - DNA, 1140 bp, Unknown
  Obtained from environmental sample
  misc_feature (1)..(1140): n is a, c, g, or t
ttgggagccgccgtcgttattgccgtgtttatgcttatcattgtaacccgcagactgacaaatcccctgagacgggttgttaatacgatggaatccataattgaaacggctgatctttcgtccaaagttgaggtagagtataacgatgaaaccggcattcttgcgcaaaccttcaataatatgacgggagaactcgacagggcgtattcgcagataaagcgttatgcgtttgacgccgttcttgccggtaaaaaagaagagcgtatccgtcagattttccaaaaatacgtgccgaatgacgtaatcgaacgcttcttcgcctcccctgaaaaaatgcttgtcggcgataaccgcaggctttcaatacttttctccgacatccgctcctttaccactatttccgaaggaatggcccctgatgatttagtcaactcccttaaccgctatttttcggggcaggttgacattatctataacaggaagggaatagtagacaaatacataggtgacgcaatcatggctatctggggagcccccgaaaaacacgaggatgacgcgttacaatccgtactgtccgctcttgaaatgacggacgcggttttaaagttcaatgaaaaccagcgcaaacttggcaaatgtgaatttaaaataggagtcgggataaactatggcgaagtcacggtcggcaatatcggaagcgagcgcaagatggattacacggtaataggggacgcggtaaatttagcgtcacggatggaaggattgacaaaaacttatcattcggaaatattgatttcagaaagcctgtttgaagaactgagaaaaacttcacctaatgcgggcttgaattacaggcttcttgacaccgtggccgtaaagggaaaaaccaagggggtgaaaatcttcacggtaaaaaaatccctgtcgccggcggagcaaaaagcgtggccttcgcacaatcagggaatgaagctttattattcgcgttcctttaccgaagcggcgcaaaaatttaaagaggcgcttgaagctttacccgatgattttaacgctgacaatttgtataaaaggtgtgtggaatacgccggtgcgccgccgcccgccgactggaacggcgttgaagtaatgaaaactaaataa

SEQ ID NO: 25216 - protein, 379 aa, Unknown
  Obtained from environmental sample
  DOMAIN (1)...(67): HAMP domain
  misc_feature (1)..(379): Xaa is any amino acid
MGAAVVIAVFMLIIVTRRLTNPLRRVVNTMESIIETADLSSKVEVEYNDETGILAQTFNNMTGELDRAYSQIKRYAFDAVLAGKKEERIRQIFQKYVPNDVIERFFASPEKMLVGDNRRLSILFSDIRSFTTISEGMAPDDLVNSLNRYFSGQVDIIYNRKGIVDKYIGDAIMAIWGAPEKHEDDALQSVLSALEMTDAVLKFNENQRKLGKCEFKIGVGINYGEVTVGNIGSERKMDYTVIGDAVNLASRMEGLTKTYHSEILISESLFEELRKTSPNAGLNYRLLDTVAVKGKTKGVKIFTVKKSLSPAEQKAWPSHNQGMKLYYSRSFTEAAQKFKEALEALPDDFNADNLYKRCVEYAGAPPPADWNGVEVMKTK

SEQ ID NO: 25217 - DNA, 423 bp, Unknown
  Obtained from environmental sample
  misc_feature (1)..(423): n is a, c, g, or t
atgaaaaaatacattctttcgctggatcaggggactacaagctcccgggcgattctttttgatcatgagcaaaatatcaccgctgtggcgcagaaggagtttacccaaatttatccgtgtgaaggctgggtggagcatgatcctatggaaatattctccacccaatactccgtgatgactgacattatcacgaaagcgaatataaaagcgaatgatattgccgccatcggtataacaaaccagcgtgagacgacaattctatgggataaaaatacgggcaagccaatttataacgcgattgtgtggcaatgcagaagaacgtcttcaatttgtgacgcgcttgtaaaagacggacttggcgatcatataaaaaaaactacggggctcattcacgacgcttatttttcagggactaaaatttaa

SEQ ID NO: 25218 - protein, 140 aa, Unknown
  Obtained from environmental sample
  DOMAIN (4)...(140): FGGY family of carbohydrate kinases, N-terminal domain
  misc_feature (1)..(140): Xaa is any amino acid
MKKYILSLDQGTTSSRAILFDHEQNITAVAQKEFTQIYPCEGWVEHDPMEIFSTQYSVMTDIITKANIKANDIAAIGITNQRETTILWDKNTGKPIYNAIVWQCRRTSSICDALVKDGLGDHIKKTTGLIHDAYFSGTKI

SEQ ID NO: 25219 - DNA, 1380 bp, Unknown
  Obtained from environmental sample
  misc_feature (1)..(1380): n is a, c, g, or t
ttgactcacgcggcgccgccgaagatcgcctccgcacgcgtcgtcgtcctcaagggcgatatcaacgaaggcgaatttcagaagataaagagctactgcataaatcacgtggactcccgcgaggcctcgcttgacaaacctgcaagtctcgatatgcgcgtcgagacgcctccggacgtggaggtgcttggcgggttcattggtatggatagcgacggggttgatagagtaaggcaaaacttaggcttggccatgaagaacgacgacctcctcttctgccagcgctacttccgcgacaccgagaaacgcgaccccacaataacggaggtgcgcgtcctagatacctactggtcggaccactgccgccacacaaccttcctcaccgccgtcaagagcgtggagatagaggaaacggcgctcaacgaaccggtaagggcggcgtttgatacatacatgcgcgcccgcgattacgtctacggcgccgacggcgcggacgcccgcgacgtgtcgctgatggacatagccctactgggtatgagggaactgcgtaagaaggggttgcttaacgatttggacgcctccgacgaggtgaacgcttgcagcatcgtcgttccggccgtcgtggacggcaaaacggaggattggcttgtgatgttcaagaacgagacgcacaaccatcccaccgagatagagcctttgggcggcgcggcgacctgtttgggcggcgcgatacgcgacccgctctccggacgctcctacgtctatcaggctatgcgtgtgaccggcgccggcgacccgcgcgccgccgtcggcgagactttgcagggtaagctgccgcagcgcaagatcaccacgctcgccgcgcaggggtacagctcctacggcaaccaaatcggcatcgccacaggcatagtgtccgaggtgtaccacaagggttacgtcgccaagcgtatggagataggcgcggtggtaggagccgttcccaaatcaaatgtggcgcgccgtgttccggaagccggcgacatagtcgtgctgctcggcggcaggacggggcgggacggttgcggcggggcgaccgggtcgtccaaggagcacaacgaggagtccatacagacctgcggcgcggaggtgcaaaagggcaacgctcccaccgagcgcaagatacagcgcctcttcagagatccggaagtgggcaggatgatccgccgttgcaacgacttcggcgccggcggggtggcggtggccatcggcgaattggccgccggactcgacatctacctcgacgccgtccccaaaaagtacgaggggctcgacggaacggaactcgccatctccgagtcgcaggagcgtatggcggtggtgatcggccagtcggattga

SEQ ID NO: 25220 - protein, 459 aa, Unknown
  Obtained from environmental sample
  DOMAIN (168)...(328): AIR synthase related protein, N-terminal domain
  misc_feature (1)..(459): Xaa is any amino acid
MTHAAPPKIASARVVVLKGDINEGEFQKIKSYCINHVDSREASLDKPASLDMRVETPPDVEVLGGFIGMDSDGVDRVRQNLGLAMKNDDLLFCQRYFRDTEKRDPTITEVRVLDTYWSDHCRHTTFLTAVKSVEIEETALNEPVRAAFDTYMRARDYVYGADGADARDVSLMDIALLGMRELRKKGLLNDLDASDEVNACSIVVPAVVDGKTEDWLVMFKNETHNHPTEIEPLGGAATCLGGAIRDPLSGRSYVYQAMRVTGAGDPRAAVGETLQGKLPQRKITTLAAQGYSSYGNQIGIATGIVSEVYHKGYVAKRMEIGAVVGAVPKSNVARRVPEAGDIVVLLGGRTGRDGCGGATGSSKEHNEESIQTCGAEVQKGNAPTERKIQRLFRDPEVGRMIRRCNDFGAGGVAVAIGELAAGLDIYLDAVPKKYEGLDGTELAISESQERMAVVIGQSD

SEQ ID NO: 25221 - DNA, 1029 bp, Unknown
  Obtained from environmental sample
  misc_feature (1)..(1029): n is a, c, g, or t
gtggtgagtctgcttattctcgcggccgcttatttcgccagcctgctgatgcatttaatggtggctgatttatcactgcgcgccggcagcggtcaaatcatcgtcgtgtttgaaagattcctgttcaggggaagatttaaaaaagtattgactatcgcttttttcggcatggtcaccgtagtaatgcttacaacactggccacctatatcaccggcgcgggtgaaattattgcctcgcgtctggataccggcccgtttttaagccgtcttatcttttatgtggcggcaaccagcgtcgtggtgttcgggcttaaagcggtcggcatcagcgaaaaaatagccgtatttgttatctttgtgctgattgcggttttcgccgccgcgtcttttctcaatatcaaaaacccgcttcctttggcgcccggcggatggaaagaagcccttgcgtatttcggtatggctatgttctcatttgtggcgtttttctccgtgcctcaggcggtagaaggtttggaaggcgatgtaaaaaagattcataaagcgctcattataggttttataaatattttcattatgatttttatcataaccctttgcgcgctgctctcatcagccgaagttaccccgcttgccatgattggatggagcgccggtataggagcatgggcgcagatcgcgggagccgtatttacgcttgtggcgatgattacaacttattggtccatctcgcttgcgttagctgatataataagggagcagaccaaacttaacagaattatctgctggctcatcgccactgtcccgaccctgctgttgaccctgctgggacagggcggatttatggagtttgtgagatttgcgggcggtttgaacgccatacttattgccgtattgcttgtcccgacttttcttggcgccaaccgtgaagggccgacccgccttatgggcagattcgcgtcgccgcccatgctgattctcatagcgctgacgtacattcttatggcgattggcagcgcggtacagttgtga

SEQ ID NO: 25222 - protein, 342 aa, Unknown
  Obtained from environmental sample
  SIGNAL (1)...(21)
  DOMAIN (1)...(338): Tryptophan/tyrosine permease family
  misc_feature (1)..(342): Xaa is any amino acid
MVSLLILAAAYFASLLMHLMVADLSLRAGSGQIIVVFERFLFRGRFKKVLTIAFFGMVTVVMLTTLATYITGAGEIIASRLDTGPFLSRLIFYVAATSVVVFGLKAVGISEKIAVFVIFVLIAVFAAASFLNIKNPLPLAPGGWKEALAYFGMAMFSFVAFFSVPQAVEGLEGDVKKIHKALIIGFINIFIMIFIITLCALLSSAEVTPLAMIGWSAGIGAWAQIAGAVFTLVAMITTYWSISLALADIIREQTKLNRIICWLIATVPTLLLTLLGQGGFMEFVRFAGGLNAILIAVLLVPTFLGANREGPTRLMGRFASPPMLILIALTYILMAIGSAVQL

SEQ ID NO: 25223 - DNA, 678 bp, Unknown
  Obtained from environmental sample
  misc_feature (1)..(678): n is a, c, g, or t
atgtttggtaaaataaaagaaaaaacttttcgcccttccgcagttatttttgacatggacggtcttatgtttgacacggaaaatctgacaattcctttttggggcgttgcgggtaaaccgtttgggtatgacataacttatgacattgttcttcgcatggtggggataagcgccgaaaaagcgcgattggttatgcaagaagaattcggcgcagattttccttatgacgctattcgcgataaattcagagagattgtaaaagaagaagttgaaaaaaacggagtccccattaaacccggtcttatgtttttgcttgatcgtctttccgccgcaaatatacctcttggagttgcgacttcttcccgaaacgccacggcggttaatatgctcactaaagccggtataatcgaccgttttgcggctcttacctgcggggacgaaatgtccaacggaaaacccgcccccgatatttttcttcttgcggcgcaaaaactggggcagccgccttccgtctgtgtcggttttgaagattcgcctccggggcttcaggggctgcacgccgcagggatacggtcaatttttattaaagaccttcttgagccttcaaaggaaatccttgccaccgtttggcataggtgtaaggatttgaaggaagctgcgaggtatttgaagatttga

SEQ ID NO: 25224 - protein, 225 aa, Unknown
  Obtained from environmental sample
  DOMAIN (12)...(198): haloacid dehalogenase-like hydrolase
  misc_feature (1)..(225): Xaa is any amino acid
MFGKIKEKTFRPSAVIFDMDGLMFDTENLTIPFWGVAGKPFGYDITYDIVLRMVGISAEKARLVMQEEFGADFPYDAIRDKFREIVKEEVEKNGVPIKPGLMFLLDRLSAANIPLGVATSSRNATAVNMLTKAGIIDRFAALTCGDEMSNGKPAPDIFLLAAQKLGQPPSVCVGFEDSPPGLQGLHAAGIRSIFIKDLLEPSKEILATVWHRCKDLKEAARYLKI

SEQ ID NO: 25225 - DNA, 369 bp, Unknown
  Obtained from environmental sample
  misc_feature (1)..(369): n is a, c, g, or t
ttgtccgaagtattactgatactggacgatcaaataaaaaactacggcggaatatacggaatcagagacatcaatttattgagttccgctatatatatgcctgaatcaagttttgaagggcaatatttacatgaaacaattccggctatggctgccgcttatgcgtttcatatttgtcaaaatcacccgtttattgacggaaataaaagagttgctttggcaagttcattggtatttttagatataaatggatacgaattattttgtaaagatgaaacattatacaataaaataatggatatggcgaaatgcgaaataaaaaaggaagaattgataaaattttacgaaaaacattcaagaaataaatag

SEQ ID NO: 25226 - protein, 122 aa, Unknown
  Obtained from environmental sample
  DOMAIN (1)...(115): Prophage maintenance system killer protein
  misc_feature (1)..(122): Xaa is any amino acid
MSEVLLILDDQIKNYGGIYGIRDINLLSSAIYMPESSFEGQYLHETIPAMAAAYAFHICQNHPFIDGNKRVALASSLVFLDINGYELFCKDETLYNKIMDMAKCEIKKEELIKFYEKHSRNK

SEQ ID NO: 25227 - DNA, 996 bp, Unknown
  Obtained from environmental sample
  misc_feature (1)..(996): n is a, c, g, or t
gtggaatccggagataatgccgaaaaaatctacgtggagacgggaagcgacatggcatacatctatacggcggattcaaatgatgtgcgctctgaaggaatgtcctatggcatgatgatgtgcgtacagatgaatgatcaagcgagattcgacaaactctggaaatgggcaagaacctatatgtacaacactgtaaacaatggcagcaataacaggggttatttttcatggcaatgcaggacagacggcagtaaaattgatcaaggtcccgcccctgacggagaggaatactttataacggcgctgttgttcgcgcacgcccgctggggaagcagttcatcaggcataaataattacgcgcaggaagcaaggcagataatctatgatttaacgcgccgtaaaccggggaacggagatcctaatggcgagccttcaatgtttaatacggacaattatatggtaagattcgccacacttggaaattccgcaaaatttacagacccctcatatcatttaccggcattctatgaagtttgggcattggaattacaagcggactatgataatagtaaactttacggtatctggtctgataaggctgacctgaagaaagacattgattactttaaacaagcggcgagtacaagccgtgcattctttgcaaaaactacgcatgctacaacgggacttggccctgattatgccgagtttgacggatcgcccagaaatgaaggggatcataagcatttcgagtatgacgcatggcgtattgcgatgaacatcggcatggactacgcatggtgggcagcagatccctggcaaataatatttgccaatagaattcaagcgttctttgtaagtaaaggagttactacatacggaaaccggtggacattggatgggactcagcgtggagcggatcattcaccgggactggttggctgtaattcggtcgcgtccctggcggcgacacatgagaacgcgtggaaattatga

SEQ ID NO: 25228 - protein, 331 aa, Unknown
  Obtained from environmental sample
  DOMAIN (1)...(330): Glycosyl hydrolases family 8
  misc_feature (1)..(331): Xaa is any amino acid
MESGDNAEKIYVETGSDMAYIYTADSNDVRSEGMSYGMMMCVQMNDQARFDKLWKWARTYMYNTVNNGSNNRGYFSWQCRTDGSKIDQGPAPDGEEYFITALLFAHARWGSSSSGINNYAQEARQIIYDLTRRKPGNGDPNGEPSMFNTDNYMVRFATLGNSAKFTDPSYHLPAFYEVWALELQADYDNSKLYGIWSDKADLKKDIDYFKQAASTSRAFFAKTTHATTGLGPDYAEFDGSPRNEGDHKHFEYDAWRIAMNIGMDYAWWAADPWQIIFANRIQAFFVSKGVTTYGNRWTLDGTQRGADHSPGLVGCNSVASLAATHENAWKL

SEQ ID NO: 25229 - DNA, 417 bp, Unknown
  Obtained from environmental sample
  misc_feature (1)..(417): n is a, c, g, or t
atgcaggaaaggctccttaccgagaaaaaatttgacgccggcggaaacgtgaagtttgccgatgtgggagtttatttgaaggacaggatagccggttattttgaagagaagaagatagaaatcaatttgaagtatatcgatccaagttatgttatacgctccgcgcccgcgaacccgtcagactcaatttactgcgaaaggttggggaacgcagcagcccatgcggcaatggcgggcaaaaccaagcttatcgtcggccttgtacacaacgagtttgtgcatttgccggttagggtggttattgatcaccgagcccaggtagacccggaaagtaatctttggcgcgatactctggacgccacccatcagcctgcgctaatggtaaacaagtttggggacagcgagtttaagaaataa

SEQ ID NO: 25230 - protein, 138 aa, Unknown
  Obtained from environmental sample
  misc_feature (1)..(138): Xaa is any amino acid
MQERLLTEKKFDAGGNVKFADVGVYLKDRIAGYFEEKKIEINLKYIDPSYVIRSAPANPSDSIYCERLGNAAAHAAMAGKTKLIVGLVHNEFVHLPVRVVIDHRAQVDPESNLWRDTLDATHQPALMVNKFGDSEFKK

SEQ ID NO: 25231 - DNA, 378 bp, Unknown
  Obtained from environmental sample
  misc_feature (1)..(378): n is a, c, g, or t
atgaaaatatttatagaaagaaaacgtcaaattattatatcattggtaatatttttcataaattattttttggacaggcttacaaaatgcattgcggttgaatacttgaaaggaaatggatcaaaaagttttttttataatttttttgttttggtttatgcggaaaataccggcgcatttttaagtttgggcagaaattggaatatttacataaaatatgccgtgttacttattatcccgatatttatatgtataacaggattattgtattttatggttaaagagaaaaaaaattatcgtataataatatgttcttgtataattggcggcggaaattgggaattagcggacagattatttaatggatttacggtatag

SEQ ID NO: 25232 - protein, 125 aa, Unknown
  Obtained from environmental sample
  misc_feature (1)..(125): Xaa is any amino acid
MKIFIERKRQIIISLVIFFINYFLDRLTKCIAVEYLKGNGSKSFFYNFFVLVYAENTGAFLSLGRNWNIYIKYAVLLIIPIFICITGLLYFMVKEKKNYRIIICSCIIGGGNWELADRLFNGFTV

SEQ ID NO: 25233 - DNA, 750 bp, Unknown
  Obtained from environmental sample
  misc_feature (1)..(750): n is a, c, g, or t
ttgtatgacttcccatgccctgtaacgcttgggaaaaatacgccttcttttgggcttcatcgctttaagcagggtttgcggtttgttcctactgatgatgaagggtttacgctgcgtggcgataaacagcggcttgtctacaaagggcggcggcgttcccatcggtttacgatacttggcgatactgcttttgaatacgattgtatattagaacgtgagccggaaagcaatgtcatttcattgcgtatggaaggcgcagaaaactttgatttttttcggcagccggattttgtaaaagagccttttttgaaggggtcttatgccgtctacaaaaaggaaaagctagttggcgaagggacaggaaagctatgccatattcacaggccggaaataattgacgcaagggggcggcggtgttggggcgatttatttgttgttggaaatgagttacgcataactataccagaaaactggcttgctgaagctaagtatccggtgattgtcgatcctacgattggttcttcctctattgggagccagataacaagggtagatccaaataacaacggttatgaccgtcctaaattggataatgaatttgcgcttaccaaatatcttgtaccgcaaactggcagcggttcgtgtaatgcatatgtatatacctatgacgatgattgtgattgggctttaagaccatgcatttacactaacgtgaacaataagccatatgcgaggaaatctcaggaatga

SEQ ID NO: 25234 - protein, 249 aa, Unknown
  Obtained from environmental sample
  misc_feature (1)..(249): Xaa is any amino acid
MYDFPCPVTLGKNTPSFGLHRFKQGLRFVPTDDEGFTLRGDKQRLVYKGRRRSHRFTILGDTAFEYDCILEREPESNVISLRMEGAENFDFFRQPDFVKEPFLKGSYAVYKKEKLVGEGTGKLCHIHRPEIIDARGRRCWGDLFVVGNELRITIPENWLAEAKYPVIVDPTIGSSSIGSQITRVDPNNNGYDRPKLDNEFALTKYLVPQTGSGSCNAYVYTYDDDCDWALRPCIYTNVNNKPYARKSQE

SEQ ID NO: 25235 - DNA, 462 bp, Unknown
  Obtained from environmental sample
  misc_feature (1)..(462): n is a, c, g, or t
atgggtttgtttagttctataaatattgcggctacggggatgagcgccgacagggttcggatggacgttatatctgataacatggcaaacgtgaacaccacgcgcacggcggagggcggtcccttccgcagaagcagagtgattatgcggccccgtgtggaaagcccttattggcgctcgccgtttctccctcaatctcttgacaatggcatagggcgcggggtgcgcgtggcagagattcagaaggacacctcaaaaccgaatcccctgcgctatgatcccactcacccggacgccataaaatcaggccccagggaagggtatgtcgaactgccaaacgtggacatagtcaccgaaatggtggacatgatttccgcctcccgttcctacgaggcgaacgccgcggtaattgaaggctcaaaggcgatgttccaaagagcgttgagcattggcggcagataa

SEQ ID NO: 25236 - protein, 153 aa, Unknown
  Obtained from environmental sample
  DOMAIN (7)...(37): Flagella basal body rod protein
  misc_feature (1)..(153): Xaa is any amino acid
MGLFSSINIAATGMSADRVRMDVISDNMANVNTTRTAEGGPFRRSRVIMRPRVESPYWRSPFLPQSLDNGIGRGVRVAEIQKDTSKPNPLRYDPTHPDAIKSGPREGYVELPNVDIVTEMVDMISASRSYEANAAVIEGSKAMFQRALSIGGR

SEQ ID NO: 25237 - DNA, 303 bp, Unknown
  Obtained from environmental sample
  misc_feature (1)..(303): n is a, c, g, or t
atgaaaatagacgatccacgggtaaatataaatctcgcggagcttgcgggcgccctggccatgaccgatgatccggccctgatcagggaattcctctactgcctcctgacccccgcggaaatagcggacattgccgcgcgctgggccctggtaaaagaactgaaacgcagaacgccccagagggatatagccaaagaccttggcatttccctatgcaaaataacccgcggctccagggaacttaaaaaacccgactcggcttttcagcgtatgctggcggcgcaggagagcgacccctcatga

SEQ ID NO: 25238 - protein, 100 aa, Unknown
  Obtained from environmental sample
  DOMAIN (10)...(96): Trp repressor protein
  misc_feature (1)..(100): Xaa is any amino acid
MKIDDPRVNINLAELAGALAMTDDPALIREFLYCLLTPAEIADIAARWALVKELKRRTPQRDIAKDLGISLCKITRGSRELKKPDSAFQRMLAAQESDPS

SEQ ID NO: 25239 - DNA, 588 bp, Unknown
  Obtained from environmental sample
  misc_feature (1)..(588): n is a, c, g, or t
gtggaatctttgggtaataagctgaaagaagcaagggaagcaaaaggcctgactttcgagaacgccagccgcgatacgaatatttcttccaaatttctggaagccctggaaaaggaagattattcgccgtttcccggagagccttatgtactgggttttctcaaaaattatggggaataccttggccttgatcccgaagagcttttatccctttaccgttccataaagatcagggaacagcctgtaccggtagatcaactgctaagaaacccttcgcatcttccaaaaattttagggaggcttgcgatatgccttgttctgctgactattgcaggcggggcaggatactatatttaccgtttgccaaaaaaagctgatgtctcccaacaggcggcaaggacagcctcggagtatatgctgaacaatgatttttttgagcgtaggctgtaccctggagattccattctggttgttgaaggatctgattcctataaactggtattttccggtataagcgatgctataaccattactacccccagaggacctattatgcttgatctgggccaggaagtaactgtcgattaa

SEQ ID NO: 25240 - protein, 195 aa, Unknown
  Obtained from environmental sample
  misc_feature (1)..(195): Xaa is any amino acid
MESLGNKLKEAREAKGLTFENASRDTNISSKFLEALEKEDYSPFPGEPYVLGFLKNYGEYLGLDPEELLSLYRSIKIREQPVPVDQLLRNPSHLPKILGRLAICLVLLTIAGGAGYYIYRLPKKADVSQQAARTASEYMLNNDFFERRLYPGDSILVVEGSDSYKLVFSGISDAITITTPRGPIMLDLGQEVTVD

SEQ ID NO: 25241 - DNA, 510 bp, Unknown
  Obtained from environmental sample
  misc_feature (1)..(510): n is a, c, g, or t
ttgagctttctggatccgtttttcntgagaatcaactttaccaaaccggctgaacaggttctggtatttaatggccagctcctgactgtataccttcccgatctaagggccgtgctgagccagcctgtcactcaagcccgccggacgagtgcagtaggcgcttccatggcttccgcccagggcttgcagctccttcgccgtggttatgtgccaaccttcgtatcagggcccgaaccagtctcccttgacgagagggacagggagcttgttgtcaagctcaggttaaccaggcgtctcgcttcggaaggatacagagaaattatattaagcattaaccctgaaactcttcttatcaggcgtattgaaggcaggaccattgcggatgtccttgtccgctttgattttcttaatgtaaaaaccaacgttggcattccggagctgagattcgagtatgactcgccggcatcggcaaatatttacaacaattttcttttccgcgaaacagattag

SEQ ID NO: 25242 - protein, 169 aa, Unknown
  Obtained from environmental sample
  misc_feature (1)..(169): Xaa is any amino acid
MSFLDPFFXRINFTKPAEQVLVFNGQLLTVYLPDLRAVLSQPVTQARRTSAVGASMASAQGLQLLRRGYVPTFVSGPEPVSLDERDRELVVKLRLTRRLASEGYREIILSINPETLLIRRIEGRTIADVLVRFDFLNVKTNVGIPELRFEYDSPASANIYNNFLFRETD

SEQ ID NO: 25243 - DNA, 948 bp, Unknown
  Obtained from environmental sample
  misc_feature (1)..(948): n is a, c, g, or t
atggatcacctaaaagcgatgattgctcacgccaaaaaagaaggcgttaagcgcgtgcgcgttcacgttctttttgacggacgcgacgtgggcgagacaagcgctcttgaatatgtcgatccctttgaagcgtttttgaaagatttaaacaaagacggctttgacgctaaaatcggctcaggcggcgggcgcatgtggatcacgatggaccgctacggcgctgactgggaaatggttcaccgcggctggcagacccatgtattcggaaacgcccgccagtttgcagcaacacgggaagcggttgaaacctaccgcaaggaaattcccggcattatcgatcaggacttaaaagaatttgttatagccgaaagcggaaaacccataggcacaatcgaggacggggattctcttatttactttaacttccgcggagaccgcgcgctggaaattacagccgcttttgaagacgataactttacccatttcgaccggggacgccgtccaaaagtttgctattcgggaatgatggaatacgacggcgacctgcacgtcccgaaacggtaccttgtaagccctccttcaattgaccgcacaatgggcgaataccttgccgcaagcggagtaagaacactcgctatttcagagacgcaaaagtacggacacgttacctactttttcaacggaaaccgcaccggcaagttcgacgataaacttgaagactatgttgaaataaaaagcgacgttcttccctttgaacagcgcccgtggatgaagtgcgcggaaattacagatcaggttatggccgccgattcacagcggcaagtacgactttatcaggctgaactatccaaacggagatatggtaggacatacgggcgtttatcaggcggttgtctgttcaatggaagcgatggacattcagcttggaaggctcttaaaagcggttga

SEQ ID NO: 25244 - protein, 315 aa, Unknown
  Obtained from environmental sample
  DOMAIN (1)...(247): BPG-independent PGAM N-terminus (iPGM_N)
  misc_feature (1)..(315): Xaa is any amino acid
MDHLKAMIAHAKKEGVKRVRVHVLFDGRDVGETSALEYVDPFEAFLKDLNKDGFDAKIGSGGGRMWITMDRYGADWEMVHRGWQTHVFGNARQFAATREAVETYRKEIPGIIDQDLKEFVIAESGKPIGTIEDGDSLIYFNFRGDRALEITAAFEDDNFTHFDRGRRPKVCYSGMMEYDGDLHVPKRYLVSPPSIDRTMGEYLAASGVRTLAISETQKYGHVTYFFNGNRTGKFDDKLEDYVEIKSDVLPFEQRPWMKCAEITDQVMAADSQRQVRLYQAELSKRRYGRTYGRLSGGCLFNGSDGHSAWKALKSG

SEQ ID NO: 25245 - DNA, 396 bp, Unknown
  Obtained from environmental sample
  misc_feature (1)..(396): n is a, c, g, or t
atggtaggacatacgggcgtttatcaggcggttgtctgttcaatggaagcgatggacattcagcttggaaggctcttaaaagcggttgacgaagcgggagccgtaatgctgataacagccgatcacggcaacagcgacgatatgttcgagcatgacaaaaaaaccggcgcggtctcgttaaaaccggacggctctccgaaatcaaaaacaagccacagccttaatcctgttccgtgtattatctacgatcccgaatacaagggtgagtaccaaaatgatccaaaagaaagcagtttaaatgaaggtctgggaataagctctgttgccgccgcctgtattcatcttttaggattaacgccgccgcaggattacgatagatcaatattgaagatgtag

SEQ ID NO: 25246 - protein, 131 aa, Unknown
  Obtained from environmental sample
  DOMAIN (1)...(98): Metalloenzyme superfamily
  misc_feature (1)..(131): Xaa is any amino acid
MVGHTGVYQAVVCSMEAMDIQLGRLLKAVDEAGAVMLITADHGNSDDMFEHDKKTGAVSLKPDGSPKSKTSHSLNPVPCIIYDPEYKGEYQNDPKESSLNEGLGISSVAAACIHLLGLTPPQDYDRSILKM

SEQ ID NO: 25247 - DNA, 738 bp, Unknown
  Obtained from environmental sample
  misc_feature (1)..(738): n is a, c, g, or t
atgcccacaaactttgtgctggtggaaggcggcacgttccaaatgggcggaagttacgacagcgagaggcccgttcatacggtaacagtaagcagtatttatatgggcaggtacgaagtaacgcaaaaggagtggcacgaggtaatgggcactaccgtacgccaacaggcaaacggtagtagattatatggcgaaggggacaattatccaatgtactatgtgagctggcacgaagcggtagagtactgcaacaagctgagcctgaaagaagggcttacccccgcgtaccgaggctcggggaacaatataacctgcgactggagtgccaacggctaccgcctgcctacggaagcggaatgggagtttgcggcaaagggcgggataaaggactatttaataactgagtattcggggagcaacacggtaggcgcggtggcgtggcatggcggaaatagcgggggcgttacgcaccccgtggggacaaaagcgcccaacagccttgggatttacgacatgagcggtaacgtgtctgagtggtgctgggacttgtatggggcttatgcgagcggctcgcagacaaacccgcgcggggcggcggtctccgacaattaccgtgtgcagcgcggcgggaatttgaattcttcggcgaatgcggtgcgttctgcctatagatccgtcactccccctacgtctcggaacagtggcctcggtttccggcttgtgcgtaacgcgcaatga

SEQ ID NO: 25248 - protein, 245 aa, Unknown
  Obtained from environmental sample
  DOMAIN (1)...(242): Domain of unknown function (DUF323)
  misc_feature (1)..(245): Xaa is any amino acid
MPTNFVLVEGGTFQMGGSYDSERPVHTVTVSSIYMGRYEVTQKEWHEVMGTTVRQQANGSRLYGEGDNYPMYYVSWHEAVEYCNKLSLKEGLTPAYRGSGNNITCDWSANGYRLPTEAEWEFAAKGGIKDYLITEYSGSNTVGAVAWHGGNSGGVTHPVGTKAPNSLGIYDMSGNVSEWCWDLYGAYASGSQTNPRGAAVSDNYRVQRGGNLNSSANAVRSAYRSVTPPTSRNSGLGFRLVRNAQ

SEQ ID NO: 25249 - DNA, 672 bp, Unknown
  Obtained from environmental sample
  misc_feature (1)..(672): n is a, c, g, or t
gtgccgccgcttgtgaggaatacccttggtttaagccctgtcgattacttcggcaggacattggtcgccggtatagcggacacaaatataaaaataggggtcattgcggtggccgtcgccggggctgcgatagagggccttgagaaagggagcggcgcgaactcctactacaattcgcagcaagatttcatgaaatcaatcgccacattatatgacaacaatccctacaaccgcctcgtgacgctggctaaaaaggctcaggaaaccggggttatcaagggtatcataatgcatcagggcgaatcgggcgcagtcagcggcaattgggcgcaaaaggtaaacggtatctacgataacctattgaacgacttggggattccgccaaactcgataccgttcattgcgggcgagccattgattaccgccgacaaaccgaatcaaaacaacgccaccctcatcagggggctgaccagaacgatgacggccaaactgccgagcggccaaaacgtcgcgcacgtggtctcgtcggcggggtgcacgtcgggcggcgacaacctgcacttcagctacgagggatacaagaaactgggcgaagagtacggtaagaagatgcttgaattgaactatagcaatcaggggtcgacgtcgatagcgccgaacacaaaaaggtaa

SEQ ID NO: 25250 - protein, 223 aa, Unknown
  Obtained from environmental sample
  DOMAIN (16)...(125): Domain of unknown function (DUF303)
  misc_feature (1)..(223): Xaa is any amino acid
MPPLVRNTLGLSPVDYFGRTLVAGIADTNIKIGVIAVAVAGAAIEGLEKGSGANSYYNSQQDFMKSIATLYDNNPYNRLVTLAKKAQETGVIKGIIMHQGESGAVSGNWAQKVNGIYDNLLNDLGIPPNSIPFIAGEPLITADKPNQNNATLIRGLTRTMTAKLPSGQNVAHVVSSAGCTSGGDNLHFSYEGYKKLGEEYGKKMLELNYSNQGSTSIAPNTKR

SEQ ID NO: 25251 - DNA, 1293 bp, Unknown
  Obtained from environmental sample
  misc_feature (1)..(1293): n is a, c, g, or t
atggttattgcgtctatcgatatacaaaacggaaaagtcgtccagcttaaacagggcgaagaactggtactacagagggaaaattctcttgaattggcggcggaattcgaccgttacggcgaagttgcggtcatagaccttgatgccgcaatgggtaaaggctccaatattgaaatgataaaaccgcttttacgaaaagctgagtgcagggtaggcggcggtatcaaaacgcctcagcaggcaaaggaacttgtcagtattggggcaagaaaaataataatcggctccggcgcttttcgcgaccctgcaaaaaaaggagcgggaattgcaggcggcgagtttgcggtaaatatcacttttttgcgggaaatatctgaaaaaataggacgagagcggcttattgctgcggttgatgcacgtaacggcgaaattgtcgtggatggttggaaaaccccaaccggtcttgatcttgttgaagctgcaaagcttgttgagccttttgcgggcgagatgctttttacttgtgttgagcgcgaaggcactatgacaggcatcgaccttgatccagtgcgccgtctgcgtaagtcagtttcatgtcaaattaccgttgcgggcggtgtttctgcattagacgaagttgaaaaaatcgccgctctcggctgtgatgtgcaactcggcatggcgttgtatacagggaaaataaatcttgcggatgcctttaccgtttcacttaactggaaaaaggatcaaaattcactcctcccntgtantgnntcatcccccgatggtcaggtaatgatgacaggcttcaccgataaacaagcgttagccgaaacttttaagcggggtaatgtctgcttccacagcagaacaagaaacaaactttggatgaaaggggaaaattcaggcaacgtgttaaaacttgtcagattgagaaccgattgcgacagagacgcattactggcgacagcggaacccgcaggtcccgtatgccacacaggagcgtggtcatgctttgcgactaacaaagattatacgttgcaatttttgcagaccataataaaggagcgttttcgcaaccccgcgcccggttcgtatacagccacacttgacgacgatcttgtgcgtgaaaaagtcatggaagaggcgcaagagttatgcgacgcaaaaaaccgtgatgaaattatctgggaagccgctgatcttctttatttttccaccgtattgatgacaagagccggagtaaccgttcaggaaatacttgacgagcttgatcggaggcacaaaaagtaa

SEQ ID NO: 25252 - protein, 430 aa, Unknown
  Obtained from environmental sample
  DOMAIN (347)...(429): Phosphoribosyl-ATP pyrophosphohydrolase
  misc_feature (1)..(430): Xaa is any amino acid
MVIASIDIQNGKVVQLKQGEELVLQRENSLELAAEFDRYGEVAVIDLDAAMGKGSNIEMIKPLLRKAECRVGGGIKTPQQAKELVSIGARKIIIGSGAFRDPAKKGAGIAGGEFAVNITFLREISEKIGRERLIAAVDARNGEIVVDGWKTPTGLDLVEAAKLVEPFAGEMLFTCVEREGTMTGIDLDPVRRLRKSVSCQITVAGGVSALDEVEKIAALGCDVQLGMALYTGKINLADAFTVSLNWKKDQNSLLPCXXSSPDGQVMMTGFTDKQALAETFKRGNVCFHSRTRNKLWMKGENSGNVLKLVRLRTDCDRDALLATAEPAGPVCHTGAWSCFATNKDYTLQFLQTIIKERFRNPAPGSYTATLDDDLVREKVMEEAQELCDAKNRDEIIWEAADLLYFSTVLMTRAGVTVQEILDELDRRHKK

SEQ ID NO: 25253 - DNA, 315 bp, Unknown
  Obtained from environmental sample
  misc_feature (1)..(315): n is a, c, g, or t
atgaaaataatttcaaacagtgattttgattcatactggaaaaatgaaactaaacaaacggaagataataagacagaaaaaatcgttaaaaagataattacggaagtacgagcaaaaggagacgctgctgtcaggaaatttgcttcaaagtttgataaatcttcccctgagcggcttgaagtctcactaattgaagtaaaacgcgcttacgatgaattacgcgcaagtgatccggcgctgacagatgcgttggagtttgcggcgaataatatttttcgtttttcacaaaagcaaaaagaacaattgtcaatttga

SEQ ID NO: 25254 - protein, 104 aa, Unknown
  Obtained from environmental sample
  misc_feature (1)..(104): Xaa is any amino acid
MKIISNSDFDSYWKNETKQTEDNKTEKIVKKIITEVRAKGDAAVRKFASKFDKSSPERLEVSLIEVKRAYDELRASDPALTDALEFAANNIFRFSQKQKEQLSI

SEQ ID NO: 25255 - DNA, 1095 bp, Unknown
  Obtained from environmental sample
  misc_feature (1)..(1095): n is a, c, g, or t
atgagcgaattttggaacagccgtgttaataaactttctccgtatatcccgggcgaacagcctaaggacagaagaataattaaacttaacaccaacgaaaacccatatccgccttctccaaaagttatagaagcaattaaaaacgccgcaggagagcgtcttcggctgtaccctgatcctgaatgtgcggcgttccgtgaagccgcctccgcccgttacgatgtaaagccgcaggaagtttttgcaggtaacggttctgacgaaattttagcattcgcttttggcgctttttttgaaaacggtgaaaaagccgcaaatatactattccctgacataacctacagtttttatcctgtttacgcaaatctttgggaaataccttaccgcgccattgcgctcacgcaggatttttcaattaacataaacgattataaaataccttcaggcggcgtaatatttcccaatccgaacgctccaacagcggtcggtctgccgttagatgatattctgtcacttgcggaatatcttgaaaaacagggaaaagtccttattgttgacgaagcttatatagcgttttcaggctcaagtgacgtgaaatcagcggttggctatattaagaatcaccccaatttgctgactgtgcatacgatgtcaaagtcagcgtctcttgcgggtttgcgttttggttttgccatcggtaatgaaaaattaatcgaaggtctttgcagaatacgtgattcgtttaattcatatactattgacattcttgctcttgcgggagctacagcggcaatttctgacacggcgtattacgaagaaatcaaccgccgagtgattgccacgcgtgaaagaacagctcaaaccttgcgcgatcttgggtttactgtactgccttcatcggctaattttctttttgtaaagcttcccagtatcagcggtgcggattttttcgccgcattacgcagcaggaatattttggtccgtcacttcaacaaagacagaatttcagattttctgcgtgtcagtatcgggacagatgaagagatggacacggttcttaatacgtgcaaagacattttatccgggagtaaatga

SEQ ID NO: 25256 - protein, 364 aa, Unknown
  Obtained from environmental sample
  DOMAIN (24)...(356): Aminotransferase class I and II
  misc_feature (1)..(364): Xaa is any amino acid
MSEFWNSRVNKLSPYIPGEQPKDRRIIKLNTNENPYPPSPKVIEAIKNAAGERLRLYPDPECAAFREAASARYDVKPQEVFAGNGSDEILAFAFGAFFENGEKAANILFPDITYSFYPVYANLWEIPYRAIALTQDFSININDYKIPSGGVIFPNPNAPTAVGLPLDDILSLAEYLEKQGKVLIVDEAYIAFSGSSDVKSAVGYIKNHPNLLTVHTMSKSASLAGLRFGFAIGNEKLIEGLCRIRDSFNSYTIDILALAGATAAISDTAYYEEINRRVIATRERTAQTLRDLGFTVLPSSANFLFVKLPSISGADFFAALRSRNILVRHFNKDRISDFLRVSIGTDEEMDTVLNTCKDILSGSK

SEQ ID NO: 25257 - DNA, 681 bp, Unknown
  Obtained from environmental sample
  misc_feature (1)..(681): n is a, c, g, or t
atgtcaggggaacaaacgttcaacatggaagaagaatttgcggggctggatttcaattcaagccgacttgaaaaacggtttatcaggactatggaaacattgtccaaacagccggataaatcaatatggtcatgcagcgaaaacagggcggaagctaaagccatataccggctgttaggcaacgagaacctggatcgtgaagaaatactgagggcgcatcgtgaagcgacagtcagaaggatgatacagcagggagggactgtattggcgatacaggataccacaagcctgaattacaacacccatgagaagaccgaagggataggctatatcagcgaaaaaacgttaggagtaaatattcacagttgtcttgcggtaagcgccgaagggctggcgttagggatattggggcaaatgtcctacaaccgcgaacaggcaaaggacgacagccgcagccacgaaagcaaaaaggttcgtgcgttggaggaaaaagagagttaccggtgggtgaaaacattgcaaacaagcactgctgatttgccggaaggngttaaggtaatcaccgtctgcgaccgggaaggggatatgtatgagttactggacgcggcggaaagtgccgggcagttgtttctcatccgggcagcccaaaaccggatgacgngcgataaccggcggatttag

SEQ ID NO: 25258 - protein, 226 aa, Unknown
  Obtained from environmental sample
  misc_feature (1)..(226): Xaa is any amino acid
MSGEQTFNMEEEFAGLDFNSSRLEKRFIRTMETLSKQPDKSIWSCSENRAEAKAIYRLLGNENLDREEILRAHREATVRRMIQQGGTVLAIQDTTSLNYNTHEKTEGIGYISEKTLGVNIHSCLAVSAEGLALGILGQMSYNREQAKDDSRSHESKKVRALEEKESYRWVKTLQTSTADLPEGVKVITVCDREGDMYELLDAAESAGQLFLIRAAQNRMTXDNRRI

SEQ ID NO: 25259 - DNA, 537 bp, Unknown
  Obtained from environmental sample
  misc_feature (1)..(537): n is a, c, g, or t
atgcgtacccaatttggaacaaaagaacattcaaacgttttcaatctggaacatcttaccgcatcaatgtcgcttagaagtttttactgtaaaattgaagagtataacgattacctttataaagacgcgctccgttctcagaatgatcatatcagcctgacgtggattttacgggagcgaaatacaggctctatagtctcttatatgtccttaattgcggacgctattaaattatccgctacagaaaaagaactgcataatcttaattatccatttaagacaataccagccatgaagattgcaaaactggccgtttcccaatcgttttcagaaaaatacaaaggcataggttcttttatgatagtggcagccatgaggaaagcccttgcatgtaatgacgattactgcgccgcgcgtttccttaccgttgatgccgatatagaacacgacaaaggcattcttgttttttacgaaaaaaacggctttatccccaatgccgaactctacaacaactcggccgatctgatcattggctaa

SEQ ID NO: 25260 - protein, 178 aa, Unknown
  Obtained from environmental sample
  misc_feature (1)..(178): Xaa is any amino acid
MRTQFGTKEHSNVFNLEHLTASMSLRSFYCKIEEYNDYLYKDALRSQNDHISLTWILRERNTGSIVSYMSLIADAIKLSATEKELHNLNYPFKTIPAMKIAKLAVSQSFSEKYKGIGSFMIVAAMRKALACNDDYCAARFLTVDADIEHDKGILVFYEKNGFIPNAELYNNSADLIIG

SEQ ID NO: 25261 - DNA, 459 bp, Unknown
  Obtained from environmental sample
  misc_feature (1)..(459): n is a, c, g, or t
atggacatagaaacgcgcaacgaaaaatatacagactatgtgtcgaaaatttcgccgaaaagtcggcaatggccctcttatatttgggcgtttttgattggaggattgatttgcgtccttggccaaggattcactgaactttataaactgtggttcccgcgctatacccccgaccaaattgggggccttgccgcttgcacccttatcgtcatcgcatcggttcttaccggcatcggcgtctacgaccgtttgggcaccttcgccggcggtggctcgctggtccctatcaccggcttttcaaattccgtcaccgccgccgccatggaacaccgaaaagaaggcatcgtcttcggcacctgcgccaacatgttcaagattgctggacctgtaattgtctttggagtagccctttctatgcttgttggactggtttattgggtaatttccttgtttgtttag

SEQ ID NO: 25262 - protein, 152 aa, Unknown
  Obtained from environmental sample
  DOMAIN (26)...(152): SpoVA protein
  misc_feature (1)..(152): Xaa is any amino acid
MDIETRNEKYTDYVSKISPKSRQWPSYIWAFLIGGLICVLGQGFTELYKLWFPRYTPDQIGGLAACTLIVIASVLTGIGVYDRLGTFAGGGSLVPITGFSNSVTAAAMEHRKEGIVFGTCANMFKIAGPVIVFGVALSMLVGLVYWVISLFV

SEQ ID NO: 25263 - DNA, 789 bp, Unknown
  Obtained from environmental sample
  misc_feature (1)..(789): n is a, c, g, or t
gtgtattcaggagcaaacggtaggatgcgataccgtctgagatccaagctggcattatgtactattgcgctggtgttattagtcgatatgcttatttcggtcccgctgtacttcatgatgataaggacgcaccatgaacccctgttgaaatccgtatttgtaatatccgccgcggcacttattcttggcattacaggcgccttggccctgtcttcgctgttacttcgtccaatacggaaactggtcaggcacgtcgagttgatacgggataccgaagacaaggagagccttgccaatctggaaattaaaatccccggcaatgatgagatggcggtattgggcaaaacgatcaatgaaatgacacaaggactggcgcacgccgcagcttccgtttccgaccttaatattggtaaagaaatccagataaaattcatccccctggatgtggacgaggaaggcaataagctcaattcaggttacaaagacgccaaaaacgccgttttttttggttactacaagggcgcaaaaggattatccggggactattttgattaccttgatcttggcggcaggtactatgcggttataaaatgcgatgtggcgggcaagggagtccccgcttcgcttattatgatgcaggttgcgaccatgtttctaaactatttcaagaaatgggagcctgccgccgacggaatgcggctggaggagcttgtttaccagatcaacggttttatcgagacgcttggtttcaaaggggcgtttcgccgcttttaccctctgcctttttga

SEQ ID NO: 25264 - protein, 262 aa, Unknown
  Obtained from environmental sample
  DOMAIN (52)...(126): HAMP domain
  misc_feature (1)..(262): Xaa is any amino acid
MYSGANGRMRYRLRSKLALCTIALVLLVDMLISVPLYFMMIRTHHEPLLKSVFVISAAALILGITGALALSSLLLRPIRKLVRHVELIRDTEDKESLANLEIKIPGNDEMAVLGKTINEMTQGLAHAAASVSDLNIGKEIQIKFIPLDVDEEGNKLNSGYKDAKNAVFFGYYKGAKGLSGDYFDYLDLGGRYYAVIKCDVAGKGVPASLIMMQVATMFLNYFKKWEPAADGMRLEELVYQINGFIETLGFKGAFRRFYPLPF

SEQ ID NO: 25265 - DNA, 786 bp, Unknown
  Obtained from environmental sample
  misc_feature (1)..(786): n is a, c, g, or t
ttgctttccggttcggttggaatcgccaaggtagattattccgggcttaccctggtatgtgttgccaatatagaaaacccgaacgagttcccgattccccttccaaaaatggactgggattacaacgtcagcggaaagtcggtacttaaaagcagcaatacaaaagcgggacaaatagctgcgggttcttccgggacagccaattttgaaataggcgtcgcctacgccgatatttttaacgttattgactcgctgaaaaacgccacggaagcaaagagcaacctcatgcttggcgcagatttttccttgcctgcctcttttggcgaagtaaaagacatcctgaatattcctggaaccatccctataccccaaatgccggctatcgcttttcaggggataacaaaaaaatcgcttggcaggacaatggagtttgatcttgcctgggaagttgacaataaaaacacatttgcttttgatatggataatttcgcctacgattttaaggtaaacaacagcgaatgggcaaagggccagataaataaccccccaaaagttaaagcaaacggcaagacgcttattccccttactgtttctgtcagctctactcaagttgtcgcggaactggcagatatcattagccgcggctcacctgtaaattacgtttgctcaggaagcgcaagcttaatcagcgatcttcccggtttaagcataccgaactaccttttggatcttcagggaagcacacggataccggtaaatatggtgtcaatcacctatgctgggtag

SEQ ID NO: 25266 - protein, 261 aa, Unknown
  Obtained from environmental sample
  misc_feature (1)..(261): Xaa is any amino acid
MLSGSVGIAKVDYSGLTLVCVANIENPNEFPIPLPKMDWDYNVSGKSVLKSSNTKAGQIAAGSSGTANFEIGVAYADIFNVIDSLKNATEAKSNLMLGADFSLPASFGEVKDILNIPGTIPIPQMPAIAFQGITKKSLGRTMEFDLAWEVDNKNTFAFDMDNFAYDFKVNNSEWAKGQINNPPKVKANGKTLIPLTVSVSSTQVVAELADIISRGSPVNYVCSGSASLISDLPGLSIPNYLLDLQGSTRIPVNMVSITYAG

SEQ ID NO: 25267 - DNA, 918 bp, Unknown
  Obtained from environmental sample
  misc_feature (1)..(918): n is a, c, g, or t
ttggaaagcgaaccgcttaaaataaaagtaaaagaggcgagcttttgtgggcttgttccaatacaagaaatttacgactatcatttggaacttggccgcagacacaaggcaaagcacaatatgatgatagttagctccaacatacgcacatatttaggtagccaaacctataccaacgcaagccttttagacgcatttctcggtatgaaaaaaaacggaaccatagaagaatttccctttttgcacaatggaatgactttaaccggagatgatttgcaatcgcagcgcccaaagcacgatggcgaaaaatggcatttacatatagaccacccaaaaataataaatggagcgcaaagtcttttcacttatgagcaatatgcaagcagagaagacaatccggttaatccgcttgttttggtgaaagttgttattccatatccttcagaaacagaagaacacgaatctggcaattttgtaaggcttgtgactatggcaaacaatcgccaaaatccggtattcagctatcatttgcgcgcagcagacgatttgcaattctttatatggcaaaaaatgcaggcagaaggtttttactatatatacaaagaaggtgttagacccaaaacccgcacacgcaaactagaagttcgtatgcgccctgagctttccaaaacaatgcttcttttagattccaaaataaccgaaagccgcgcaagcgaccaagtttttgaccaagaaagtttttatcagcgttgctttggtgcattttataggcaaaccaccgaacacgaaagtccctttgttcgcctttgcattatctacacaaaagcgtggcagcttttgggtaggcttcccttaaagataaaggctgtaacgccgggtcaaggaactcgcatagagccaaacaaagacaatccctga

SEQ ID NO: 25268 - protein, 305 aa, Unknown
  Obtained from environmental sample
  misc_feature (1)..(305): Xaa is any amino acid
MESEPLKIKVKEASFCGLVPIQEIYDYHLELGRRHKAKHNMMIVSSNIRTYLGSQTYTNASLLDAFLGMKKNGTIEEFPFLHNGMTLTGDDLQSQRPKHDGEKWHLHIDHPKIINGAQSLFTYEQYASREDNPVNPLVLVKVVIPYPSETEEHESGNFVRLVTMANNRQNPVFSYHLRAADDLQFFIWQKMQAEGFYYIYKEGVRPKTRTRKLEVRMRPELSKTMLLLDSKITESRASDQVFDQESFYQRCFGAFYRQTTEHESPFVRLCIIYTKAWQLLGRLPLKIKAVTPGQGTRIEPNKDNP

SEQ ID NO: 25269 - DNA, 465 bp, Unknown
  Obtained from environmental sample
  misc_feature (1)..(465): n is a, c, g, or t
atggcaaacaggaaactattaacagtaatgctggcagtcgcgctggtattggcaatgacggcaggctgcaagagcccgaaaacaggcggctggaaggttgtgaacggcaaagggacaaaaaacgcccgcgcaattgccttcggcaacgacatgtttgtcatggctcgcaagggcggcgagatggcggtctcagcggacggcgcaacatggacagcaataaagagtaaggcgctcggcaaaggaaacattaacgcaatcgcttttggcaaagacaagtttgtcgccgtaggggaaaaaggcagaatagtctactcggaagacggcgaggactggacagctgcagaggacagcgcatttgagaaaaaagacaacatcaccgcagttgcgtggagcggcagcaggttgtcgccgcagggcagaaaggcaaaatggcatattcgtctgacggcgactcggccgatctga

SEQ ID NO: 25270 - protein, 154 aa, Unknown
  Obtained from environmental sample
  SIGNAL (1)...(18)
  misc_feature (1)..(154): Xaa is any amino acid
MANRKLLTVMLAVALVLAMTAGCKSPKTGGWKVVNGKGTKNARAIAFGNDMFVMARKGGEMAVSADGATWTAIKSKALGKGNINAIAFGKDKFVAVGEKGRIVYSEDGEDWTAAEDSAFEKKDNITAVAWSGSRLSPQGRKAKWHIRLTATRPI

SEQ ID NO: 25271 - DNA, 801 bp, Unknown
  Obtained from environmental sample
  misc_feature (1)..(801): n is a, c, g, or t
gtgaaatggacaaccgcagatgtcagcagtatattcaacgaaaactacatctactcaatcacatttggtaacggcatgtttgtcgcaggcagcttcgccaaaatggcggtttcctcaaacggcgaaagctggacagccgtagatgtcagcagcgtatttaacgatagcagtgttcgcgcaatcgcctggggcaataacaggtttgtcgccgtgggctccggcggtaaaatggcgacttcaactaacggcacaacatggacagccgtagatgtcagcaaaatattaggagacgacggcttcgcttcaatcgcattcggcaacggcaagtttgtcgccgtgggctccaacagcaaaattgcgacttcaactaacggcacaacatggacagccgcaaacactggtacaatattcaacccaaaagttgacagtaaaggagaaccttatactgtctatctcacagcaatcgcctggggtaacggcaagtttatcgtaggggattatgatggcagaatggcgacttcaacggacggcgcaaaatggacagttgtaaaaacaaatccatttgatgaaggattcaatatcaacgcaatcgcattcggcaataacaagtttgtcgcaggcggcatgatggctaaactggcgacttcaacggacggcgtaacatggacagaggtaaaagtcgaattcataggccagatgttcggctggacccatgaagacaatagagcaattgcattcggcaacggcacgtttgtcgtcctaggcgcagaaggcagaatattatattcaacggacgagtag

SEQ ID NO: 25272 - protein, 266 aa, Unknown
  Obtained from environmental sample
  misc_feature (1)..(266): Xaa is any amino acid
MKWTTADVSSIFNENYIYSITFGNGMFVAGSFAKMAVSSNGESWTAVDVSSVFNDSSVRAIAWGNNRFVAVGSGGKMATSTNGTTWTAVDVSKILGDDGFASIAFGNGKFVAVGSNSKIATSTNGTTWTAANTGTIFNPKVDSKGEPYTVYLTAIAWGNGKFIVGDYDGRMATSTDGAKWTVVKTNPFDEGFNINAIAFGNNKFVAGGMMAKLATSTDGVTWTEVKVEFIGQMFGWTHEDNRAIAFGNGTFVVLGAEGRILYSTDE

SEQ ID NO: 25273 - DNA, 561 bp, Unknown
  Obtained from environmental sample
  misc_feature (1)..(561): n is a, c, g, or t
ttgcctgcaatgttttccatagagcaaaagtacgctgcgcttgccgctgttttttcgcccgaagaggcagaaaaagcgcacttgcggcgtgctttcgaggttgcctctttagcgttacaaggtcgtgagcgcgagaatggagacccctttatttttcatgctttcaacgtagcgcaaattgtggcttctgaggtgggtattggggcgcaggctgctgctgcggtgctgctgcacgaagccgaccgtttggcggctatgcccgatgcagagctgcagcgcatgtttggaaaggagttggcgggtatagtaaacggcttgcacaaaatttcgcagctcgacattaaggctaccgcattgcaggcagaggcttttcgccgcttgttggtgagctactccaccgacccgcgcgttatcattatcaagcttgccgacaggttggaggtaatgcgttcgctgtcgttctttccaaagtcgaagcatgccaagaagtcggcggaaacgctgctgctctatgcaccgttggcgcacaagctgggatgtacaagctctcggccaatctga

SEQ ID NO: 25274 - protein, 186 aa, Unknown
  Obtained from environmental sample
  misc_feature (1)..(186): Xaa is any amino acid
MPAMFSIEQKYAALAAVFSPEEAEKAHLRRAFEVASLALQGRERENGDPFIFHAFNVAQIVASEVGIGAQAAAAVLLHEADRLAAMPDAELQRMFGKELAGIVNGLHKISQLDIKATALQAEAFRRLLVSYSTDPRVIIIKLADRLEVMRSLSFFPKSKHAKKSAETLLLYAPLAHKLGCTSSRPI

SEQ ID NO: 25275 - DNA, 339 bp, Unknown
  Obtained from environmental sample
  misc_feature (1)..(339): n is a, c, g, or t
atggcaagcgacaaacaaaatgacatcaatggtgggattaacgagtatttgttgggcgcagaatggcaaataagtaaaatgtttntgataagcgctggaggacaaattacaagaacaggagtaacagatgactatcaaaccgatttgagctnttcgttgaattcatattctattggttttggaggggcggtaaatatttttgaatcgctgcgcgttaatgtcggctacttgtttaccaagtatgagaattggacaaaacaagtgactagctatggtggaaaagagattttttcgcgtaccaatcaagcctttggcatcggcatagactttcgcttttaa

SEQ ID NO: 25276 - protein, 112 aa, Unknown
  Obtained from environmental sample
  misc_feature (1)..(112): Xaa is any amino acid
MASDKQNDINGGINEYLLGAEWQISKMFXISAGGQITRTGVTDDYQTDLSXSLNSYSIGFGGAVNIFESLRVNVGYLFTKYENWTKQVTSYGGKEIFSRTNQAFGIGIDFRF

SEQ ID NO: 25277 - DNA, 558 bp, Unknown
  Obtained from environmental sample
  misc_feature (1)..(558): n is a, c, g, or t
gtgccattgggcaatctccgcgagccgatggagaatgcgaaacgagcacacgccctagtggtcactcgaggcgctcgcgccaagaaagaagccgttgaagactggtggtcccgctgcggctcgggcggccccctcttctacgttgactttaggatagtcgcgctgcggaacgccgccaccagcgagcggcttgtcccgcctgccaagccagcccccctgttcgcgttctgcgcccttgggcacccacaggcgttctatgccgatctgctggtggcgggtctgacctggctggacacgcggtcattcagagaccacaggcacctgacacccaagcagatagcaaaaatggcttctgcagccatgaaagtgggagcggccagccttgtctgcacagaaaaagatgccgtgaagttcactgacgaacacctcgacgcctgcccactcccaatctggatagccgagcaggaagtgaccaacgccgaagggctggtgaactggattgtcgggcgtttgggggaaatcgtcctaggtaccgcccctccacgcaacaatctttga

SEQ ID NO: 25278 - protein, 185 aa, Unknown
  Obtained from environmental sample
  misc_feature (1)..(185): Xaa is any amino acid
MPLGNLREPMENAKRAHALVVTRGARAKKEAVEDWWSRCGSGGPLFYVDFRIVALRNAATSERLVPPAKPAPLFAFCALGHPQAFYADLLVAGLTWLDTRSFRDHRHLTPKQIAKMASAAMKVGAASLVCTEKDAVKFTDEHLDACPLPIWIAEQEVTNAEGLVNWIVGRLGEIVLGTAPPRNNL

SEQ ID NO: 25279 - DNA, 819 bp, Unknown
  Obtained from environmental sample
  misc_feature (1)..(819): n is a, c, g, or t
gtgctgcgggagtggctggggggcatcaggggcgcgtttccaaagatacatgtgccaaagagggcgaaaaaggttgaactgctgcaaatggcgcaggagaacgcccgcctggccctggagcgcaagtttgagccggaagaactgaacaaggcggttttgcagggcttgcaggcatttttggacctgccgcacctgcccacgagaatcgaatgtttcgacataagccacgccggcgggcgcgaggtggtggccagttgcgtcgcgtttgcgggcgggctgccggacaaaagcggctataggcgcttcaagttgagcaacgagcaaaatgacgacttcagcaacatggcggaggtgctggcaaggcggtacaagcgtctggtggaggagggcagggaactgccgaacttggtcattgtggacggcggcctgggccagctgcacgccgccgaagaagtgctgaaggaactgggcgttgacctagagcttgcatcactggcgaaaaaagaggagctggtctataggccgatcagcacagagccactgcggattccaaaatccagccctgtgctgcaactgctacagcggattcgggacgaggcccataggtttgccatcagctaccaccgcgcactgagggcaaagcggaccatacagacggaattgacgaacatcaacggcataggccagaccacggccaaaaagctgctcaaagagttcggcagttccgcaaaggtgaggagcgccgcagaatccgacctggcaaaaatcgtcggcaagtctgccgcatcaaagattgttgcgtggaggggcggtacctag

SEQ ID NO: 25280 - protein, 272 aa, Unknown
  Obtained from environmental sample
  DOMAIN (56)...(205): UvrC Helix-hairpin-helix N-terminal
  misc_feature (1)..(272): Xaa is any amino acid
MLREWLGGIRGAFPKIHVPKRAKKVELLQMAQENARLALERKFEPEELNKAVLQGLQAFLDLPHLPTRIECFDISHAGGREVVASCVAFAGGLPDKSGYRRFKLSNEQNDDFSNMAEVLARRYKRLVEEGRELPNLVIVDGGLGQLHAAEEVLKELGVDLELASLAKKEELVYRPISTEPLRIPKSSPVLQLLQRIRDEAHRFAISYHRALRAKRTIQTELTNINGIGQTTAKKLLKEFGSSAKVRSAAESDLAKIVGKSAASKIVAWRGGT

SEQ ID NO: 25281 - DNA, 717 bp, Unknown
  Obtained from environmental sample
  misc_feature (1)..(717): n is a, c, g, or t
ttgcatcccacttttcttaacccggagacaagggattttttcagcaagatagttgacgataattcattggaacaacctgttctttatacggacgaatggctcaactcgattggagtcggaaaaatgcgcccgtccagcacggacgaagttaaaatagccaagggaaataaccagtctaaagtacaggcattgctggaaaaagcgcagggaaaacttgacggctcaagagtccttctaaaaacaagagaaaaagaacgcgatgaaattgaaaaaataatacgcgacaggattacctcggtatttgaacgcattcctttgcatgagatgacagatgtaagcgattgtatgtcagaatctcagaaagcggcaattaatgaaattcaaaatctgcttaagcagttgttaaaaaatgatcatgaattggaattgagcataaaggattttgtcagcgctcaggccgatgtggatcatttaggcgataaacttgaggctgaaggcggcagtggcgctgttaccgtagacacaggcgcggtagacgctgaatttgacactatccgccaaatggcaaagatgacagtaggacggcagggaaaccatttccccgttgctacctcggaatattttcactgcggccctaacgatgtagcgacgcgggaaaatgtcatctctatgcttgcaaggatcgaaagtatcgaccctgaaagcttatgcccgtaa

SEQ ID NO: 25282 - protein, 238 aa, Unknown
  Obtained from environmental sample
  misc_feature (1)..(238): Xaa is any amino acid
MHPTFLNPETRDFFSKIVDDNSLEQPVLYTDEWLNSIGVGKMRPSSTDEVKIAKGNNQSKVQALLEKAQGKLDGSRVLLKTREKERDEIEKIIRDRITSVFERIPLHEMTDVSDCMSESQKAAINEIQNLLKQLLKNDHELELSIKDFVSAQADVDHLGDKLEAEGGSGAVTVDTGAVDAEFDTIRQMAKMTVGRQGNHFPVATSEYFHCGPNDVATRENVISMLARIESIDPESLCP

SEQ ID NO: 25283 - DNA, 852 bp, Unknown
  Obtained from environmental sample
  misc_feature (1)..(852): n is a, c, g, or t
atgacagattggccgagctctcccggaataggcagtaaattcagctttattttgaaattcgatacgacaaaagaaattgaagattcactcatgcaaaaagcggcgcttgaaaaaattgaaaaaccgtcttttgagggcgatgtgttaatctgcgaagacaacgccatgaatcaaagggttatatgcgagtaccttacaagggtgggacttaaacccgttatagccggaaacggcaaggaaggactggacatggtccgcgagcgcatggaaaaaggctttaaaccttttgacttgatttttatggatatacatatgccggtaatggacggaattgaagccgcgtcaattattaacaaactgcaagtaggaacgcccattgtcgcaatgaccgcaaatattttgtccaccgacaaagaactttacaaaaggaacggtatgcccgattatcttggaaaaccctttacttcccaggtgttatggcgctgtcttttgaaatactttaagcctataaagaaggaaagcgtacaggaaaacacgatagacgaggaagaactggcggtacagcggatatttcaattaagttttgtaaaagagaatcaaaaaagattcgacgatattgcaaatgccttaaaagccaacgactttattctggcgcacagactgactcacgctttaaaagccaacgccgggcagattggaaaaaccagcctgcaatccgccgccgcggatattgaacagacgattaaaaacggagataaaaaggtaacagaagaacaactaaaaactcttgaaaccgagatgaatgttgttttgaaagagcttgcgcctttgctggaatctgagggtaaataa

SEQ ID NO: 25284 - protein, 283 aa, Unknown
  Obtained from environmental sample
  DOMAIN (190)...(270): Hpt domain
  misc_feature (1)..(283): Xaa is any amino acid
MTDWPSSPGIGSKFSFILKFDTTKEIEDSLMQKAALEKIEKPSFEGDVLICEDNAMNQRVICEYLTRVGLKPVIAGNGKEGLDMVRERMEKGFKPFDLIFMDIHMPVMDGIEAASIINKLQVGTPIVAMTANILSTDKELYKRNGMPDYLGKPFTSQVLWRCLLKYFKPIKKESVQENTIDEEELAVQRIFQLSFVKENQKRFDDIANALKANDFILAHRLTHALKANAGQIGKTSLQSAAADIEQTIKNGDKKVTEEQLKTLETEMNVVLKELAPLLESEGK

SEQ ID NO: 25285 - DNA, 507 bp, Unknown
  Obtained from environmental sample
  misc_feature (1)..(507): n is a, c, g, or t
atgaaacgtaaaaattatatgaacgtactgtggattttaatagcgggtatatctttgtttattggctgtaaaaaaaaggggggaggtaatacggacgatcccgattattccatagatatttcaatattttcaacatcagcaatgcggcagcctccttcagataataaaatatacaagtggataaaagataaatataacgttacttttacatgggatattctggtaggccaacgggatcaaaagattggggttatgatcgcgggggaagattatcctgacttactcctgttagataaaagattccttgaagctaaagcgctgattccccttgaagacctgattgaaaaatacggcccgcgcttaaggcggcactatgatggaatctgggaaaaactcaaggaagatgacggccatatttataatatgcctatttggggtgtgacctatggaaaggatcaaggtatatggtacggggatgccgccctttttattcagaaagaagtttaa

SEQ ID NO: 25286 - protein, 168 aa, Unknown
  Obtained from environmental sample
  misc_feature (1)..(168): Xaa is any amino acid
MKRKNYMNVLWILIAGISLFIGCKKKGGGNTDDPDYSIDISIFSTSAMRQPPSDNKIYKWIKDKYNVTFTWDILVGQRDQKIGVMIAGEDYPDLLLLDKRFLEAKALIPLEDLIEKYGPRLRRHYDGIWEKLKEDDGHIYNMPIWGVTYGKDQGIWYGDAALFIQKEV

SEQ ID NO: 25287 - DNA, 558 bp, Unknown
  Obtained from environmental sample
  misc_feature (1)..(558): n is a, c, g, or t
atgacaaataaagccttgatagtaggagcggggggcgttgctaatgtggttgcccaaaaatgcgcgcagaatagcgatgtgttcggggaattgctcatagcgagccgcacggagagcaaagctaaaacaatagcaggtcgcataaaaaacattcccgtaagcacggcaaaagttgatgcggacaaatccgctgaggttgcagcccttataaaggattttaaacccaagatggttttgaacatcgcactcccctaccaagatttagctataatggacgcttgcttagaaacaggcgttgattatttagataccgcaaactacgagccaaaagatattgcacattttgaatactcctggcaatgggcttaccacgaaagatttaaagacgctggcataatggctttgctcggctccggctttgaccccggcgtaacaaatgtctataccgcctacgcaaaaaaacaccactttgacaaaatggatacgctggacattgtggattgcaacaacggccgaccacggcaaggcttttgcccacgaattttaaccctgaaataa

SEQ ID NO: 25288 - protein, 185 aa, Unknown
  Obtained from environmental sample
  SIGNAL (1)...(18)
  DOMAIN (5)...(185): Saccharopine dehydrogenase
  misc_feature (1)..(185): Xaa is any amino acid
MTNKALIVGAGGVANVVAQKCAQNSDVFGELLIASRTESKAKTIAGRIKNIPVSTAKVDADKSAEVAALIKDFKPKMVLNIALPYQDLAIMDACLETGVDYLDTANYEPKDIAHFEYSWQWAYHERFKDAGIMALLGSGFDPGVTNVYTAYAKKHHFDKMDTLDIVDCNNGRPRQGFCPRILTLK

SEQ ID NO: 25289 - DNA, 615 bp, Unknown
  Obtained from environmental sample
  misc_feature (1)..(615): n is a, c, g, or t
ttgaggcctttggggcgaactttttataatttgctcctcctccccacagcggtaaccaagaagcggcatttggggctaaagggcaaaaccgatggctacacctgtcaaattacggctttttcaaaacggatgctgcgcaagttgccacgcaccaaagcaaaaccgcaagtacccggcattatagtggcaaaaactgagggctttaaaggaagttttgcatctctagacgatcaaggacgctataccgtccgtatgccatttgacgaagaaaatcacaacggcacgttggcgagctaccctgttcatttagcacagaattttgccggagaagattgcggcgttcatttcccgctaaaaaaagacacccctgttttaatagcctttgagaacggagatatagactgccccatcgctctgggcgccttgccaaagggaacctgcaaaaaccctgttgccaaaaaaaattcccaccaaaatatcctcaaaacttcgagcggaataaaattccttttagatgattcctccaaaagtttggaaatagaggctcccaccaacataaccataaaagcaggaggcagcttgattttggagggaaagactgtgaagattaactaa

SEQ ID NO: 25290 - protein, 204 aa, Unknown
  Obtained from environmental sample
  DOMAIN (60)...(138): Protein of unknown function, DUF586
  misc_feature (1)..(204): Xaa is any amino acid
MRPLGRTFYNLLLLPTAVTKKRHLGLKGKTDGYTCQITAFSKRMLRKLPRTKAKPQVPGIIVAKTEGFKGSFASLDDQGRYTVRMPFDEENHNGTLASYPVHLAQNFAGEDCGVHFPLKKDTPVLIAFENGDIDCPIALGALPKGTCKNPVAKKNSHQNILKTSSGIKFLLDDSSKSLEIEAPTNITIKAGGSLILEGKTVKIN

SEQ ID NO: 25291 - DNA, 1422 bp, Unknown
  Obtained from environmental sample
  misc_feature (1)..(1422): n is a, c, g, or t
atggcaaaggcatttttggatgaaaattttttacttgaaaccgaaacggcacgcaatttgtacaaggcggttaaggacgaacctatctttgattaccactgccatcttattccgtctcagatagcggaaaacaagaagatgagcgatctcgcagacgcgtggctttccggtgatcattataaatggcggatgatgcgcgccatgggtatagatgaaagatacattacgggcgacgctgaaggctacgaaaaatatcttgcatgggcgcgcactgtggaaaatttaatcggaaacccgctgtaccattggactcatcttgaattacagcgttactttgatattcacgaaccccttacggaaaagagtgcgcccgcgatttgggaaaaggcaaacgctgttcttcaaactccgcagctctccgtaaaaggtatttttgaaaaaatgaaaattcacactgtaggcacaacggacgatcctgtcgattcgcttgaacatcatcgcgccattgccgacggttccgccccaatcggaaaaatcgagacaaaagtaattccaactttccgcccagataaagctcttgaaattaacgatctccattttatcgaatacatagaatcattgtcccgcgcaagcggtataaacattaaaactcccgacgatgttcttgccgcccttgaaaagcgtttggatttttttatttcaacaggctgccgcgcttccgatcacgctcttgtatatccgccgtatgttgaaacgtcgttcaaggaagttgaaaaaacttttaaaaaagtcatggcgggaaaagaggcggcggcggaagaagcggacgcttacaaaacattgatgctcgcttctttgggcagcatttatgccgccaaaaatatcgtaatgcagcttcatctttcctgtattcgcgatataaacacaaaacaattaattaaattgggagtaaacacgggctttgacgccgttcatgataaaacattatgcgacaacctttccgcccttcttgatcttatgagtcttggcggcaagaacgcgaacggtcttcccaagacaattctctattcattaaacccgaaagattactaccccattacgacaatcatgggcggttttcaggactcaagctgtatcggtaaaatgcagttaggttccgcgtggtggttctgcgacaacagagacggcatggaagagcaaatgcgcatacttgccaacttaggtatcttacccgcctttgttggaatgctgacagacagcagaagtttcctctcttacactcgtcatgaatactttcgacgcattatgtgcagcttaatcggcaggtgggttgagaatggggagtacccgaatgatacgcaaaaattggagcaaattgtgagagatatttcatttggaaacgcgaagagatactttggttaa

SEQ ID NO: 25292 - protein, 473 aa, Unknown
  Obtained from environmental sample
  DOMAIN (2)...(473): Glucuronate isomerase
  misc_feature (1)..(473): Xaa is any amino acid
MAKAFLDENFLLETETARNLYKAVKDEPIFDYHCHLIPSQIAENKKMSDLADAWLSGDHYKWRMMRAMGIDERYITGDAEGYEKYLAWARTVENLIGNPLYHWTHLELQRYFDIHEPLTEKSAPAIWEKANAVLQTPQLSVKGIFEKMKIHTVGTTDDPVDSLEHHRAIADGSAPIGKIETKVIPTFRPDKALEINDLHFIEYIESLSRASGINIKTPDDVLAALEKRLDFFISTGCRASDHALVYPPYVETSFKEVEKTFKKVMAGKEAAAEEADAYKTLMLASLGSIYAAKNIVMQLHLSCIRDINTKQLIKLGVNTGFDAVHDKTLCDNLSALLDLMSLGGKNANGLPKTILYSLNPKDYYPITTIMGGFQDSSCIGKMQLGSAWWFCDNRDGMEEQMRILANLGILPAFVGMLTDSRSFLSYTRHEYFRRIMCSLIGRWVENGEYPNDTQKLEQIVRDISFGNAKRYFG

SEQ ID NO: 25293 - DNA, 561 bp, Unknown
  Obtained from environmental sample
  misc_feature (1)..(561): n is a, c, g, or t
atgcaggatgtaatttcgtctaacgaagagcggatgaaaaaaacagtggcaagccttaaagacgcgtttgccgctttcaggacagggagggcttccgccgctctgtttgacaggattagagttgacgcttacggggagaaatcgccccttaatcaggttgcgaatatttcaattcccgaagcgcgccttgttgttattcaaccctgggataaaaatcttataacagagattgaaaaagcgattcgttcttcggaactgtcgttaaatccgtcaaatgacggcaaggtaatccgcgtatcaatacctccgcttactgaagaaaggcgcaaagagcttgttaagctcgcgaaaaatcaggcggaacagtcaagagtcgcaatccgcaacatccgcagggacggcaacgaagagttaaagaggcttttaaaagataaaaaggcaaagattacggaagacgacgaaagcaagggagaggaagaactgcaaaaacttaccgacaactatgtaggtcaggtaaataaaatccttgaagagaaagaaaaagagataatggatgtataa

SEQ ID NO: 25294 - protein, 186 aa, Unknown
  Obtained from environmental sample
  DOMAIN (18)...(184): Ribosome recycling factor
  misc_feature (1)..(186): Xaa is any amino acid
MQDVISSNEERMKKTVASLKDAFAAFRTGRASAALFDRIRVDAYGEKSPLNQVANISIPEARLVVIQPWDKNLITEIEKAIRSSELSLNPSNDGKVIRVSIPPLTEERRKELVKLAKNQAEQSRVAIRNIRRDGNEELKRLLKDKKAKITEDDESKGEEELQKLTDNYVGQVNKILEEKEKEIMDV

SEQ ID NO: 25295 - DNA, 705 bp, Unknown
  Obtained from environmental sample
  misc_feature (1)..(705): n is a, c, g, or t
atggaaaaaaatatccctgcacatgtgggcattatcatggacggaaatggtcgttgggcgaaaagccggggacttgtccgcacgcagggacatcttgaagggttaaagacggcaaaacgtattgttaaagcggcaagcgatatgggcataaaatatttaacgctttacgcgttttcaacggaaaactggaaacgtactgccgacgaggttggttttattatgagcctggtaaaacagtatctccggaatgagattgctttttaccgcgagaaccatatccgcatacggcacgcgggcgacgcggcgggcctgcccgctgatattgcccaggagctggcaagcgccgcgcttgataccgggggtttcgacggcatgcaggtgatccttgccatcaattacggcggcagggacgagattgtgagggcgataagacggcttgccgaagggcaagacatggcggcaattaccgacaaggatattagtgcctgccttgataatcccgacgtgcctgatcccgacctgattatccgcagcgcgggcgagtacaggctgagcaattttctgctttgggagggcgcttacgccgagttgtatgtttcggcggcgctctggcccgactggacaggggacgatctggcgaaagccattgatgagtaccggaaccgtgaccgtcgttttggcggcattacagttaacggagaataa

SEQ ID NO: 25296 - protein, 234 aa, Unknown
  Obtained from environmental sample
  DOMAIN (12)...(228): Putative undecaprenyl diphosphate synthase
  misc_feature (1)..(234): Xaa is any amino acid
MEKNIPAHVGIIMDGNGRWAKSRGLVRTQGHLEGLKTAKRIVKAASDMGIKYLTLYAFSTENWKRTADEVGFIMSLVKQYLRNEIAFYRENHIRIRHAGDAAGLPADIAQELASAALDTGGFDGMQVILAINYGGRDEIVRAIRRLAEGQDMAAITDKDISACLDNPDVPDPDLIIRSAGEYRLSNFLLWEGAYAELYVSAALWPDWTGDDLAKAIDEYRNRDRRFGGITVNGE

SEQ ID NO: 25297 - DNA, 1056 bp, Unknown
  Obtained from environmental sample
  misc_feature (1)..(1056): n is a, c, g, or t
ttgcggaggattgaatcctgcttaaattctaacattctgatctatcatatgatgccagagcagaaaaatattttttattcggcgaagccgatacggtttaataccccgaggcttgcctcggctgtaaaaagacactgcttctggtcatatcgtgacaagaagtctttcaatttttgcggccgccccgaaggggcgtgcaggcgcgcccgtaataccgcgctgcttgcagcgcggatagggtgcgccgagcaaaaattttattttttcctctggcatttcctgatagatcaatctgttacatataaagtagatccaaaactccgtaatgagactaaactacgaaaaaggacccttatggaaaataacgatttatttgactttgaattcgacaagatcgaaaactgctggagcgttaagggttaccgaggtaaaggcgaagaaattgtttttccggcatcttataaaggcggaccggtaaaagcaataggtgatgagtttgcttttaacaatgaaggaataaagtgtaataaaggaataaaacgtgtaattattccagaaggttatactacaattggaaaaaatgcattctctggctttgaagggcttacgaatattaatctccctgaaagtcttacttccattggggagtgggcatttgcattctgtacaggactaacaaatatcaaacttccgaaaaaccttatttccatcgggcacaggactatttatgaagatgacggcgatataccatttggtagtattatcgatttaggcgatggcacatttaatggctgcacaggtctaacaaatattgagtttccggaaggtctcactttcattgggacaggggtattttacggctgtaccgggcttacaaatatcaaacttccggaaagccttacttccattggggactcggcgtttcaagactgtacagaacttacaaatatcaaactccctaaaaatctttcttccattggggatcgtgtgtttaatggatgtaccaatcttgcggcgataaccatagataaaaacaaccctgtctttgcaccgtga

SEQ ID NO: 25298 - protein, 351 aa, Unknown
  Obtained from environmental sample
  misc_feature (1)..(351): Xaa is any amino acid
MRRIESCLNSNILIYHMMPEQKNIFYSAKPIRFNTPRLASAVKRHCFWSYRDKKSFNFCGRPEGACRRARNTALLAARIGCAEQKFYFFLWHFLIDQSVTYKVDPKLRNETKLRKRTLMENNDLFDFEFDKIENCWSVKGYRGKGEEIVFPASYKGGPVKAIGDEFAFNNEGIKCNKGIKRVIIPEGYTTIGKNAFSGFEGLTNINLPESLTSIGEWAFAFCTGLTNIKLPKNLISIGHRTIYEDDGDIPFGSIIDLGDGTFNGCTGLTNIEFPEGLTFIGTGVFYGCTGLTNIKLPESLTSIGDSAFQDCTELTNIKLPKNLSSIGDRVFNGCTNLAAITIDKNNPVFAP

SEQ ID NO: 25299 - DNA, 396 bp, Unknown
  Obtained from environmental sample
  misc_feature (1)..(396): n is a, c, g, or t
ttggggtctcttgttgaacatataatgactcccgctctgccccaaaaatttaaaaaattaggctattcctttaaccgcatagtcacttataaaatcgctgaaggtgtccacgcccaaattgacggtatgcttgaaaacggcgaacaggcggttgcggtagaagtaaaaacaacattacggaaatcggacatagacgaacaccttgtacgcatggagaagatacggaaatacgccgatgaacacggcgacaaaagacagttcatgggagcaatagccgctacaattaccgacaaatcaaccagagaatatgccctgaaaaaaagcctttttctcattgaaccaagcggagaaaatgtcaaagttacaaaaccggaaggggatgtgacggtttggtaa

SEQ ID NO: 25300 - protein, 131 aa, Unknown
  Obtained from environmental sample
  misc_feature (1)..(131): Xaa is any amino acid
MGSLVEHIMTPALPQKFKKLGYSFNRIVTYKIAEGVHAQIDGMLENGEQAVAVEVKTTLRKSDIDEHLVRMEKIRKYADEHGDKRQFMGAIAATITDKSTREYALKKSLFLIEPSGENVKVTKPEGDVTVW

SEQ ID NO: 25301 - DNA, 750 bp, Unknown
  Obtained from environmental sample
  misc_feature (1)..(750): n is a, c, g, or t
atgaccgcgatatttactgatgttcaggggttttccgctatttccgaacagcttgatcctgttcacattgtacagctcttaaacaaatacctcacgacaatgagcgacatcatcatggaacaccttggaactgtggataaatactggggagacgcgattatcgcgttcttcggagctcctttgttcaatgccgagcatcctgctcttgcctgccgcagcgcgcttgcgattaaggcggcggagaagaaattgaacgaaacgatagttactgaaggcctgagtcctgtgcctatttttacacgtatcgggattaataccggtgaaatggtagtgggtaatatgggggcagaaaaaaagatggattataccattatggggaacgcggtaaaccttgcttcgcgcattgaaggggtaaacaagcagtaccgtaccggaggcatattgataagcgaatacaccagggcaagaatcggcgatgagtttccgttgcgccgtattgaccgtgtccgggtggtggggataaacacaccgctgcgtctgtatgaattgttaccaacggatactgaacaaggtactctggaaatttgggaaaaggcgcttgatttgtatgaacacagggattttagaaaggcttttggcttgtttgtttcgctcataaaacgttatccgaaagacaatgccgccagggtttacgcgctgcggtgcaaggcgtttgtgaaactccgccgccggataattgggacgcggtga

SEQ ID NO: 25302 - protein, 249 aa, Unknown
  Obtained from environmental sample
  DOMAIN (1)...(185): Adenylate and Guanylate cyclase catalytic domain
  misc_feature (1)..(249): Xaa is any amino acid
MTAIFTDVQGFSAISEQLDPVHIVQLLNKYLTTMSDIIMEHLGTVDKYWGDAIIAFFGAPLFNAEHPALACRSALAIKAAEKKLNETIVTEGLSPVPIFTRIGINTGEMVVGNMGAEKKMDYTIMGNAVNLASRIEGVNKQYRTGGILISEYTRARIGDEFPLRRIDRVRVVGINTPLRLYELLPTDTEQGTLEIWEKALDLYEHRDFRKAFGLFVSLIKRYPKDNAARVYALRCKAFVKLRRRIIGTR

SEQ ID NO: 25303 - DNA, 744 bp, Unknown
  Obtained from environmental sample
  misc_feature (1)..(744): n is a, c, g, or t
atgtacagagcggcagagcttaacggcccgtcgaacctgatgtccgatcccgaagccgacacgctcaaatcgtttgggctcctttcggtcgccgttataccgatacatatcaataacgctttctgggggtttgcgcttttcgccgatacaaaaaaagagcgttcttttgaagatgatgttattgaaatgatgcgctcggcggcattcctgttcgcaaacgctttcatacgcggcgaagcggaatatgacgtgctgacaggcatttataacaggcggttctttaataaaaacataaagcgcaccataaaatccttatcccgtacaggcggtttaataagcgtactgataatcgacattgatttctttaagccatacaacgacacttacggccatgtcgaaggcgacaactgcttaaaaatggtcgcccagacgctttttaacagcgtaacaagggcggacgattatgtcgccagatacggcggtgaggaatttgtcgtcgttctgcctcataccgacgaacaaggcgcgcgatttatcgcggaaaaacttcttgacaatatcaggaattgcaatatcccccataaaaaaagcagcgtggcggactgcgttacaatttccatcggcgtcacaaccggcaaagtgctgaacacgcaaagtgcggatgactttgtaaaaaaagccgacgagatgctgtataaatcaaaagaaaacggacgcaacagatatttctttgaacagctttga

SEQ ID NO: 25304 - protein, 247 aa, Unknown
  Obtained from environmental sample
  DOMAIN (76)...(241): GGDEF domain
  misc_feature (1)..(247): Xaa is any amino acid
MYRAAELNGPSNLMSDPEADTLKSFGLLSVAVIPIHINNAFWGFALFADTKKERSFEDDVIEMMRSAAFLFANAFIRGEAEYDVLTGIYNRRFFNKNIKRTIKSLSRTGGLISVLIIDIDFFKPYNDTYGHVEGDNCLKMVAQTLFNSVTRADDYVARYGGEEFVVVLPHTDEQGARFIAEKLLDNIRNCNIPHKKSSVADCVTISIGVTTGKVLNTQSADDFVKKADEMLYKSKENGRNRYFFEQL

SEQ ID NO: 25305 - DNA, 747 bp, Unknown
  Obtained from environmental sample
  misc_feature (1)..(747): n is a, c, g, or t
atgaacaatttatatgaatatttaacaaaagaatataatgcccatttttctggatgggacttttcatatgtaaaagaacgtatgatagaagacaagctttcttggaattataaaaatatcgtagaaaataatattattggaaaagaaagtctattagatatgggtactggtggaggagaatttctttgctccttatcaaatttaccacaaaatgtatgtgcgacagaaggttatgagccaaatattcctattgccgaaaaaagattaaaagaaaaaaatatcattctaaaacaaataaaaaatgatagtaaaattccgttcggcgatgaatattttgatattgtaataaacaggcatggatcttatgaaataatggaactcaaaagaatactaaaaaaagatggtttgtttataactcaacaagtaggagagctaaatggaatagattttaatatagcatttggaacaaatacaatggatgatataggatggtgtttaataaaaaatattgaaatgtttaaaaatgctggtatggaaatagtagactttgatgaaaatattggaaaaatgaaatttaatgacataagcgctagtgggcattatttttattgtataccatggcgagtaaaagattttagtattgataaatattataaaaaattggaaataatgaatgaaataatagagaaaaatgggtttatgaaatttgttttacatagatttcatatgataataaagaagttgtaa

SEQ ID NO: 25306 - protein, 248 aa, Unknown
  Obtained from environmental sample
  DOMAIN (52)...(139): Methyltransferase domain
  misc_feature (1)..(248): Xaa is any amino acid
MNNLYEYLTKEYNAHFSGWDFSYVKERMIEDKLSWNYKNIVENNIIGKESLLDMGTGGGEFLCSLSNLPQNVCATEGYEPNIPIAEKRLKEKNIILKQIKNDSKIPFGDEYFDIVINRHGSYEIMELKRILKKDGLFITQQVGELNGIDFNIAFGTNTMDDIGWCLIKNIEMFKNAGMEIVDFDENIGKMKFNDISASGHYFYCIPWRVKDFSIDKYYKKLEIMNEIIEKNGFMKFVLHRFHMIIKKL

SEQ ID NO: 25307 - DNA, 513 bp, Unknown
  Obtained from environmental sample
  misc_feature (1)..(513): n is a, c, g, or t
ttgaggcgtaacatgggcttcagaagattcgctttgacttatcttatgaaaggcatattaagcgttatctgcaaaattgactgcaaagaatttatatcggcgttaaaaaacaacaaaccaatgctggttatttttaaccatattaattttctggaagtccctattctggtaacgcacagttatcccctttatgtatcgggacttgttaaatcggaaacctgggataaccctgtatttgcgtttatttttaatacctataaggcaattccgattgacagaaggggtgcttttaatgaagcttttaaaaaagctctggaagcgatagaaaaagggtattatatctgcgtcgcgcctgaaggaacaagaagcaaggatggcgtatgggaaaaggaaaaccaggaatcattcaacttgcccttgagggggacgtgccgatacttccggtcgctcatttcggcggcgagaacgtttggaaaaatatgcgccgcctacgaagaacccggttttgtttaa

SEQ ID NO: 25308 - protein, 170 aa, Unknown
  Obtained from environmental sample
  DOMAIN (25)...(166): Acyltransferase
  misc_feature (1)..(170): Xaa is any amino acid
MRRNMGFRRFALTYLMKGILSVICKIDCKEFISALKNNKPMLVIFNHINFLEVPILVTHSYPLYVSGLVKSETWDNPVFAFIFNTYKAIPIDRRGAFNEAFKKALEAIEKGYYICVAPEGTRSKDGVWEKENQESFNLPLRGTCRYFRSLISAARTFGKICAAYEEPGFV

SEQ ID NO: 25309 - DNA, 633 bp, Unknown
  Obtained from environmental sample
  misc_feature (1)..(633): n is a, c, g, or t
gtgacagatcggccgagatcggatgactatctttacactagggatttgggaataatcagagacagcggcgcccaaacagaaccagccaatcccatttatgctgaattaatagttaggacacttaattggaatgttcaagatgtattaaaaaccaaatacaaagattatgatgttccacattatttgaagggtgggaaaataaacgtcaatgctttgctcaaagattttcaaagtttttggcgtgagaacagcgagatatggatacaacgctacaaagagaatttataccaatatgacgaagccgcacctcatttggtaattcaggcatttttgcagcgtgtgataaatggcggcggtcatatcagccgagaaatggcatttggcactaaccgtgctgatatttgcattgagtgggagaatcagaaatatccgattgagcttaaaatttatcagagtgccaaaacactcaaagatgccacagcgcagattttgaaatatatggagcgagtgggttcaaaagagggatgggtggtgatttttgaccgcactcccaagaaaagctggagcaaaaaactttacgtgaaaaatgtcaagcaaccagcaggaaagaagataacgatttttgggtgctga

SEQ ID NO: 25310 - protein, 210 aa, Unknown
  Obtained from environmental sample
  misc_feature (1)..(210): Xaa is any amino acid
MTDRPRSDDYLYTRDLGIIRDSGAQTEPANPIYAELIVRTLNWNVQDVLKTKYKDYDVPHYLKGGKINVNALLKDFQSFWRENSEIWIQRYKENLYQYDEAAPHLVIQAFLQRVINGGGHISREMAFGTNRADICIEWENQKYPIELKIYQSAKTLKDATAQILKYMERVGSKEGWVVIFDRTPKKSWSKKLYVKNVKQPAGKKITIFGC

SEQ ID NO: 25311 - DNA, 759 bp, Unknown
  Obtained from environmental sample
  misc_feature (1)..(759): n is a, c, g, or t
atggcggtctttgactggacgagatccgatttggcgaagccccgtcccgacggcgcttttgtgatggcgtatcagcaggaactaatcgataaagtaaatcctgacaatatgtttgacgtaatgaacgaaaaggcgcaggggcatttgcttccaggctgggagccgaaaagaatggcgaatatacgcagactgtttgaactttacggtaaaattgacgaagacgcgttatttgcaaatcttgtatattttttaaaagcgattatgccaacctgcgaacaatacggtataaaaatggcgattcatccggatgatccgtcatggtcggtattcggtcttccgcgaataatgaaaaatgaagaagaccttttgcgtcttgttaaagcggtggacaacccatgcaatggtataacgctttgtactggaagtttaggaagcagtcccaccaatgatattccctccattatacgcggcctaaaaggccgcatccattttgcccatgtccgtaatgtcaaacataacgctcccggtgactttgaagaatccgcccatctttcatgtgacggctcattagacatgtacgccatcatgaaagcgttatatgacacgggctttgacggcccaataaggcccgatcacggaagaaccatctggggtgaagtttccatgcccggatacgggctttacgaccgcgccataggattaagttatttatcggggcttttggaagcaatacaaaaaaaaataaaaaataagaaataa

SEQ ID NO: 25312 - protein, 252 aa, Unknown
  Obtained from environmental sample
  DOMAIN (1)...(246): D-mannonate dehydratase (UxuA)
  misc_feature (1)..(252): Xaa is any amino acid
MAVFDWTRSDLAKPRPDGAFVMAYQQELIDKVNPDNMFDVMNEKAQGHLLPGWEPKRMANIRRLFELYGKIDEDALFANLVYFLKAIMPTCEQYGIKMAIHPDDPSWSVFGLPRIMKNEEDLLRLVKAVDNPCNGITLCTGSLGSSPTNDIPSIIRGLKGRIHFAHVRNVKHNAPGDFEESAHLSCDGSLDMYAIMKALYDTGFDGPIRPDHGRTIWGEVSMPGYGLYDRAIGLSYLSGLLEAIQKKIKNKK

SEQ ID NO: 25313 - DNA, 711 bp, Unknown
  Obtained from environmental sample
  misc_feature (1)..(711): n is a, c, g, or t
atgggcgctgatccaaaaatcggcaaagtggaagacgctctaagggaacttcttttggaaaaagaagccgtgcgtcgttatggatttacagagagtgaactggctttggcaaaattggatattgtttcgcacatggaaaaattggtatctgaaaaggacagaacagaaactcgcaagtttgtcagaggatttaccagtcatttcttgtacggcgaggatatggcggacgttgaatgggaagcgaaagcggtcaatgccatgcttcccggtatcggtttaaaagatattttacaagcgtcaagaaattattttgcagctaacgatatcaatgtttttttaatttctccgcaggcggaagcggaaaatcttcccacgacggaaaaaataaaagcgatttttaaagaaacgcaagccgccaatattaaccgcagaaaggataattcgctttcaggcgatttaatggacaaagcgccgcccgcaggggaaataacatcagaaaatgttgattccggaacaggggcgcatattattgttttggcaaacggggcaaagataatttttaaagagaccaaaaataaaaataacgagattgtattgtacgcaatagcaaagggcggaacgaccaacgcaactgagaaaaacaattgtctctgtaaatcttctttccgaaatgatagccgtatcgggtcttggtccgtattcaaggaatga

SEQ ID NO: 25314 - protein, 236 aa, Unknown
  Obtained from environmental sample
  misc_feature (1)..(236): Xaa is any amino acid
MGADPKIGKVEDALRELLLEKEAVRRYGFTESELALAKLDIVSHMEKLVSEKDRTETRKFVRGFTSHFLYGEDMADVEWEAKAVNAMLPGIGLKDILQASRNYFAANDINVFLISPQAEAENLPTTEKIKAIFKETQAANINRRKDNSLSGDLMDKAPPAGEITSENVDSGTGAHIIVLANGAKIIFKETKNKNNEIVLYAIAKGGTTNATEKNNCLCKSSFRNDSRIGSWSVFKE

SEQ ID NO: 25315 - DNA, 522 bp, Unknown
  Obtained from environmental sample
  misc_feature (1)..(522): n is a, c, g, or t
gtggcgccccttgcctccgggcgcatctgcgggaatgcgtcccaaaaggactgcgcgtcatggaaaaagtgtgcaagggatggcatttgtccgctacgaaaaacaataaggatgttgcggttgggcttccaaaaaagtaaactgccaagcgtgcgtttgccgacccgccccgttccggggccgcacggcaggaacagcacagttttgaggaaagaggtaacgatgccgctctatgaatattgttgcgcggtttgccatgcaagtgaagaacgcctttgcagtttcgaagcccctgccgaatgtgactgcacggcctgcggggcgcccaacggaatgcgccgccaaatctcggtgccggcgatagcctttgccggcggagggtggtacgcagagggctacagcaattctccaccatccaaggacaagggaaaagcagacaaagccgacaagcccgcctgcgaaagcagcccaaagacccccgccagcggcgcgtgctgcgaaaactgcccggcaaaaaattga

SEQ ID NO: 25316 - protein, 173 aa, Unknown
  Obtained from environmental sample
  misc_feature (1)..(173): Xaa is any amino acid
MAPLASGRICGNASQKDCASWKKCARDGICPLRKTIRMLRLGFQKSKLPSVRLPTRPVPGPHGRNSTVLRKEVTMPLYEYCCAVCHASEERLCSFEAPAECDCTACGAPNGMRRQISVPAIAFAGGGWYAEGYSNSPPSKDKGKADKADKPACESSPKTPASGACCENCPAKN

SEQ ID NO: 25317 - DNA, 1542 bp, Unknown
  Obtained from environmental sample
  misc_feature (1)..(1542): n is a, c, g, or t
ttgatggcgagcgtagcccatgaacgccatcataggggatgtccaccatgggggaaaaccgccaagagcgcggagcgcaaagattactgcctaacgaagatacaggacgcctccaagcatctgctgggggtcataaacgatattctagacatatcaaagatagaggccaacaaatttaccctgtcttacaccgagttcaactttgagaagatacttcagaacgtcatacactccttaactttccgcgtggacgagaaggggcagcgcctcaaggtgtactacgaccactccataccctccacgcttataggagacgatctgcgtttggcgcaagtcgttatgaactttttgagcaacgccgttaagttcactccggaggggggtagcatatccatgcatacgcgcctcgtagagcgcaaagaggacggctgcgtcgtgcgggtggaggtatcggacacgggcatcggcataagcaaagagcagcagcagatactcttccgctcttttcagcaggccgacagcaacaccgcccgcaagtacggcggcacgggtttggggcttgccatctccaagaatatcgtggagatgatgggcggcgaggtgggagtcgagtccgagttgggcaagggttccacattccactttaccacgttcctgaagtacggaaagacgccggaagcctaccatgagacaagcgaggtaaactggagcaacgtgcgcattttggccgtggacgacgaccccgacgtactggcctacttcaaagagataaccgagagtttgggcgcgaagcactgcgacaccgccacgagcggcacagaggcgctcgcccttatagacaaaaacggcttctacaacatcaacttcgtggactggaagatgccggagatggacgggcttgaacttacgaaggagattaaaaagagagtgcccgagggagagaagtccgccgtcatcatattctcctccacagattggtcgctcatcgagcttccggccaaagaggccggcgtcgacaagttcatcccaaaaccgatcttcccgtcgagcatagccgactcgataaacgaggccgtcggcttgcacaggatacgccgcgcggaggacgaggcccgcaacatagccggcatcttcgccggataccgcgtgctgctggcggaggacgccgagataaacgccgagatcgtgaagagcctgctggagccgaccggcgtctccatagactgggccgtaaacggcgtggaggcggttaaactcttctccgaatcgccggacaagtacaacctaattttcatggacgtgcagatgcccgaaatggacggcctagaggcgacgcgccacataagggcgctgaatattccgcgcgccaagaccatacccatagtcgccatgaccgccaacgtcttcaaagaagacgtggaaatgtgccttaacgctggcatgaacgaccacataggaaaaccaatcgacatggatgaacttgtgggccgcctgaacctatanttagatcggcgacnaccacnatgtctgtcattgaaataa

SEQ ID NO: 25318 - protein, 513 aa, Unknown
  Obtained from environmental sample
  DOMAIN (104)...(220): Histidine kinase-, DNA gyrase B-, and HSP90-like ATPase
  misc_feature (1)..(513): Xaa is any amino acid
MMASVAHERHHRGCPPWGKTAKSAERKDYCLTKIQDASKHLLGVINDILDISKIEANKFTLSYTEFNFEKILQNVIHSLTFRVDEKGQRLKVYYDHSIPSTLIGDDLRLAQVVMNFLSNAVKFTPEGGSISMHTRLVERKEDGCVVRVEVSDTGIGISKEQQQILFRSFQQADSNTARKYGGTGLGLAISKNIVEMMGGEVGVESELGKGSTFHFTTFLKYGKTPEAYHETSEVNWSNVRILAVDDDPDVLAYFKEITESLGAKHCDTATSGTEALALIDKNGFYNINFVDWKMPEMDGLELTKEIKKRVPEGEKSAVIIFSSTDWSLIELPAKEAGVDKFIPKPIFPSSIADSINEAVGLHRIRRAEDEARNIAGIFAGYRVLLAEDAEINAEIVKSLLEPTGVSIDWAVNGVEAVKLFSESPDKYNLIFMDVQMPEMDGLEATRHIRALNIPRAKTIPIVAMTANVFKEDVEMCLNAGMNDHIGKPIDMDELVGRLNLXLDRRXPXCLSLK

SEQ ID NO: 25319 - DNA, 594 bp, Unknown
  Obtained from environmental sample
  misc_feature (1)..(594): n is a, c, g, or t
gtgagaactgtcgtcttccagagcaaggacagcgcgtggagccgcttcgaggcgatgtatggcgcggagatgcttgaggcggtggacgagaaccccttcgcggcgtcgctcgacatcacgctctacgagggcaaccagtcccccgaggctatttccgcgctgcaaagcagcatatcggcgctaagcggcgtggaggcggtgcgctactcacgggagtggttagactacataaagaggttgcgcgaccgcttctacgtaatctcaatcaccgccggtatagtcatactcctcgcgttgcacgccataatctccaacacgataaaattgactatctacgcgcggcgtgacctcgtgcgcaatatgcattacgtgggggctaccgacctattcataaagatgccgttcctgttggagggtatgctccaaggcctcataggcgggctgctttgtgtgggcgtgatgctcgccgcaagggtgttgctgtcgaatatttccataaactggtacttttcctatttgccgttcgtcgtcgtcataggggtgtttttcgggtggctcggaagcagactcgcggtaagcaaatttctcgtatag

SEQ ID NO: 25320 - protein, 197 aa, Unknown
  Obtained from environmental sample
  DOMAIN (34)...(196): Predicted permease
  misc_feature (1)..(197): Xaa is any amino acid
MRTVVFQSKDSAWSRFEAMYGAEMLEAVDENPFAASLDITLYEGNQSPEAISALQSSISALSGVEAVRYSREWLDYIKRLRDRFYVISITAGIVILLALHAIISNTIKLTIYARRDLVRNMHYVGATDLFIKMPFLLEGMLQGLIGGLLCVGVMLAARVLLSNISINWYFSYLPFVVVIGVFFGWLGSRLAVSKFLV

SEQ ID NO: 25321 - DNA, 1590 bp, Unknown
  Obtained from environmental sample
  misc_feature (1)..(1590): n is a, c, g, or t
ttgctgggagcaactactactacaacggcaggggcaacggcaacancggtagcagcagctcaaaagccagcggcagagcaaccgcctgctcctccaaaagaaanagattcaaaatatacctacgattcccctgaatttaaagctggcctagctgcncacgataagaaacaatgggcggagtctgcaaagtattggagggaggttctaaaaaaggagcctggcaatccaggagcttattactatgctggcgtttgccgttttaatatgggcgagctggataacgctgtgataaatttcaacaagagttttgaatatccagaaaagggctttaatgcaaattattatcttggcagaatttatgagcaaaaaggggacaaagccaaagctataagctactataacaaatatatgcagctaacatcaaatgcgcaaggcaaagcggaggttagggttaggatagcacggctaggcgaggcagtgcctgaaactaatgcggcagctagtgtagcagctagcggttcgtccagttccgctgagcagcaagcaatatcttcttcttcggatccttatgcttgcaatagtttggaaagctgcacgaaaatggaagagaaacgtaaacaggattccgttgctgcctatatagaaagtcttaaaaataagccattgaccattggtcccgagaaaatagcggttacggaatacggcggaaattttgcctatgcttctacaacagaagttggtagtgcagatttacaaaaggcctatggcttaattcaaaaaaagtccttccaatccgcgatagatgctttgcaaaccgcaaggcaaagattccctggaacgcctaactcaatggcagcggcatacaacctgcttgtgctataccaataccttgagctgcacgataaggttatagcacttgggaactcggttttgcaggaacctgtgcctgagccttataaaagcgcgatattctatatgctggctgcgagccatgtaaaaaaggctgagtttcaaaatggatataattctctttccaacgtagttgaagaccagaaacttggcccaacccgtgggcaaaaattagcattggaagccgaaattgcaacccagtacaaaccagatcagggctctccagaaattttgaaaaaggctatagatgcggaacccagcaaatccaagaagaatgagcttcgcttaaaactcgcggatttatacagcaaattgcaagaccagccagctgctatacaggtttataaagacattgtagaagactgcccgcctggcaccgcagacccttgccgcaaggctatctacgaacttggtgatcgtagctttttgctgcaaaactggcctatggcactggagtattataataaagccatagagcaacataaagacccagcacttgttccttgggctttgttccaaattggaaatatattccgtaaacaagccaatttcaaagaagcagtgcgttcttatgaccgtttgataaaggaattcagcggaacttattgggcagaccaagcggagctatataaaaaagnatgctatttggcaagagagaaatcagggagtgtgaaaaaatga

SEQ ID NO: 25322 - protein, 529 aa, Unknown
  Obtained from environmental sample
  SIGNAL (1)...(19)
  DOMAIN (110)...(143): Tetratricopeptide repeat
  misc_feature (1)..(529): Xaa is any amino acid
MLGATTTTTAGATATXVAAAQKPAAEQPPAPPKEXDSKYTYDSPEFKAGLAAHDKKQWAESAKYWREVLKKEPGNPGAYYYAGVCRFNMGELDNAVINFNKSFEYPEKGFNANYYLGRIYEQKGDKAKAISYYNKYMQLTSNAQGKAEVRVRIARLGEAVPETNAAASVAASGSSSSAEQQAISSSSDPYACNSLESCTKMEEKRKQDSVAAYIESLKNKPLTIGPEKIAVTEYGGNFAYASTTEVGSADLQKAYGLIQKKSFQSAIDALQTARQRFPGTPNSMAAAYNLLVLYQYLELHDKVIALGNSVLQEPVPEPYKSAIFYMLAASHVKKAEFQNGYNSLSNVVEDQKLGPTRGQKLALEAEIATQYKPDQGSPEILKKAIDAEPSKSKKNELRLKLADLYSKLQDQPAAIQVYKDIVEDCPPGTADPCRKAIYELGDRSFLLQNWPMALEYYNKAIEQHKDPALVPWALFQIGNIFRKQANFKEAVRSYDRLIKEFSGTYWADQAELYKKXCYLAREKSGSVKK

SEQ ID NO: 25323 - DNA, 1344 bp, Unknown
  Obtained from environmental sample
  misc_feature (1)..(1344): n is a, c, g, or t
gtggacggacagaaagcggcgctggttatagcctgcgaagactgctacagctgcggcgtatgctttaatatttgtcccatgtctaataagggccaggaaaaacccgcgctggcatggaaacattattccgatgatcacgaattccacgcggaacaggtcaaggtctgggagtacttcctttcattgcccgaaacgcctgccggcgagcttaaaaacgcgaaagcgttcgcctacaagcgtcccctgtttgaattctccggcgcctgcggcggctgcggtgagacaccctacatcaaacttatgtcgcagcttgtcggcgaccgcgcgctcatcggcaacgccacaggctgtacctcgatttacggcggaaacctccccaccaccccctacgcgcagagggcggacggacgcgggccggtgtggtcaaacagcctctttgaagacgcggcggaattcgccatgggcttcaggcttaccagcgacaagttggctgtccacgcccgcgaaatcgccgaaaaagcgaagggcgaaggcattgctgctggcatcatcgacaagatactctccaatgatcaggccgatgaagcgaagatcgacgaaatacggaaaagcattgatgaactcaaagtcgcgattaagaacgactcanagcccacggccaaattactgctctcgcttgcagaccacttcatcaaacggtctgtatggggcttcggcggcgacggctgggcttacgacatcggtttcggcggtcttgaccacgtactcgcttccggcaagaacgtaaacttgctctgtatggatactgaagtttattccaacacaggcggacagatgtcaaaatccacgccgataggagctatagcgaaattcgcagcctcaggaaaagagattaccaaaaaagaccttggcgctatcgcgatgagttacggctatgtctatgtcgctaggatttcgttaggtgcggacaggaatcagacaattaaagctttccgcgaagctgaatcctacaacggcccgtctctgattatcgcctacgcgcactgtatcaaccacggcatcgacatgagcaagggcttagatcaggccaaagcggcggtaacatgcggcctatggccattgtaccgctacgatcctcgcctgaaggatcagggcaagaaccccttccagcttgactcaaaagaggcaaccaccgcccttgaagacttcatgtacaaagaagtccgcttcaagagccttaaagccgcagacccggcccgcgccgacgcactgcttgcgaaagcgaaggaacatgccgtgcgcgtgtataaagagtacaagtatttagcggaaaggcctttctaa

SEQ ID NO: 25324 - protein, 447 aa, Unknown
  Obtained from environmental sample
  DOMAIN (215)...(345): Thiamine pyrophosphate enzyme, C-terminal TPP binding domain
  misc_feature (1)..(447): Xaa is any amino acid
MDGQKAALVIACEDCYSCGVCFNICPMSNKGQEKPALAWKHYSDDHEFHAEQVKVWEYFLSLPETPAGELKNAKAFAYKRPLFEFSGACGGCGETPYIKLMSQLVGDRALIGNATGCTSIYGGNLPTTPYAQRADGRGPVWSNSLFEDAAEFAMGFRLTSDKLAVHAREIAEKAKGEGIAAGIIDKILSNDQADEAKIDEIRKSIDELKVAIKNDSXPTAKLLLSLADHFIKRSVWGFGGDGWAYDIGFGGLDHVLASGKNVNLLCMDTEVYSNTGGQMSKSTPIGAIAKFAASGKEITKKDLGAIAMSYGYVYVARISLGADRNQTIKAFREAESYNGPSLIIAYAHCINHGIDMSKGLDQAKAAVTCGLWPLYRYDPRLKDQGKNPFQLDSKEATTALEDFMYKEVRFKSLKAADPARADALLAKAKEHAVRVYKEYKYLAERPF

SEQ ID NO: 25325 - DNA, 891 bp, Unknown
  Obtained from environmental sample
  misc_feature (1)..(891): n is a, c, g, or t
atgctgctaaccgggtattggtggggaaaccagactacgcctagagaaacctcgttatttttaaccgagctggttgataaagggttgatttccgcgcagaactgggccgcgccgcctgagccgggcaccaacaatcccagcctagcggaaaataagtcagccatttggcccggaacgccatcaccccgggtaaaactactccgggctaaagcggcgcaagtagaggcagccctcacttcagaacgtgagccgccccgggtcgcatcatttgcaaatgaacccaccaaactgggtgaacttgcccggattgccagcatcttgttagctgaaaatggcgaaaatcaaaaccaaagcgttccattccccaagcaagtctccgcatccaagctggtgcatcttgcgcaaaaccggcaagattttgccgcgcaactccggcggcccattcccactcgacccaccgtgcaagctcaaattggcactcaatttcatagttgggtacaagggcactatgaaggagcggcagtgttatttgaagaagatgagctaatggggtttgatgatgattttgacgatgcttttgatgggagtgagaattttgctgaacaaagtgccgccgagctagaaaagctgaaacaagcctttgcagaaagtaactgggccaagcttaaaccggtggcggttgagcaggaaatacaaagcacaatcgcgggtgtaaacgtgatagcgcggatagatgcggtattcattgatccggaaaaccctgaccagcaggtggtggtggactggaagactggccgtcctggtgccacggaaaaagaacaggcagcccgagaggtgcaacttgcggtgtatcggctagcttggtcccgcctaacggggcttgccggttga

SEQ ID NO: 25326 - protein, 296 aa, Unknown
  Obtained from environmental sample
  misc_feature (1)..(296): Xaa is any amino acid
MLLTGYWWGNQTTPRETSLFLTELVDKGLISAQNWAAPPEPGTNNPSLAENKSAIWPGTPSPRVKLLRAKAAQVEAALTSEREPPRVASFANEPTKLGELARIASILLAENGENQNQSVPFPKQVSASKLVHLAQNRQDFAAQLRRPIPTRPTVQAQIGTQFHSWVQGHYEGAAVLFEEDELMGFDDDFDDAFDGSENFAEQSAAELEKLKQAFAESNWAKLKPVAVEQEIQSTIAGVNVIARIDAVFIDPENPDQQVVVDWKTGRPGATEKEQAAREVQLAVYRLAWSRLTGLAG

SEQ ID NO: 25327 - DNA, 789 bp, Unknown
  Obtained from environmental sample
  misc_feature (1)..(789): n is a, c, g, or t
atgataaatttgtacgaacaaagttttgtcctagtgctgagtgagaatttatccatgttggaaccatatggcgcgctgagccccgatgcgatactggatcggcttgatccggagcagcgcgaagtggctactacgctacgcggcccagtggtggtcttggctggcgcaggtaccggtaaaacgagggcgatcacgcatcggatcgcttatggcgtgcgttcgggcatttatcggtcttcgtccattttggcagtaacgtttacgcagcgcgcagctggggagatgcgcagccgcttgcgtgagttaggggcgcccggggttcaggctaaaactttccactcggccgccttgagtcaactaaaatacttttggggccaggcggtgggtggcccgatgcccgagattattgagtcaaaagcgcgatacattggggaggccgctcgcagtatcggggtgaaaattgattccgttagcattcgagatttagcaaaagaaattgaatgggcgaaagttagcctaatcaatcctgaagattacgttattgaagccgctaaacgcagcagaatcgcagtttctgggttttctccagaacaagttgcggcggtggctttgggttatgaaaacctaaaagagcggcgcgggctaattgatttcgaagatatgctagcggttcttagtggaatattggaagaaaactctggcgtcgctgaacaagtaagatcacaatatcagcattttattgtggacgagtaccaagatgttcgccctgcagcagctcggccgatctga

SEQ ID NO: 25328 - protein, 262 aa, Unknown
  Obtained from environmental sample
  misc_feature (1)..(262): Xaa is any amino acid
MINLYEQSFVLVLSENLSMLEPYGALSPDAILDRLDPEQREVATTLRGPVVVLAGAGTGKTRAITHRIAYGVRSGIYRSSSILAVTFTQRAAGEMRSRLRELGAPGVQAKTFHSAALSQLKYFWGQAVGGPMPEIIESKARYIGEAARSIGVKIDSVSIRDLAKEIEWAKVSLINPEDYVIEAAKRSRIAVSGFSPEQVAAVALGYENLKERRGLIDFEDMLAVLSGILEENSGVAEQVRSQYQHFIVDEYQDVRPAAARPI

SEQ ID NO: 25329 - DNA, 456 bp, Unknown
  Obtained from environmental sample
  misc_feature (1)..(456): n is a, c, g, or t
atgtaccaaaacaaaaaaggaggtgattttatgacgtatcagataatctcagaacgcagattaaaaaaagatgtaaaaatagtgcagccaaatgaagcgtatcaattagtaaaacgttatgcgaaagcgaagcaagaacaacttatcctgcttaccctgaacggcgcccgcaacgttatttcaatttcaattatcagtatcggccttgtaaacaaaaccattgtccatccgcgggaggttttttgcaaggcgattagcgacagggcagaagcaattatcatctgccacaaccacccttccggccaaataattccttcagaacaagacaaagaagttaccagaacaatctacaatgccggtaaaatcatcgggataccgcttattgaccatattgttttttcaaaaaacggctatatcagccaaaggaatgaaggggatttccctgaaagagattaa

SEQ ID NO: 25330 - protein, 151 aa, Unknown
  Obtained from environmental sample
  DOMAIN (24)...(147): RadC, DNA repair protein
  misc_feature (1)..(151): Xaa is any amino acid
MYQNKKGGDFMTYQIISERRLKKDVKIVQPNEAYQLVKRYAKAKQEQLILLTLNGARNVISISIISIGLVNKTIVHPREVFCKAISDRAEAIIICHNHPSGQIIPSEQDKEVTRTIYNAGKIIGIPLIDHIVFSKNGYISQRNEGDFPERD

SEQ ID NO: 25331 - DNA, 381 bp, Unknown
  Obtained from environmental sample
  misc_feature (1)..(381): n is a, c, g, or t
atggaaaacaaaacgggttacagggcggttagcaaataccttttgggttcgcccttcaaagtaaggccggtcgccgatctcgtcaggcgcaagccatacccggaggcgatgtccgtgctggaaaatatcccgcataagggggcgcggcttatccgcaagacggtactgtccgccgcttccaacgccctccagaaaaacaaacagcttgacgaagaaatgctgtatgtgagggaaatatatattgacgaaggcccccggctgaaaagagtctggttcaggggcaggggaagggccgatatgcagcttaaaaggatgtgccatatcacagtggtcattggcgagactgtaaaagccgcaaagaccgtaaaggcgggtaaataa

SEQ ID NO: 25332 - protein, 126 aa, Unknown
  Obtained from environmental sample
  DOMAIN (9)...(114): Ribosomal protein L22p/L17e
  misc_feature (1)..(126): Xaa is any amino acid
MENKTGYRAVSKYLLGSPFKVRPVADLVRRKPYPEAMSVLENIPHKGARLIRKTVLSAASNALQKNKQLDEEMLYVREIYIDEGPRLKRVWFRGRGRADMQLKRMCHITVVIGETVKAAKTVKAGK

SEQ ID NO: 25333 - DNA, 1098 bp, Unknown
  Obtained from environmental sample
  misc_feature (1)..(1098): n is a, c, g, or t
atgggttttaatgccaaaggggacgcttccggaagagttaatataatccatgaaaacagaatgctggaaatttccggcagcgttcttgccaataatacggaattgggtattaattttgacgaacttatgcagtcccgatatgaaaatgaaaagtttgcgccggaacttccgaccacagtgaatttgactgttacaaccgggcctgtggtggaatttatatggccgaacacaagctcccccatattaagggcaaatcctgaaatcgggactgtgatgacggtttatgccgatacattggccggccagtacacaataaacagtgatatttcgatcagatccggagagatgtactattttgatcgtaatttttatatccggcatggggttcttgttttcagggaaaatgaacagcaatttaaccctcgcattaccgcgaaggcggaaattcgggagcgcacggactcaggccccgtaactgtttctatgataattgacaatgaaccctctgtaagctttgtcccccgttttgaatcgacgccttcgcttacacagcttgagatttattcgcttttaggccatagtatgtatttagcgggcggaaatgacagcggggatgatgccgcgcgttttcttataagttcaacaaccgatgttttatccaaagtattcgcgagcagcgaattgggacaaattgccggtctaaggagatttgaacgcatgttaaggagttggctgtttttggatatgttcagcgtaagaacaaagatacttcaaaacgcggcggcatcagcggcggcatcgtatgtaggacaaaatcaagttgataataatatgcgtgtaggtaactattttgacaatacaactgtttatttaggtaagtatattggccaggatatgtttattcaaagtatgttcaaattgcggtatgatgaaacctaccttactatgggcggattacggattgaaccggatataggtatagagcttaataccccgttatttaatatacgctgggattttctgccggaaagttataacccggaaaactgggggattaaagataattcttttactctgatttggagtaagtcattctag

SEQ ID NO: 25334 - protein, 365 aa, Unknown
  Obtained from environmental sample
  DOMAIN (2)...(340): Family of unknown function (DUF490)
  misc_feature (1)..(365): Xaa is any amino acid
MGFNAKGDASGRVNIIHENRMLEISGSVLANNTELGINFDELMQSRYENEKFAPELPTTVNLTVTTGPVVEFIWPNTSSPILRANPEIGTVMTVYADTLAGQYTINSDISIRSGEMYYFDRNFYIRHGVLVFRENEQQFNPRITAKAEIRERTDSGPVTVSMIIDNEPSVSFVPRFESTPSLTQLEIYSLLGHSMYLAGGNDSGDDAARFLISSTTDVLSKVFASSELGQIAGLRRFERMLRSWLFLDMFSVRTKILQNAAASAAASYVGQNQVDNNMRVGNYFDNTTVYLGKYIGQDMFIQSMFKLRYDETYLTMGGLRIEPDIGIELNTPLFNIRWDFLPESYNPENWGIKDNSFTLIWSKSF

SEQ ID NO: 25335 - DNA, 936 bp, Unknown
  Obtained from environmental sample
  misc_feature (1)..(936): n is a, c, g, or t
atggaaattgatcaagagatggagcaaatcgcggctgagttattgagcgattttcaaaaaaaacgcgatatggccaagcagccggtaaaatcgataatagtcgatataatcggcaaactgcagcacctgttgtttccgggaatttttgaaagcgtcttaaccggcggcggttcggtaaaaagcaaactaaacgttatgctggaagaagttttccatgacttagccgcacagacaagattggctttgcgctatgatctgcgatacaaggatacggagcaggatgatgttgacaaaacggcatgggaaataacgcgtcaatttatcctgaaaattccgcagatcaaaggtttcctggaaaaagatattgaagcagcgtatagcggcgaccccgccgcgtacagcaaagcggaaattgtcatatcgtatcccggtatttatgccacaatggtttatcggatagcgcatgaactgtatttgctgtcagtgccgctcataccaagaattatgagcgaatacgcgcacagtgttaccggcattgacattcatccgggtgcggttatcggcaaatatttttttatggaccatggtacgggtattgtcatcggcgagacagccgttatcggagataatgtaaaattgtatcagggagttacacttggcgccttgtccacaaagggcgggcagagtattaagggcgttaagcgccatccgactataagcgataatgttacgatatattccggtgccagcattttgggaggggataccattattggcgagggtgtggtaatcggcggaaacgcttttgtaatacgctctgttccggagaaaacaagggtaagcgtgaaaaatcccgaactgcagtttaagagcagcggtaatatttccacctatatggaattggatcaacttgatttttggcattatgagatttaa

SEQ ID NO: 25336 - protein, 311 aa, Unknown
  Obtained from environmental sample
  misc_feature (1)..(311): Xaa is any amino acid
MEIDQEMEQIAAELLSDFQKKRDMAKQPVKSIIVDIIGKLQHLLFPGIFESVLTGGGSVKSKLNVMLEEVFHDLAAQTRLALRYDLRYKDTEQDDVDKTAWEITRQFILKIPQIKGFLEKDIEAAYSGDPAAYSKAEIVISYPGIYATMVYRIAHELYLLSVPLIPRIMSEYAHSVTGIDIHPGAVIGKYFFMDHGTGIVIGETAVIGDNVKLYQGVTLGALSTKGGQSIKGVKRHPTISDNVTIYSGASILGGDTIIGEGVVIGGNAFVIRSVPEKTRVSVKNPELQFKSSGNISTYMELDQLDFWHYEI

SEQ ID NO: 25337 - DNA, 450 bp, Unknown
  Obtained from environmental sample
  misc_feature (1)..(450): n is a, c, g, or t
atgataaaggacgtaacctttgaacgcacggtatacaatgccgctccatccaggtttgaagcgggaaccggcaacattgccgatgctgtcggcttgggcgcagcgctggattatgtttcaggcattgggatagcgaatatcaatgcatatgaacacgaactgttaagctacgcaacaggcgagctaaaacgcataaacggactgcaccttatcggtacggcggcggaaaaggcgagtgctttatcttttgtgcttgacggcgcaagcgttgaacaggttggcaagcatctttcaagccatggaatcgcggtacgcgccgggcaccactgcgcgcagccgatcttgcgccgcttcgggctggaagcgacagtgcgtccgaccatcgctttttacaacacagctgaagaaattgacaaattggtaagcgcgatcagggaacttgcgttgtaa

SEQ ID NO: 25338 - protein, 149 aa, Unknown
  Obtained from environmental sample
  DOMAIN (1)...(140): Aminotransferase class-V
  misc_feature (1)..(149): Xaa is any amino acid
MIKDVTFERTVYNAAPSRFEAGTGNIADAVGLGAALDYVSGIGIANINAYEHELLSYATGELKRINGLHLIGTAAEKASALSFVLDGASVEQVGKHLSSHGIAVRAGHHCAQPILRRFGLEATVRPTIAFYNTAEEIDKLVSAIRELAL

SEQ ID NO: 25339 - DNA, 570 bp, Unknown
  Obtained from environmental sample
  misc_feature (1)..(570): n is a, c, g, or t
ttggacgcggatttctttgtgttctcagggcataaaatattcggacctacgggcataggcgcgttgtacgggaaagcggatgctttggaagaagcccagccgtatcaaggcggcggcaatatgataaaggatgtaacttttgaacgcacggtatacaatcccgctccgtccaagtttgaggcgggaacaggtaatattgccgacgctgtcggtcttggcgctgcgctggattatgtttcaggcataggaatcgcaaacatcagcgcgtatgaacatgaactgcttgattacgcaacccgcgagcttaagcgtataaacggactgcaccttatagggactgcggcggaaaaggcgagtgttctgtcctttgtgcttgacaacgcgagcgtggagcaggttggcaaacatcttgcaagccgcggaatcgccgtacgcgccggacaccactgcgctcagcccatattgcgccgctttggactggaagcgacggtacgcccgactatcgcgttttataacacagcggaagaaattgacaaactggtaatcgcggttaaagaactcgcgttgtaa

SEQ ID NO: 25340 - protein, 189 aa, Unknown
  Obtained from environmental sample
  DOMAIN (1)...(180): Aminotransferase class-V
  misc_feature (1)..(189): Xaa is any amino acid
MDADFFVFSGHKIFGPTGIGALYGKADALEEAQPYQGGGNMIKDVTFERTVYNPAPSKFEAGTGNIADAVGLGAALDYVSGIGIANISAYEHELLDYATRELKRINGLHLIGTAAEKASVLSFVLDNASVEQVGKHLASRGIAVRAGHHCAQPILRRFGLEATVRPTIAFYNTAEEIDKLVIAVKELAL

SEQ ID NO: 25341 - DNA, 687 bp, Unknown
  Obtained from environmental sample
  misc_feature (1)..(687): n is a, c, g, or t
ttgatttgcgttacaaagatacccgaacaggacgagattgacaaaacggcgtgggaaataatgcgccagtttatcctgaagattccagctgtcaaggatcttctggaaaaagatattgaagcggcgtatagcggcgaccccgccgcctatagcaaagcggaaattgttatatcgtatcccggcatttatgctgcaatggtttaccggatagcgcatgaactgtacctgttgtctgtgccgctaatacccaggataatgagcgaatacgcgcacagcgttaccggcatagacattcatccgggcgcggcgataggacagtatttttttatggatcacggtacgggcattgttataggcgagaccgccgttatcggtgacaatgtaaaattgtaccagggcgtaacgcttggcgctttgtccactaagggcggccagactataaaaggcgttaaacgtcatccgactataagcgataacgttacgatatattccggtgccagcattttgggaggggacaccattatcggcgagggcgtagtagtcggaggaaacgcttttgtgatacggtccgttcctgagaaaactcgcgtaagcgtgaaaaatcccgaattgcagtttaagagcagtggcaatatttcgactcacatggaattggatcaactggatttttggcattaccagatttag

SEQ ID NO: 25342 - protein, 228 aa, Unknown
  Obtained from environmental sample
  misc_feature (1)..(228): Xaa is any amino acid
MICVTKIPEQDEIDKTAWEIMRQFILKIPAVKDLLEKDIEAAYSGDPAAYSKAEIVISYPGIYAAMVYRIAHELYLLSVPLIPRIMSEYAHSVTGIDIHPGAAIGQYFFMDHGTGIVIGETAVIGDNVKLYQGVTLGALSTKGGQTIKGVKRHPTISDNVTIYSGASILGGDTIIGEGVVVGGNAFVIRSVPEKTRVSVKNPELQFKSSGNISTHMELDQLDFWHYQI

SEQ ID NO: 25343 - DNA, 741 bp, Unknown
  Obtained from environmental sample
  misc_feature (1)..(741): n is a, c, g, or t
atgtggcttgccctcggcgggccgcccggcaaaacagtggcattgtacgaataccacccgacccgcgccgcgtataacgcgaaagcgtttctggaagggtattcgggttatctgcaaacggacggttataaaggttatgacagtgcggtgaaagacatgcccggcattgttcatgtgggctgtttcgcgcactcaagacgtaaattctatgaagcggcgaaagtagataaaaactccaaatccgcacaggaagggataaagcatatccgcaagctgtacgatattgagaatgaattacgggaaaagattacagataacgatgatttgtttctggcagaaaggaaagcccgcgccgggcccgtgcttgaaaagttcaaagcgtggcttgagaaacggaaatgtgaagtgcctccgtcgctgcttcttggaaaggcgatagagtacagccttgatcagtgggacaaactggtcaggtatctggaaagcccgtaccttacgcctgacaacaacgcttgcgaaaacgcgatacggccttttgtcctcggaagaaaaaattggatattcagccaaagccctgacggtgctaaaagctcctgcggcatgtacacgcttatagagacggccaaacggaacggccttgttcccagagaatatctgacggctctttttaaaaaagcgccgctggcttcctcgccccaagactgggaaaaactccttccttggaatatttttaaatcttaa

SEQ ID NO: 25344 - protein, 246 aa, Unknown
  Obtained from environmental sample
  misc_feature (1)..(246): Xaa is any amino acid
MWLALGGPPGKTVALYEYHPTRAAYNAKAFLEGYSGYLQTDGYKGYDSAVKDMPGIVHVGCFAHSRRKFYEAAKVDKNSKSAQEGIKHIRKLYDIENELREKITDNDDLFLAERKARAGPVLEKFKAWLEKRKCEVPPSLLLGKAIEYSLDQWDKLVRYLESPYLTPDNNACENAIRPFVLGRKNWIFSQSPDGAKSSCGMYTLIETAKRNGLVPREYLTALFKKAPLASSPQDWEKLLPWNIFKS

SEQ ID NO: 25345 - DNA, 801 bp, Unknown
  Obtained from environmental sample
  misc_feature (1)..(801): n is a, c, g, or t
ttgatagagggggcataccccccgcgcggggcggttgccgtatttgaggaggttagcgtgtctatatcgttatttgggcggtctttgcttacacttttggatttttccccggaggaaattcaatatttattgaagctttccatgcaagtcaaaacagaggcaaaaaagggaaagaaattaaagcgttttgatgggaaaactctcgccatgctttttgaaaaacgctctacccgcacaagatgcgcttttgagaccgctttcggcgaagaaggcggacacccggtattcctttctcccgcggatattcacctcggcgtaaaagaggaactaaaagacacagcccgcgtattaggcagaatgttcagcgcgatccagttccggggttttaaacaggaaactgttgaaacgctggcgcaatattcgggggttcccgtttacaacggactgacagacttgtaccaccccactcaagctttagcggattttttaaccttacaggaaaatttcggcgaagtaaaagggcggattctctgctatgtaggcgacggacgcaacaatgtcgcaagatcgttgatgataatctgcgccaagctgggaacaaattttacggttataacgccgcctgagcttaacgccgacagcgagcttttacaaaagtgcgatacgttagccaaaacatcgggagccagaataaaagttactcccgatatttccgctgttgtgggcgcggacgctctttacaccgacgtatggacatctatgggcgaggaagatcaaaaggaagagcgggtgaggctttaa

SEQ ID NO: 25346 - protein, 266 aa, Unknown
  Obtained from environmental sample
  DOMAIN (172)...(266): Aspartate/ornithine carbamoyltransferase, Asp/Orn binding domain
  misc_feature (1)..(266): Xaa is any amino acid
MIEGAYPPRGAVAVFEEVSVSISLFGRSLLTLLDFSPEEIQYLLKLSMQVKTEAKKGKKLKRFDGKTLAMLFEKRSTRTRCAFETAFGEEGGHPVFLSPADIHLGVKEELKDTARVLGRMFSAIQFRGFKQETVETLAQYSGVPVYNGLTDLYHPTQALADFLTLQENFGEVKGRILCYVGDGRNNVARSLMIICAKLGTNFTVITPPELNADSELLQKCDTLAKTSGARIKVTPDISAVVGADALYTDVWTSMGEEDQKEERVRL

SEQ ID NO: 25347 - DNA, 597 bp, Unknown
  Obtained from environmental sample
  misc_feature (1)..(597): n is a, c, g, or t
gtgtctacaggtttcaagtgggattgccgacgttatgcgcaatgggaacacgccgagatgggaggcaaaacctatgttttcggaaccgaagaaagctacggttataacgtagagactgaagtccgcgacaaagacggagtttccgccgcggcgttaaccgcggaaatgactctctactggcgcagtaaggggaaaactcttcttgaccgtcttgatgatctttataccatttgcggttactggcaggaattgggaatttcaaaatactttaagggaccggaaggaccttcaatcatgaacggaataatggaagaataccgaaagaatccgccgaagactctgggcggcataagtatctcgaaagtccgcgatattaaaaacggcgctgacggtcttgcgccaagcgacgtattgcagttcttccttactgacggcactatcgtaagcgcgcgcccaagcggtactgagccaaagattaaattttacgcgacctgctgtgccgaagtcggttcaggcgggcttgaagcggcgaaagccgaagccgcccgcaaattggacgctatcaataaagacatacgggcggttatagggaactag

SEQ ID NO: 25348 - protein, 198 aa, Unknown
  Obtained from environmental sample
  misc_feature (1)..(198): Xaa is any amino acid
MSTGFKWDCRRYAQWEHAEMGGKTYVFGTEESYGYNVETEVRDKDGVSAAALTAEMTLYWRSKGKTLLDRLDDLYTICGYWQELGISKYFKGPEGPSIMNGIMEEYRKNPPKTLGGISISKVRDIKNGADGLAPSDVLQFFLTDGTIVSARPSGTEPKIKFYATCCAEVGSGGLEAAKAEAARKLDAINKDIRAVIGN

SEQ ID NO: 25349 - DNA, 723 bp, Unknown
  Obtained from environmental sample
  misc_feature (1)..(723): n is a, c, g, or t
atgaaacacatactccttgacgaggtcgattccacaaacagttacgcgaaaaccgtaagcggtatccccgacgacgaaataaccgtcataagggcgataaggcagcgctgcgggcgcggcaggaacgacacccctttcttctccgaccacgcgggcggtttgtgggtgtcgctcgtagtgcccatagccgacatctccgcccactttgagcacaaccgagcgataagccttgccatacgcacggcgctgttggagtgcatgccgtccggggacgcgcccgtgtcaataaaatggccgaacgatatctattggggagagagaaaaatcgccggcatcctccttgaaaacgcaccccagaaaccaaacacgctgatcatcggcttcggcataaacgtaaacatagcccaagatgacttcccaagcagtctgcataagacgacgacctccgtgctgatggaaatcggcgaggagtacgtaccggacgcgctgcttgaccgcgtcctacgcgaatacaattttatcataaagcacggtcccaagggcgcgcacgcggtatacgccggcaacctttacaaaaagggatatccggcgaccgtcggcccgcaccgcggaacattcgttacggttgagatcgacggacgcctgaggctagacaccgcccaaggatcaatgctcctctcttccggatcgctgagattccctggaagcgtatacgatgagtga

SEQ ID NO: 25350 - protein, 240 aa, Unknown
  Obtained from environmental sample
  DOMAIN (5)...(105): Biotin/lipoate A/B protein ligase family
  misc_feature (1)..(240): Xaa is any amino acid
MKHILLDEVDSTNSYAKTVSGIPDDEITVIRAIRQRCGRGRNDTPFFSDHAGGLWVSLVVPIADISAHFEHNRAISLAIRTALLECMPSGDAPVSIKWPNDIYWGERKIAGILLENAPQKPNTLIIGFGINVNIAQDDFPSSLHKTTTSVLMEIGEEYVPDALLDRVLREYNFIIKHGPKGAHAVYAGNLYKKGYPATVGPHRGTFVTVEIDGRLRLDTAQGSMLLSSGSLRFPGSVYDE

SEQ ID NO: 25351 - DNA, 432 bp, Unknown
  Obtained from environmental sample
  misc_feature (1)..(432): n is a, c, g, or t
atgattgaagaatacgttcaaagcagacctaatgccaaggcgtttacatcgcttgggcagatgcgttatttgagtgcggtcgctcaagtagacgcggtagttggcaattcttctagcgggttatacgaagttccttcgttcggcaaacctactgttgatataggcgacaggcaaaaaggtcgcttaaaggcatcgtcggttatttcttgcggcaatggccgcgaggaaatttatgacgcaataaaaaaagctttggccggcgattttaaggatactattaatccatacggcgacggcaatgctgcggagagaataatcgctgttttgaaaaatacggctgattataggattttgttaaaaaaacatttttatctttacaatttgagtcaggaaagagatgccatatgcgaaaaaataaagtgtacatcatag

SEQ ID NO: 25352 - protein, 143 aa, Unknown
  Obtained from environmental sample
  misc_feature (1)..(143): Xaa is any amino acid
MIEEYVQSRPNAKAFTSLGQMRYLSAVAQVDAVVGNSSSGLYEVPSFGKPTVDIGDRQKGRLKASSVISCGNGREEIYDAIKKALAGDFKDTINPYGDGNAAERIIAVLKNTADYRILLKKHFYLYNLSQERDAICEKIKCTS

SEQ ID NO: 25353 - DNA, 738 bp, Unknown
  Obtained from environmental sample
  misc_feature (1)..(738): n is a, c, g, or t
atgtcttcaaaacttgacaagtgtaaagataactttcttttttgttttgatgtgaataaaaaatttcagattaaaggacttttggagaagatattggaactgtctccggatatgccggaagcgttaatgcaaatgggaaaaatgtactacataatgacggcatccgaaaaagggaatatagaaaaggctgttgatatgtatgccaaagccattcaacttaaatcggattatgcggccgcgtataacaaccttggcattctttatgcttctgaagcatattcccgtgcaaagaatataaatgttaaggataatttaaataaagcaataattgtatatacagaagccattcggattcggccctatgacgcagcctactatttaaaccgaggcataagctattcaaaactgggaaagtatgagaaagcggttgacgatttttccagcgcgatacattacggtacagatgaatttaaaaagacgacatttattttttacctaagaggagatgaatatacatggttaagaaaatacgaaaaggcaattgatgatttttccgaatcaatacgtttgagtcctgaacacattaggtctctgcttatgcggggaaatgcttatcttggtgttggcgaaagagacaaagccaaggcggatttagatgaatataaaaaccgtaaacacaaagctgcggacgctgtgaaccgcagtgaaattattaggtctgtcgatgttacagcctga

SEQ ID NO: 25354 - protein, 245 aa, Unknown
  Obtained from environmental sample
  DOMAIN (161)...(194): Tetratricopeptide repeat
  misc_feature (1)..(245): Xaa is any amino acid
MSSKLDKCKDNFLFCFDVNKKFQIKGLLEKILELSPDMPEALMQMGKMYYIMTASEKGNIEKAVDMYAKAIQLKSDYAAAYNNLGILYASEAYSRAKNINVKDNLNKAIIVYTEAIRIRPYDAAYYLNRGISYSKLGKYEKAVDDFSSAIHYGTDEFKKTTFIFYLRGDEYTWLRKYEKAIDDFSESIRLSPEHIRSLLMRGNAYLGVGERDKAKADLDEYKNRKHKAADAVNRSEIIRSVDVTA

SEQ ID NO: 25355 - DNA, 411 bp, Unknown
  Obtained from environmental sample
  misc_feature (1)..(411): n is a, c, g, or t
atggcattaaaaaagaagaaatctataagaatagggatttactacgatgggcactatttttataaagtaagcaattactacaagtttgatcaccccaggcaggcgcgtataagcatacagggattgcacaattatattaccaaagaggtgtcccaaagacttgacgctgacgatgaggattgcaaggttgtggaggcccactatttcaggggccgatccattaaaagcgggaatgaaaaggcgattgtgggggagcggttctttgaggatgcccttacaaaagaaggggtgaatctccattatctcccattaataaggagcgccaataacgaactaaaagagaaaggcattgacgtatcgcttgccctggacgcttacaaaaggccacggccaaagcctttgatattttag

SEQ ID NO: 25356 - protein, 136 aa, Unknown
  Obtained from environmental sample
  misc_feature (1)..(136): Xaa is any amino acid
MALKKKKSIRIGIYYDGHYFYKVSNYYKFDHPRQARISIQGLHNYITKEVSQRLDADDEDCKVVEAHYFRGRSIKSGNEKAIVGERFFEDALTKEGVNLHYLPLIRSANNELKEKGIDVSLALDAYKRPRPKPLIF

SEQ ID NO: 25357 - DNA, 762 bp, Unknown
  Obtained from environmental sample
  misc_feature (1)..(762): n is a, c, g, or t
atgggaatcattggagtccttttcaatattttaggcggcctttgccttttcctttacgggatgaaggtgatgagcgacggtatccagcagggcgcgggcgacgggttcaggcgggcgcttaattttatgaccaggaaccgcgtcgccggagtgataaccggttttgtggtcacaggcattattcaatcctcgtcggcggttactatcatggtggtctcctttgtgaacgccggcctattaacgcttacccagtccatcggggtaataatgggggcgaatatcggaaccaccgtaaccgcgtggatagtctccctcattggcttttccatgaaaatatcgcttctggccctgccggcggttggcattggttttgtctttgcgattattaaatggaagtaccgcgttctgggagaggcgatactggggttcggcttgctctttttgggcctggactttctgaccagatccatgccgcagcttgnggaaagtttcaacttcattaagaatctttccaatcaggngtttttatcttcacttgcaggcatgngcgcgggacttgtaataacccctattgtccattcatcaagcgcctctaccgccgtagtaattacaatggctttttacggcattattaattacgaaatggccgcgtcaatgatcctgggggcaacgttagcacgaccattgacgcgcttctggtgctatcgaaacaaaaaccgcaacgaggcaggcggcttttgttcccggttttatttaacctaa

SEQ ID NO: 25358 - protein, 253 aa, Unknown
  Obtained from environmental sample
  DOMAIN (16)...(173): Na+/Pi-cotransporter
  misc_feature (1)..(253): Xaa is any amino acid
MGIIGVLFNILGGLCLFLYGMKVMSDGIQQGAGDGFRRALNFMTRNRVAGVITGFVVTGIIQSSSAVTIMVVSFVNAGLLTLTQSIGVIMGANIGTTVTAWIVSLIGFSMKISLLALPAVGIGFVFAIIKWKYRVLGEAILGFGLLFLGLDFLTRSMPQLXESFNFIKNLSNQXFLSSLAGMXAGLVITPIVHSSSASTAVVITMAFYGIINYEMAASMILGATLARPLTRFWCYRNKNRNEAGGFCSRFYLT

SEQ ID NO: 25359 - DNA, 798 bp, Unknown
  Obtained from environmental sample
  misc_feature (1)..(798): n is a, c, g, or t
atgctttcttcttacggcgtgacagttctgcctgaaatcgtaatggacaggacggccctgatgatgcaataccagacccgcgccccttcaggcgccgttcaggtaaggataacccgctatccgcagtggatccgggtgttaggcgaaaacggaaaccccatgcatcccgtaagcgccaaattcagcggcctggatatgtattgggcgagcccccttgaattgcgtgaagtcaatggcattgacgctgtacagctgttcaccaccacaaacgaggcctggacgataagggaaccgttttatacaagccctgaactgcccatgatgttaggcaaagacgccgaggaaaccacaggcgcaaagatacttggagtaagcctgacggggctgtttccctcatggttcgccgacaggccgaagccggagcaggaagacggttccgaacttcccgatataagcgccgaagccaaaccttcgcggctgataattatcggcgacactgattttgccacgtctttcatgaacgtcaccaacgcccagcgcggcaataccgactttcttatcaaggccgttgactggctgggcaatgatgacgacatcattggaatacgctcaagggaatcgagatccaacaggcttgacaggataattgatcccgcgaagagggcctccgcaatgcgcatgtcccagcttgtaaatgttttccttgttccgctttttgttattatcgcgggcctgttgcttgcctggagacggcgcgccagaaatacaggagaacgaaaagaaggagccgcaaaatga

SEQ ID NO: 25360 - protein, 265 aa, Unknown
  Obtained from environmental sample
  misc_feature (1)..(265): Xaa is any amino acid
MLSSYGVTVLPEIVMDRTALMMQYQTRAPSGAVQVRITRYPQWIRVLGENGNPMHPVSAKFSGLDMYWASPLELREVNGIDAVQLFTTTNEAWTIREPFYTSPELPMMLGKDAEETTGAKILGVSLTGLFPSWFADRPKPEQEDGSELPDISAEAKPSRLIIIGDTDFATSFMNVTNAQRGNTDFLIKAVDWLGNDDDIIGIRSRESRSNRLDRIIDPAKRASAMRMSQLVNVFLVPLFVIIAGLLLAWRRRARNTGERKEGAAK

SEQ ID NO: 25361 - DNA, 306 bp, Unknown
  Obtained from environmental sample
  misc_feature (1)..(306): n is a, c, g, or t
atgggagcatcttggaattcaaccgagtccctgcccgtaaactcggcgaattggacaacagggggttcgcatttctatctggctctttactgggcaacggagctggcaaagcaaaatgaagacttggatttaaaaaacaagtttgaaccttttgcaaagtatttaagcgacaatgagcagaaaatagttgcagagttggcaagtgcgcaagggcacgccgttgatataggcggttactatttgccagatgcggaaaaattggcaaagattatgaggccaaattttgcttttatttactatatttaa

SEQ ID NO: 25362 - protein, 101 aa, Unknown
  Obtained from environmental sample
  misc_feature (1)..(101): Xaa is any amino acid
MGASWNSTESLPVNSANWTTGGSHFYLALYWATELAKQNEDLDLKNKFEPFAKYLSDNEQKIVAELASAQGHAVDIGGYYLPDAEKLAKIMRPNFAFIYYI

SEQ ID NO: 25363 - DNA, 801 bp, Unknown
  Obtained from environmental sample
  misc_feature (1)..(801): n is a, c, g, or t
atggccgaacattaccggactgccgtgttgcctgcccgtgtccgttcccccaaagacaaagccactgtcgaagggaatgtcggcgttatctcaacatggattaccgccgctttacgaaaccagcaattcctttccctgtgggaactcaataccgccattcattccaaactggcggagtttaatgccaagccgtttcagaaaaaagaggggtcgcgggcaacggcattcgaggaggaacgcctgttcctgctccctttgccgcagtacccctatgagttggcggcatggaaaatcgccaccgtccaattcaattatcacataaccgtggaaggcggaaattattcagtcccctacgagtatatcaagcaaaaggtcaacgtccgcctcaccaagcgccttgtggaggtgtttttctcgggaaaccgtattgcaagccatccgcgtctgtacgggagacccggccaatacagcacccatgaggagcatatgccgaaagaacaccgggaatatgtggcatggaacggggaacggtttctaaactgggccgggaaaatcggggaacatactaaaacggttgtccaactgtttctctcccgcaaccagatagaacagcagggttataaagcgtgcatagccctgctgaaactgtccgacgcctattccgctccgcggttggaacaagcctgtaaaagggcgctctcgttcacagagcgccccagcctcaagagtgttcagattatcctgaaatccggccaggataacctgccccgagaggaggcccctcccttccgaccggcctga

SEQ ID NO: 25364 - protein, 266 aa, Unknown
  Obtained from environmental sample
  misc_feature (1)..(266): Xaa is any amino acid
MAEHYRTAVLPARVRSPKDKATVEGNVGVISTWITAALRNQQFLSLWELNTAIHSKLAEFNAKPFQKKEGSRATAFEEERLFLLPLPQYPYELAAWKIATVQFNYHITVEGGNYSVPYEYIKQKVNVRLTKRLVEVFFSGNRIASHPRLYGRPGQYSTHEEHMPKEHREYVAWNGERFLNWAGKIGEHTKTVVQLFLSRNQIEQQGYKACIALLKLSDAYSAPRLEQACKRALSFTERPSLKSVQIILKSGQDNLPREEAPPFRPA

SEQ ID NO: 25365 - DNA, 501 bp, Unknown
  Obtained from environmental sample
  misc_feature (1)..(501): n is a, c, g, or t
atgacacctttcgcgatccccggtacccttttgggtatctcctacatactcgcgtttaacaagccgcctctgattttggtcggaacggcggctataatcgtcattaactacgttgttcgggaacttccggtgggtattgaaaccggcgcggccaacttacggcagatcgataaatcaattgaagaagccgctcaggatttgggggcggacatgtccaaggtctttacttccgtggtgcttcctctggtaaggcccagctttctgaccagcatgtcctatacctttgtccgctcaatgaccgcagtaagcgcggtgatcttcctgatctccgcccgctggtatcacctgaccgtgcagatatataacttttcggaaaatttgcgcttcggcaatgcaagcgtcctttcaaccgtgctgatcgtcatcgtcctggccgtcttcggcctgatgcaggttcttgtccgggacaggggcattaacgccaggcaaatatcacaatag

SEQ ID NO: 25366 - protein, 166 aa, Unknown
  Obtained from environmental sample
  misc_feature (1)..(166): Xaa is any amino acid
MTPFAIPGTLLGISYILAFNKPPLILVGTAAIIVINYVVRELPVGIETGAANLRQIDKSIEEAAQDLGADMSKVFTSVVLPLVRPSFLTSMSYTFVRSMTAVSAVIFLISARWYHLTVQIYNFSENLRFGNASVLSTVLIVIVLAVFGLMQVLVRDRGINARQISQ

SEQ ID NO: 25367 - DNA, 906 bp, Unknown
  Obtained from environmental sample
  misc_feature (1)..(906): n is a, c, g, or t
atggtagtggaaacgggaatgggcgggcggcttgattcaaccaatgtgctcgatccattggtcagcgtaataacattaatcgaattggaacatacaagttttttaggcgaaacaatagaagcgattgcggaagaaaaagcgggaattattaaaacgggcaaacctttagtcttggcaaaacaatgcgatgaagcgttaaaagtatttcaagaaaaaacgcgggagaaaaacagcccattaatttatttcccgcaaaccgccaatctttccggcataaacataaccacgcaaggcacggatttttcgctctctttcaaccccgataaaatcatgccggaaacttcgctgttatctctctccattccaatccccggaaaagtgcaggcggaaaacgcctctctcgccattgccgcgcttaaaatcgctttcccaaaaatcagcgagaacgcaatcagggacggtcttaaaaaactaaaaatccccgcccgctttgaaaaattatccccgtcgcaggacagcggcgcgccgcccttcatcattgacggcgcacacaccaccgaaagtcttgccctatgcatagaaactttttgccacctctacggcaaaagcggcgttctcctcttcggctgcgccgccgacaaaaactctgcggcaatggcggaaatagcgtgtccgcacttcgcgaaaatatttatcaccacaccaggaactttcaaagcaagcgaacccgacaaagtttacgaaagttttgcggaaatcgcggggcaggaaaaaattgcgcttgtaaaagatacgcaagaagcggttaatcaggcgatttcatttgcaaaagaaaaaaatcttccgacacttgggacggggtctttttacttggcagcggagattaggaaatttttttgcggttag

SEQ ID NO: 25368 - protein, 301 aa, Unknown
  Obtained from environmental sample
  DOMAIN (1)...(139): Mur ligase middle domain
  misc_feature (1)..(301): Xaa is any amino acid
MVVETGMGGRLDSTNVLDPLVSVITLIELEHTSFLGETIEAIAEEKAGIIKTGKPLVLAKQCDEALKVFQEKTREKNSPLIYFPQTANLSGINITTQGTDFSLSFNPDKIMPETSLLSLSIPIPGKVQAENASLAIAALKIAFPKISENAIRDGLKKLKIPARFEKLSPSQDSGAPPFIIDGAHTTESLALCIETFCHLYGKSGVLLFGCAADKNSAAMAEIACPHFAKIFITTPGTFKASEPDKVYESFAEIAGQEKIALVKDTQEAVNQAISFAKEKNLPTLGTGSFYLAAEIRKFFCG

SEQ ID NO: 25369 - DNA, 843 bp, Unknown
  Obtained from environmental sample
  misc_feature (1)..(843): n is a, c, g, or t
ttgcgtatcgaaaggagatacaccatgaggcaggtcgcgatttacgggaaaggcggtatcggcaagtccacaaccacgcagaaccttacggcggggctggccgacatgggtaagaagattatgatagtcggttgcgatcctaaggcggattcgacgcggctggtgctcggcggcttggcgcagaagacggtgcttgacactcttcgcgacgagggcgacgatatagagctggacacggttttgaaggagggcttcaaggggatcaagggcgtggagtcgggcgggccggagccgggcgtcggttgcgcggggcgcgggatcatcacctccatcagcctgctggagcgcttgggcgcttacgaggccgacctcgactacgtcttctacgacgtcttgggcgacgtcgtctgcggcgggttcgcgatgcctatccgcgagggcaaggcgaaggagatctacatcgtctgttccggcgagatgatggccctctacgccgccaacaacatttccaagggtatctacaagtacgccaacaccggcggcgtccgcctcggcggcctcatctgcaactcccgcaaggtagacggggaggccgaactcgtctccgccgtggccaaggagatcgggacgcagatgatccacttcgtcccccgcgacaacgccgttcaccgcgctgagatcaacaagaagacggtcatcgacttctcgccggacgagccgcaagccgaagagtaccgcacgctcgctcggaagatagacgcgaacgatatgttcgtcatccccaagcctatgccgatagagcggctcgaggcgatcctgatggagcacgggatggtggcttga

SEQ ID NO: 25370 - protein, 280 aa, Unknown
  Obtained from environmental sample
  DOMAIN (10)...(280): 4Fe-4S iron sulfur cluster binding proteins, NifH/frxC family
  misc_feature (1)..(280): Xaa is any amino acid
MRIERRYTMRQVAIYGKGGIGKSTTTQNLTAGLADMGKKIMIVGCDPKADSTRLVLGGLAQKTVLDTLRDEGDDIELDTVLKEGFKGIKGVESGGPEPGVGCAGRGIITSISLLERLGAYEADLDYVFYDVLGDVVCGGFAMPIREGKAKEIYIVCSGEMMALYAANNISKGIYKYANTGGVRLGGLICNSRKVDGEAELVSAVAKEIGTQMIHFVPRDNAVHRAEINKKTVIDFSPDEPQAEEYRTLARKIDANDMFVIPKPMPIERLEAILMEHGMVA

SEQ ID NO: 25371 - DNA, 375 bp, Unknown
  Obtained from environmental sample
  misc_feature (1)..(375): n is a, c, g, or t
ttgcgcggggcgcgggatcatcacctccatcagcctgctggagcgcttgggcgcttacgaggccgacctcgactacgtcttctacgacgtcttgggcgacgtcgtctgcggcgggttcgcgatgcctatccgcgagggcaaggcgaaggagatctacatcgtctgttccggcgagatgatggccctctacgccgccaacaacatttccaagggtatctacaagtacgccaacaccggcggcgtccgcctcggcggcctcatctgcaactcccgcaaggtagacggggaggccgaactcgtctccgccgtggccaaggagatcgggacgcagatgatccacttcgtcccccgcgacaacgccgttcaccgcgctga

SEQ ID NO: 25372 - protein, 124 aa, Unknown
  Obtained from environmental sample
  misc_feature (1)..(124): Xaa is any amino acid
MRGARDHHLHQPAGALGRLRGRPRLRLLRRLGRRRLRRVRDAYPRGQGEGDLHRLFRRDDGPLRRQQHFQGYLQVRQHRRRPPRRPHLQLPQGRRGGRTRLRRGQGDRDADDPLRPPRQRRSPR

SEQ ID NO: 25373 - DNA, 327 bp, Unknown
  Obtained from environmental sample
  misc_feature (1)..(327): n is a, c, g, or t
atgctgttagtcagagcgattatccgccccgagaagtcggggatagttatgcgtgaactggccgccgccggttttcccgccgtcaccaagcttgatgtttacgggcgcggcaagcagaagggcatcaccgtgggcgaggtgcactacgacgagatacctaaggatatgcttgtgatcgtctgtaacgacgaggacaaggaagatctcgtgaagatcatcatccgcactgccaagaccgaggctaaaggcgctttcggcgacgggcgcatattcgtgtcgccagtcgaatcggcatacaccatcagttccggcgcggccggtctgtaa

SEQ ID NO: 25374 - protein, 108 aa, Unknown
  Obtained from environmental sample
  DOMAIN (4)...(104): Nitrogen regulatory protein P-II
  misc_feature (1)..(108): Xaa is any amino acid
MLLVRAIIRPEKSGIVMRELAAAGFPAVTKLDVYGRGKQKGITVGEVHYDEIPKDMLVIVCNDEDKEDLVKIIIRTAKTEAKGAFGDGRIFVSPVESAYTISSGAAGL

SEQ ID NO: 25375 - DNA, 924 bp, Unknown
  Obtained from environmental sample
  misc_feature (1)..(924): n is a, c, g, or t
atgacagattggccgagacgttcggcttccgcgattaagtctgggggaacaacacgcagggcggcgaagatggttacccttgatatcgatcatcccgatgttgagaattacatcaactggaaatcaggggaggaacacaaggtcgcctctatggttacaggctcccttatattgaaaaaacatattgacgggatcaaaaaagccctgacaggcttccgcggcccggaagaagataaattcaacgccgagaaaaaccatgagctggcagcggttctgcgcggcgcgttaggcgataaaattccggcgtcttatctttaccagcagcttcgccgtcttgagcagggcgatgaggaagttgatgtctcccaatattccaccgcgtgggaagatgaggcgtacaataccgtttcggggcaaagttccaataacagcctgcgcgttaccgatgagtttatgcgcgcggtgttaaacgataccgattgggatcttaaaagccgcacctcaggcgacgcggtaaaaaccgtcaaagccagaaaactttggacggacatagcgagaacaagctggcagtgcgcggatcccggccttcaataccacactacaattaacgattggcatacatgtcccgcaggcggggagatacgcgcttccaacccttgttcggaatatatgtttttagacgataccgcgtgcaacctggcttccataaaccttgtcgcgttatacgacaaaagaagaaaagcgtttaacgtcgaaagttatcttcacgcgataagcatttggactacaattttggaaatttccgtcgtaatggcgcagtttccgtcttcacgcatcgccgagctttcgtacaagtaccgcacgctggggctcggttacgcccaacttgggtactcttcttatgatcatggggctcgcttatga

SEQ ID NO: 25376 - protein, 307 aa, Unknown
  Obtained from environmental sample
  misc_feature (1)..(307): Xaa is any amino acid
MTDWPRRSASAIKSGGTTRRAAKMVTLDIDHPDVENYINWKSGEEHKVASMVTGSLILKKHIDGIKKALTGFRGPEEDKFNAEKNHELAAVLRGALGDKIPASYLYQQLRRLEQGDEEVDVSQYSTAWEDEAYNTVSGQSSNNSLRVTDEFMRAVLNDTDWDLKSRTSGDAVKTVKARKLWTDIARTSWQCADPGLQYHTTINDWHTCPAGGEIRASNPCSEYMFLDDTACNLASINLVALYDKRRKAFNVESYLHAISIWTTILEISVVMAQFPSSRIAELSYKYRTLGLGYAQLGYSSYDHGARL

SEQ ID NO: 25377 - DNA, 843 bp, Unknown
  Obtained from environmental sample
  misc_feature (1)..(843): n is a, c, g, or t
atgattaacggctttgtggaagaatctttaaaaacgaggcttggaattccggttgtttacgggattgacgcggtacacggacacaacaacgcgctaggcgcgacgattttgccgcataacatcgctcttggcgcgattgccgctggtaaccaacagcgcggagcgcaggcggcgtataccgctggaaaaattaccgctcaggaaatgattgcggcgggtgtgcgctggacattcgcgcctgttcttggcgtcgctcaagatgttcgatggggacgcacttatgaaagtttcagcgaaaatgaaagtattgttacgataatgggcgcgggctttatcaaaggtttgcaggagaacggagccgccgcttgtatgaagcattatcttggagaaggtcagacaatagacggacgcaatcaaggtaacgctcttttggatcgcgccggaattgagaaaattcttccgccctaccgcgcggcaattaaagagggggcgatgtctttaatgccttcgttttccggcgtaaatggaattaaaatgcaccagcacaaagaattgcttaccgatttgttaaaagatgaaatggggtttaaaggttttgttgtttccgactggtcggcaattaaacaattgaccggcggcagttacaaaatgcagattgcaaacgcgattaacgccggagtggatatgtgcatggcgactgacggcagggataattggatatcatttataagtaatcttattaagttagttgaagagggaaaagtccctatgtcgcgcattgacgacgctgttattcgcattctgcgcttcagcaaagtatgggattatttgaaaagcctctga

SEQ ID NO: 25378 - protein, 280 aa, Unknown
  Obtained from environmental sample
  DOMAIN (8)...(232): Glycosyl hydrolase family 3 N terminal domain
  misc_feature (1)..(280): Xaa is any amino acid
MINGFVEESLKTRLGIPVVYGIDAVHGHNNALGATILPHNIALGAIAAGNQQRGAQAAYTAGKITAQEMIAAGVRWTFAPVLGVAQDVRWGRTYESFSENESIVTIMGAGFIKGLQENGAAACMKHYLGEGQTIDGRNQGNALLDRAGIEKILPPYRAAIKEGAMSLMPSFSGVNGIKMHQHKELLTDLLKDEMGFKGFVVSDWSAIKQLTGGSYKMQIANAINAGVDMCMATDGRDNWISFISNLIKLVEEGKVPMSRIDDAVIRILRFSKVWDYLKSL

SEQ ID NO: 25379 - DNA, 852 bp, Unknown
  Obtained from environmental sample
  misc_feature (1)..(852): n is a, c, g, or t
ttgttgtattattgcggaataggagtagggcaaaatcttgaaaaagctgcaaaatggtaccgcgaagcggcggaacagggtgaggctgttgcacagtacaaccttggaatgttgtattttgatggagaatgcgtagcgcaaaattacaatgaggcgtttaagtggttcagcaaggcggcagaacaaggtctcgctgttgcacagtttcgcctaggatttttgtattatcgcgggaaaggcgtagataaaaatcttgaaaaagctgcaaagtggtactacgaggcggcggaacaaggtgacgatgttgcacagtacaaccttggaatgttgtattattacggacatggcgtagtgaaaaattacaaaaaggccaaggattggctccgcaaggcagcggacgggctccgcaaggacgcagacaatggtgaggttgttgcgcagtacgtgctgggggaaatgtatttagatggaaagggcgtagagcgaaattacaaagaggcgtttaagtggttcaacaaggcggcggaacagggtggcgctgaagcgcagtacaaccttggaatgttgtattatcgcgggaagggcgtagataaagactgtgaagtggccgagacttggtttcgcagggcggcaaaccaaggccacgcagaagcgcagaatatcctaggagaaatgtattatacaggagaagacgtagagcaggattatgacgaagccgagaaatggctaagcatggcggccaaaaagggtcacaaagatgcgaagcatacattgagagaggtgttgtgggaggctaaaaatgaactggggggagaagatgataatgaagatgataaatgggacgatgagtaa

SEQ ID NO: 25380 - protein, 283 aa, Unknown
  Obtained from environmental sample
  DOMAIN (101)...(135): Sel1 repeat
  misc_feature (1)..(283): Xaa is any amino acid
MLYYCGIGVGQNLEKAAKWYREAAEQGEAVAQYNLGMLYFDGECVAQNYNEAFKWFSKAAEQGLAVAQFRLGFLYYRGKGVDKNLEKAAKWYYEAAEQGDDVAQYNLGMLYYYGHGVVKNYKKAKDWLRKAADGLRKDADNGEVVAQYVLGEMYLDGKGVERNYKEAFKWFNKAAEQGGAEAQYNLGMLYYRGKGVDKDCEVAETWFRRAANQGHAEAQNILGEMYYTGEDVEQDYDEAEKWLSMAAKKGHKDAKHTLREVLWEAKNELGGEDDNEDDKWDDE

SEQ ID NO: 25381 - DNA, 726 bp, Unknown
  Obtained from environmental sample
  misc_feature (1)..(726): n is a, c, g, or t
atggacccgaattactgcccgggtttcttcaaactgccaagtttaatacacccaaaacgcaacgatattatcatttttgaaaatccttcgtatatttcccgcggaacagcctttgacgttacacagcgtattatttatatgcttactctgacttttattgatattgataaagacgaaaaaggagaacctagggttcattttcttataaaacgctcagtagggtatccgggggacagaattattctggataagggcgatataaagatacgtttttcgggagaagatcgctggatcgatgaaaaggactataacgccgctatggggtggaaacacaatgtaagcagattaatgactcatgagcaatatccggctctttacgcggcggcaaaagcggcggggtggatggatgttaaactaaatccttccgagactttattttcacagtcgtcgggaacaagtgaaatacgatttcccgattatcttgcttatgagaatataagaattgagacgctgcggaaagcgtctcccggcgatacgcgttacgccgctcttttggcaaaacaccgtcttggctggtatgtgcctcagggaagagtcttgccgttaggggacagccgcgataattcaagggacggacgttattttggtcctgtaaaagaatcaaaaataaacggaaagggaatgattgtttattggccgatatggcggtttgggagtattaaatag

SEQ ID NO: 25382 - protein, 241 aa, Unknown
  Obtained from environmental sample
  misc_feature (1)..(241): Xaa is any amino acid
MDPNYCPGFFKLPSLIHPKRNDIIIFENPSYISRGTAFDVTQRIIYMLTLTFIDIDKDEKGEPRVHFLIKRSVGYPGDRIILDKGDIKIRFSGEDRWIDEKDYNAAMGWKHNVSRLMTHEQYPALYAAAKAAGWMDVKLNPSETLFSQSSGTSEIRFPDYLAYENIRIETLRKASPGDTRYAALLAKHRLGWYVPQGRVLPLGDSRDNSRDGRYFGPVKESKINGKGMIVYWPIWRFGSIK

SEQ ID NO: 25383 - DNA, 1689 bp, Unknown
  Obtained from environmental sample
  misc_feature (1)..(1689): n is a, c, g, or t
ttgttcgttatcttttctgaagctcacgcattgcttttggacaacaacctccttttcctcttctttgtgttctttgtcttctccgtgatctttgtgagaaattcttcaatcttatgctatactacccccatgtcccttaactggaaagaaatcaacctaatcctcgaagaactcgctcttgaaggcgcgcagattcagagcgccgtgcagagcgcgtttgacgtgataattctacgcctgcataaaaagggggagacaaaacaattgcttatttcactaagtcccggcgcatgcagactgcatgagactttccgcgccgtaccaaaaagcgataaacccctgcgttttgcgcaatttttgtcctcaaaaatagtaaacggctggataacggaagtgacgcaacttggagacaaccgcattgtgcggataaccgtaaaaaggacaataactaccgatgatgacgagacttctccccaaaccgctattttcaaactgtacatccgtctttggtcaaacgcggcaaattttatcgttaccgatgacaacggcgttgtgttagatgccatgcgccgtctgcccaagcgcggtgaaatcactggtggtaagtatactcccgaaagcatcgaatcaaaacaagtcaaattaaaacccgataatgagcataacatttgctctaatgacatctacgccagtgaaacacgcacctatgaaattcgctctaatgacattagcgctcatgaaacacgctcccagaaaattcgcttgtatgaaatacgctctctccccggcgaaggctcccttcataaaaaaatcgacgagttttacgccgcgcaggnaggctctctttcacttgaagcgttaagggaacaggcaaggagatactgcgagggcagtattggcagaatcagcgcggcgcttgagcggttaagggaaaaagaagcgtcttttacggacgcgaaccgtcttaaaagttacggtgatattatcctttcaaatatcgcaaatattaatcccggcgataaatggctggaaacccggtattgcggcgaaaatatacgcatcgaacttgaaccgcgcgtcaacccttcggcgcaggcgcagaaatactatgagcagtaccgtaaggctaaaaacgggcttgcggatattcagagggaaattgaaagcggagagcgggaattaaaagaagtaaccgaaagattagaacggttgttatgcgaaactaatccgttaattttggcaaaactgttaaagtcaggcggcggagcgcgagcggcttccgctaaaaaggaaaaggcgaggccggggcttacgtttaaacgcggcgattggcttatcattgtgggcagggacgcgggtgaaaacgacgaacttttgcgccgtcatgcaaaggggaacgacctgtggcttcacgcaagggattatcacggctcttatgtgtttataaagcagaaggcgggaaaatcggttccgctggatatcctgctggatgccggaaaccttgcgattttttactcaaagggcaggaataacggcgaaggcgatttattctacacccatgtaaaatatttaaggcgcgccaaaaacggaccaaaggggcttgttatcccaactcaggaaaaaaatctccatgttaaggtcgaagaagagcgcctgcgctcgctggaaaactgtaaagtaacacagtaa

SEQ ID NO: 25384 - protein, 562 aa, Unknown
  Obtained from environmental sample
  DOMAIN (44)...(430): Fibronectin-binding protein A N-terminus (FbpA)
  misc_feature (1)..(562): Xaa is any amino acid
MFVIFSEAHALLLDNNLLFLFFVFFVFSVIFVRNSSILCYTTPMSLNWKEINLILEELALEGAQIQSAVQSAFDVIILRLHKKGETKQLLISLSPGACRLHETFRAVPKSDKPLRFAQFLSSKIVNGWITEVTQLGDNRIVRITVKRTITTDDDETSPQTAIFKLYIRLWSNAANFIVTDDNGVVLDAMRRLPKRGEITGGKYTPESIESKQVKLKPDNEHNICSNDIYASETRTYEIRSNDISAHETRSQKIRLYEIRSLPGEGSLHKKIDEFYAAQXGSLSLEALREQARRYCEGSIGRISAALERLREKEASFTDANRLKSYGDIILSNIANINPGDKWLETRYCGENIRIELEPRVNPSAQAQKYYEQYRKAKNGLADIQREIESGERELKEVTERLERLLCETNPLILAKLLKSGGGARAASAKKEKARPGLTFKRGDWLIIVGRDAGENDELLRRHAKGNDLWLHARDYHGSYVFIKQKAGKSVPLDILLDAGNLAIFYSKGRNNGEGDLFYTHVKYLRRAKNGPKGLVIPTQEKNLHVKVEEERLRSLENCKVTQ

SEQ ID NO: 25385 - DNA, 495 bp, Unknown
  Obtained from environmental sample
  misc_feature (1)..(495): n is a, c, g, or t
atgctggaacgttatgtgtcatccctgaaattcgattcttacgagaatttttacaaagatttttccgtgcttgcaccggaagggtttaactttgcttatgatgttctagacgagcttgccaatacgcacggaagcgacttggggcttttatggtgcgatgagaacggagcggaagcctcttttacattcggcgatttaaaacgcctctcggataaagctggcaatgttataaaaaacgcagggctggtgaaaggcgataccgttatgctgattttaaaacgtcgctgggagtactggcctattttgctcgccctccacaagctaggcgtaatagctatccccacaacgcaccttttaagcacaaaggacataatgtacagatgcaaggcagcggatgttgcggcaattataagcgtggacgatgacgatatgataacgcgagtggacgaagcggaaaaaaccatgaaagcggagtccggttttgcactaaattaa

SEQ ID NO: 25386 - protein, 164 aa, Unknown
  Obtained from environmental sample
  misc_feature (1)..(164): Xaa is any amino acid
MLERYVSSLKFDSYENFYKDFSVLAPEGFNFAYDVLDELANTHGSDLGLLWCDENGAEASFTFGDLKRLSDKAGNVIKNAGLVKGDTVMLILKRRWEYWPILLALHKLGVIAIPTTHLLSTKDIMYRCKAADVAAIISVDDDDMITRVDEAEKTMKAESGFALN

SEQ ID NO: 25387 - DNA, 660 bp, Unknown
  Obtained from environmental sample
  misc_feature (1)..(660): n is a, c, g, or t
ttgatctggtgcttaaagacgcaaggcccttattggacgcccacggttgataaaacaaaatttactattttggcatggtcaaaaggcggatgggtaaatatattttcaaaagaaccggttatggtgccggatgatctccgccgtctgaagatggcaactaacccggacgacacaaaatttaacgcggcgttcaaggccatggggtttaatctggttgaatctgaaattgttgatataggtccgaaaatcgcaagtaacatgatcaacgccttttatcaaacgccggcgtcggtcgccccgctccaattatataaacagcttaataatatgatggaaacgccgatctctccctttttgggcgctattgtcatcaacgcggtcacatggaatagaatcaacaaagacgaccagaatgaaattttacgggttacgcaaaaaatagccgtggattttgaatctgtaatgccgcggactgtgtctaacgccatatccatgatgcagagggacgggcttaaagtgaacaaaataagcccggcgcaggaacaattatggcgcgccgaggtgcagaaggccatgccctcgctgcttggcaatacgtttgatcccgtattgtataataaaataaatgaattattaaggaaatcaagaagcgggcaatag

SEQ ID NO: 25388 - protein, 219 aa, Unknown
  Obtained from environmental sample
  misc_feature (1)..(219): Xaa is any amino acid
MIWCLKTQGPYWTPTVDKTKFTILAWSKGGWVNIFSKEPVMVPDDLRRLKMATNPDDTKFNAAFKAMGFNLVESEIVDIGPKIASNMINAFYQTPASVAPLQLYKQLNNMMETPISPFLGAIVINAVTWNRINKDDQNEILRVTQKIAVDFESVMPRTVSNAISMMQRDGLKVNKISPAQEQLWRAEVQKAMPSLLGNTFDPVLYNKINELLRKSRSGQ

SEQ ID NO: 25389 - DNA, 1512 bp, Unknown
  Obtained from environmental sample
  misc_feature (1)..(1512): n is a, c, g, or t
ttgcggtcgtcatgccgctgggctatgcggtcatcttttgcgttttggatttacgcggcggtcggaaaaagaaaaattcttatggcggccgcgcttctgatcggggccgcggcggcgcttccggcaatcgctaaaattatctggggtttcgatgtgcccgaaccgtttttttcctgggtgaactccctgtacgacctggcttcttttacccgcgttccggtgatactgttcctgattctggcggcgttttccggaatgcccatctttacggcgattggcggcattgccctggtgatgctccaggcggcgggcagggaaccggatgcggttccccacgaaattttttccgcgttgaccgatatggatattatcgccattcccctgtttaccctgaccggttttttcctttccgagagcaaggcgggggaaaggcttgtccgcaccttcaggtgtttcttcggctggctgcccgggggcatggttatcgccgcggttctaatctgcgccttttttacctcgtttaccggggcttccggggtgacaattctggccctcggcgggatactccatctgatccttgttgaaaacaaatacaaggaacattcatctatcggcctgctcacctccgtcgggggcatcggccttatgttccctccgagccttcccattatacttgtcgccagcaccagcaatacgattttgcactttatgaacgtgcccgtgacttacagcattatccattatttcatcggggctattatcccgggaataatactgatactggcaatgattgcctttggcattgtaacttccttaaaggagaagatgccggtggaaccctttaacagcaaagacgcgctgccttcccttaaagaatcatttttggaaattttattgccaataatcctgatactcggctatttttccgggctgctcaccctgtggagggtaagcgctttttcggttgtctatatagcggttgtggaggtctttatcaggaaggacatagcccttaaagacattccaaaggtttttgcaaaagcggtacccattataggcggcgtgctggcgatcctcacgatggcaaaaggcctttcctacgcgattattgattccggcgttcctgacagttttgccgcctggatgcagggagccatcagctcaaagtacgtcttcctcctgctgttaaatctttccctgcttgtggttggctgcctgatggacatattttcagcaatcctcgtcgtgcttccccttatcgtgccgctcggatacgcctacggcatcgatccggtgcatcttggaatcatctttatcatgaatcttgaagttggtttcctgactccgcctgtagggctgaacctctttctggcaagctaccgttttgaaaagccttttataaagatttgccgttatgtgctaccctaccttgcgattcagtttgccgtagtgctgctggtaacctacgtgccgtggctgtcaaacggtttgatacagataactaataaatag

SEQ ID NO: 25390 - protein, 503 aa, Unknown
  Obtained from environmental sample
  DOMAIN (72)...(494): DctM-like transporters
  misc_feature (1)..(503): Xaa is any amino acid
MRSSCRWAMRSSFAFWIYAAVGKRKILMAAALLIGAAAALPAIAKIIWGFDVPEPFFSWVNSLYDLASFTRVPVILFLILAAFSGMPIFTAIGGIALVMLQAAGREPDAVPHEIFSALTDMDIIAIPLFTLTGFFLSESKAGERLVRTFRCFFGWLPGGMVIAAVLICAFFTSFTGASGVTILALGGILHLILVENKYKEHSSIGLLTSVGGIGLMFPPSLPIILVASTSNTILHFMNVPVTYSIIHYFIGAIIPGIILILAMIAFGIVTSLKEKMPVEPFNSKDALPSLKESFLEILLPIILILGYFSGLLTLWRVSAFSVVYIAVVEVFIRKDIALKDIPKVFAKAVPIIGGVLAILTMAKGLSYAIIDSGVPDSFAAWMQGAISSKYVFLLLLNLSLLVVGCLMDIFSAILVVLPLIVPLGYAYGIDPVHLGIIFIMNLEVGFLTPPVGLNLFLASYRFEKPFIKICRYVLPYLAIQFAVVLLVTYVPWLSNGLIQITNK

SEQ ID NO: 25391 - DNA, 852 bp, Unknown
  Obtained from environmental sample
  misc_feature (1)..(852): n is a, c, g, or t
ttgtcggagttgcttaaagagttaaaagaaaaaaatgtttcaaccgtcaatcttcatcagagtgaattgtcggcattgctcgaaaaccttaaagataaaaacgattccgccatcaatcttcatcagaatgagttgtctgcgttgcttaaagaactcaaagataaaaacgattccgccgttcatcttcaccagaatgaattgtcggcattgcttaaagaccttaaagataaaaacgattcctctgttcatcttcatcagaatgaattgtcggcgttactcaaagaccttaaaaataaaaacgattccgccgtccaccagcaacaaactgaattaacagcggctcttaaagacattaaagataaaacctactcctccgtccaccagcagcagactgaattatcggctgttcttaaagatataaaagataaaacccactccgtagtcaatcaacaacagaccgatttaacggcggttcttaaagaccttaaagaaaaaacagacgctactatacatcttcatcaaaacgaattatcgtctaccatcaaagaatttaaagaaaaatcaaacgcggctatttccacccagcaagaaaaccttaacgcgtctctcagcaagcagatgaaagaatggaagcatctttgcgcggatacggaaagggagattattgcggctaacgaaaaacgccttgatgaatacaagaaaagccataacgaggcgtttaaacagcttaccaatcttgccgacgacgccgccaaattggaaagcgaactgcgtctttccatgcaggaaaccgtatcaagagttaataacgattttgagacgtttaagaaagaatccgcctccnnacattga

SEQ ID NO: 25392 - protein, 283 aa, Unknown
  Obtained from environmental sample
  misc_feature (1)..(283): Xaa is any amino acid
MSELLKELKEKNVSTVNLHQSELSALLENLKDKNDSAINLHQNELSALLKELKDKNDSAVHLHQNELSALLKDLKDKNDSSVHLHQNELSALLKDLKNKNDSAVHQQQTELTAALKDIKDKTYSSVHQQQTELSAVLKDIKDKTHSVVNQQQTDLTAVLKDLKEKTDATIHLHQNELSSTIKEFKEKSNAAISTQQENLNASLSKQMKEWKHLCADTEREIIAANEKRLDEYKKSHNEAFKQLTNLADDAAKLESELRLSMQETVSRVNNDFETFKKESASXH

SEQ ID NO: 25393 - DNA, 306 bp, Unknown
  Obtained from environmental sample
  misc_feature (1)..(306): n is a, c, g, or t
ttgtcgcaaattgaaaaacgcataagcgacatgaatgtcgcgcgcgagtggcttgcgcgaacggaagcggaatttatcgcgctggacaaggacgcaaaggctctcctcaaaataacaaagggtgcgattgataaagaaaaaggcaaaacgccgccgaagagcgaaggctctgttactccgcaggagcgcgaagacatactaagattaaaaggtcaaggctggacaaccgaagaaatcgcccaagccgtacaccgttccagaggcgagattgaattagtgctggaacttgcctctaggggcgtttaa

SEQ ID NO: 25394 - protein, 101 aa, Unknown
  Obtained from environmental sample
  misc_feature (1)..(101): Xaa is any amino acid
MSQIEKRISDMNVAREWLARTEAEFIALDKDAKALLKITKGAIDKEKGKTPPKSEGSVTPQEREDILRLKGQGWTTEEIAQAVHRSRGEIELVLELASRGV

SEQ ID NO: 25395 - DNA, 786 bp, Unknown
  Obtained from environmental sample
  misc_feature (1)..(786): n is a, c, g, or t
atgaataaacctccgatcatcaataaaccgcctgtttacttcgatctcgttttcaacatcccgtctgaacgggcctttagttacctgggcgacgaaaaaggcgaggccgctgtagggaggcgtgctatggttccctttgggggcagggactgcctgggttacatagtaagccaaaaggactcccctcccaccggaatgccaagcgaaaccataaagcgcataagacgcgttgtggataaagagcctgtttttgacgggcgggacatagagcttgcaaaatggattgccggctattacttctgcgggctgggtcaggcccttcaggcgatgatcccgtctggtaaacgcgctacggacttttcttcccttgcaggagaagaagaaatcaccgcaagtccccttgccctgtcagacgagcagcagcgggcgttagatgctattatcaagaaagaaacgccagagtcttccggcacggcggcgctgttttacctttttgngattacaggctcaggaaaaaccgaagtgtttctaagagcagcggaagccatgctaaaagaaggaaagtcggttatatatttggtgcccggagattcccttacccatcagaccgcggatgtaatatggaaacgcttcggaaacgccgcggcaacgattcattcggggatgagccccgcggcaaggctttccgaatggatgagaatccgcacaggcaaagtcaaaatcgtggtggggccgaggtcggcggtatttgcgcccctggtaaaacctgggcttgatcatcattga

SEQ ID NO: 25396 - protein, 261 aa, Unknown
  Obtained from environmental sample
  misc_feature (1)..(261): Xaa is any amino acid
MNKPPIINKPPVYFDLVFNIPSERAFSYLGDEKGEAAVGRRAMVPFGGRDCLGYIVSQKDSPPTGMPSETIKRIRRVVDKEPVFDGRDIELAKWIAGYYFCGLGQALQAMIPSGKRATDFSSLAGEEEITASPLALSDEQQRALDAIIKKETPESSGTAALFYLFXITGSGKTEVFLRAAEAMLKEGKSVIYLVPGDSLTHQTADVIWKRFGNAAATIHSGMSPAARLSEWMRIRTGKVKIVVGPRSAVFAPLVKPGLDHH

SEQ ID NO: 25397 - DNA, 657 bp, Unknown
  Obtained from environmental sample
  misc_feature (1)..(657): n is a, c, g, or t
ttgaacaacattcgcggcgaaacaatctatacgccgccgagcggagaaaccgttatacgagaactgttggcaaacctagaacggttcataaacggcgatagcccctttgaccccttgattaaaatggcgctaatgcactatcaattcgtagccatacacccttttgcggacggcaacggaagaaccggcagaatcttattgctgctgtaccttaaactatccgacctattgaacaatccggccatatatataagtgaatacattatcaaaaacaagacggagtactaccggcgtcttcaaaacgtaacggaaaaaagcgagtgggaggattacattttgtatatgctggatatgattgaggaaacttccgcaaaaggcttggaacgattgagaactatcacaacggcgacagccaaaactgcggatgagattaaaaagaaacttccaaagatttattcgaaggatttgatagacgtcttattccgtttgccttacaccaaacgccggcatcttatcgacgccggtatcggaacccctaaaaccgtcggaaattatcttatggcgttggaagaaaaaggatttctgacatcggaaaaggtgggcaaggagaaattatatctaaatcggcggctgttaacgattttggagagcaagtga

SEQ ID NO: 25398 - protein, 218 aa, Unknown
  Obtained from environmental sample
  DOMAIN (1)...(105): Fic protein family
  misc_feature (1)..(218): Xaa is any amino acid
MNNIRGETIYTPPSGETVIRELLANLERFINGDSPFDPLIKMALMHYQFVAIHPFADGNGRTGRILLLLYLKLSDLLNNPAIYISEYIIKNKTEYYRRLQNVTEKSEWEDYILYMLDMIEETSAKGLERLRTITTATAKTADEIKKKLPKIYSKDLIDVLFRLPYTKRRHLIDAGIGTPKTVGNYLMALEEKGFLTSEKVGKEKLYLNRRLLTILESK

SEQ ID NO: 25399 - DNA, 798 bp, Unknown
  Obtained from environmental sample
  misc_feature (1)..(798): n is a, c, g, or t
ttgaccatcctcgcgtggaactgcgtttcctatgtcaaatacggtttgggcaggatgataggccccatacccgaccgcgtttttgccattgccatgccgctgggctacgcggtcattgctttgactttcgcgataaggaagcggacggcaaaagagagaattgtcaccctggccgcgcttcttgtcggcacagcggccgcgcttcccgcaatcgcgaaaataatttggggtttcgatctccctgattctgtttactcctggggcgaaaccatgaaagacgtcacctggctcttccgcgttccgcttatactgttcctgattctggcggcgttttccggaatgcccatttttgccgcgattggcggcatcgccatggtgatactccaggcggccggccttgagccggaagcggcccccattcagattttttccgcgttaaccgaaatggacattatcgccattcccctgtttacccttaccgggtttttcctttcggagagcaaggccggggagaggcttgtccgcaccttcaggtgcttcttcggctggctgcccggaggcatggttatcgccgcggttcttatctgcgccttctttacctcgtttaccggggcctccggcgtgaccattctggccctcggaggaatactccatttgatcctcgtcgaaaacaaatacaaggaaaattcctcaataggcctgctcacctccgtcggggggcataggccttatgtttccccccagccttcgccatcatacttgtcgccagcaccagcaacacgattctgcactttatga

SEQ ID NO: 25400 - protein, 265 aa, Unknown
  Obtained from environmental sample
  misc_feature (1)..(265): Xaa is any amino acid
MTILAWNCVSYVKYGLGRMIGPIPDRVFAIAMPLGYAVIALTFAIRKRTAKERIVTLAALLVGTAAALPAIAKIIWGFDLPDSVYSWGETMKDVTWLFRVPLILFLILAAFSGMPIFAAIGGIAMVILQAAGLEPEAAPIQIFSALTEMDIIAIPLFTLTGFFLSESKAGERLVRTFRCFFGWLPGGMVIAAVLICAFFTSFTGASGVTILALGGILHLILVENKYKENSSIGLLTSVGGHRPYVSPQPSPSYLSPAPATRFCTL

SEQ ID NO: 25401 - DNA, 915 bp, Unknown
  Obtained from environmental sample
  misc_feature (1)..(915): n is a, c, g, or t
atgcataaaacatttttcggaaaagttataacccagcggcagttgatttttatgtcgctgccgctggtgttatatgtactgcttttttcctatgttcccatctggggctggaccatggcttttcagaattaccggccgtcccggacttttttgaaccagcaatgggctgggttacactggtttaaattcctgttcagagattccggctttttgcgggtattgcggaacactttggcgatgagtctgataaatatggctctgggctatatcacggcgattgtattcgctctgttcctcaatgagctgaaaaatatcggattcaaacggatggtgcagaccgtttcctatctgccccacttcctttcatggataatcgttaccggccttgtggcgtccatgctctcggtggaaaacggggcggttaatgattttctgatggctctgggaataattaaagagccggttttatttttaagcgagcctaaatatttctggggcatcgtgggcattacctatgtttggaaagaagtaggctggaataccattatatatctggcggccatggcgggaattgaccccgccctgtatgaagcctcagaaatagacggctgtaaccgctaccaaaaaatgtggcatataaccctgccggggataaaagcgaccattgtcattatgatgatcatgagtataggccatatcctggacgcaggctttgaactgcagtacctcctgcaaaacggattgattcaggatgtgtcggaaactatcgatatttatgtgcttaaatacggcattcagaattttaactattccctggcgaccgcggcgggcatgttcaaaaatgtggttaacattactatgatatttatcgccaactggatcgccaaacgggcaggcgaagcgaggctgatatga

SEQ ID NO: 25402 - protein, 304 aa, Unknown
  Obtained from environmental sample
  DOMAIN (74)...(300): Binding-protein-dependent transport system inner membrane component
  misc_feature (1)..(304): Xaa is any amino acid
MHKTFFGKVITQRQLIFMSLPLVLYVLLFSYVPIWGWTMAFQNYRPSRTFLNQQWAGLHWFKFLFRDSGFLRVLRNTLAMSLINMALGYITAIVFALFLNELKNIGFKRMVQTVSYLPHFLSWIIVTGLVASMLSVENGAVNDFLMALGIIKEPVLFLSEPKYFWGIVGITYVWKEVGWNTIIYLAAMAGIDPALYEASEIDGCNRYQKMWHITLPGIKATIVIMMIMSIGHILDAGFELQYLLQNGLIQDVSETIDIYVLKYGIQNFNYSLATAAGMFKNVVNITMIFIANWIAKRAGEARLI

SEQ ID NO: 25403 - DNA, 348 bp, Unknown
  Obtained from environmental sample
  misc_feature (1)..(348): n is a, c, g, or t
atgacctattaccttaaatcaaaaatcgaacattatgtttttaattccgtcaacgccgccgttatgctgctcattatgtttatcaccgtgtacccgttctggaataccatcgccgtttcatttaacgcggcggcggatactacccgcggcggcattaccttcaggccgcgggtttttaccctccagaattaccgggcggtgtttaccagcggcacgatttaccatgcctttttcatatcagtagcccgtacggtcattcaaactattaccggcgtattttttaccagtatgctggctttttgccctaagccgccgggattatgtttttccgcaaggcatttacgctga

SEQ ID NO: 25404 - protein, 115 aa, Unknown
  Obtained from environmental sample
  misc_feature (1)..(115): Xaa is any amino acid
MTYYLKSKIEHYVFNSVNAAVMLLIMFITVYPFWNTIAVSFNAAADTTRGGITFRPRVFTLQNYRAVFTSGTIYHAFFISVARTVIQTITGVFFTSMLAFCPKPPGLCFSARHLR

SEQ ID NO: 25405 - DNA, 348 bp, Unknown
  Obtained from environmental sample
  misc_feature (1)..(348): n is a, c, g, or t
gtgtttgtccgtacagggacccacatcgataaaattatgtacgtcagttttcttactggaaatattatttattacagtatcggaattttgtttgcgcttttgttcaaagataacagggctttttgtaaatatttttgcccgatcaccgtattcctaaaacccacgagttattttgccctttcgcgaagaagagtaaatcaggaaaagtgtattgtgtgcaataaatgcgtaaaaatatgccccatgggcgttgatatgcttgataaaaaattcagccgtaaaaacggaaccgaatgtatccaatgtatgaaatgtgtaatggaatgtcctaagcaggcattggtatag

SEQ ID NO: 25406 - protein, 115 aa, Unknown
  Obtained from environmental sample
  DOMAIN (63)...(86): 4Fe-4S binding domain
  misc_feature (1)..(115): Xaa is any amino acid
MFVRTGTHIDKIMYVSFLTGNIIYYSIGILFALLFKDNRAFCKYFCPITVFLKPTSYFALSRRRVNQEKCIVCNKCVKICPMGVDMLDKKFSRKNGTECIQCMKCVMECPKQALV

SEQ ID NO: 25407 - DNA, 663 bp, Unknown
  Obtained from environmental sample
  misc_feature (1)..(663): n is a, c, g, or t
atgaggtataaaaaaaaaatgactgtaaaagttattgtcttcgattacggcggcgttatttgctttttgccttctcctgaaatgagaagcgaaattgtaaggcttagcggcttgtctgcggaagtcttgtgggaactggatcggaaataccgaggcgagtgggacaggggaacctatgacgggatcgggcattaccggttcattctggcaaaggcgggcgtctctctcaatgacgagagccttgcgcggattgcgcgggccgatattgaaagctggaaacagataaatccggacacggtcaagttgatacgggacattaaagccgcgggcttaagtgttgggattctttccaatataccgcgcgattttcccagggacatcgcgtcgcatagcgacggcgcgtcgcatagcgacgcgatgccggtatttgccgaagcggacattgccgtttattcctgcgaccttggtataataaaacccgaaacgggtatttacgaaaaactacgggaaaaagccggctgtatatatgaagatattgttttttttgatgataaagcggataatgtagcacgggcaaaagaacttgggatacaggcgtttctgtgggaaggagccgggcctgcccgtaaactggtttccggcatagcaggagtggcgctataa

SEQ ID NO: 25408 - protein, 220 aa, Unknown
  Obtained from environmental sample
  DOMAIN (9)...(205): haloacid dehalogenase-like hydrolase
  misc_feature (1)..(220): Xaa is any amino acid
MRYKKKMTVKVIVFDYGGVICFLPSPEMRSEIVRLSGLSAEVLWELDRKYRGEWDRGTYDGIGHYRFILAKAGVSLNDESLARIARADIESWKQINPDTVKLIRDIKAAGLSVGILSNIPRDFPRDIASHSDGASHSDAMPVFAEADIAVYSCDLGIIKPETGIYEKLREKAGCIYEDIVFFDDKADNVARAKELGIQAFLWEGAGPARKLVSGIAGVAL

SEQ ID NO: 25409 - DNA, 306 bp, Unknown
  Obtained from environmental sample
  misc_feature (1)..(306): n is a, c, g, or t
ttggtcagattcggccgagacacaaaattgtacgttaagttccttaccaaattcaaaaatgacacaaaacttgatgaacttgaagcggctattgcggcaggagatatggaaaaagccaaaagtgcggcccatacgataaagggccttgccgcgaacctgtcactagcggaactgtacaaacaatgcctcgcactggaaacccagataaaaggagggacggcggatcccgcccagttaaatacggtaaaaaccgctttcgcgaaaacattacaggaaatagacagggttataaccgagaatggctaa

SEQ ID NO: 25410 - protein, 101 aa, Unknown
  Obtained from environmental sample
  DOMAIN (9)...(96): Hpt domain
  misc_feature (1)..(101): Xaa is any amino acid
MVRFGRDTKLYVKFLTKFKNDTKLDELEAAIAAGDMEKAKSAAHTIKGLAANLSLAELYKQCLALETQIKGGTADPAQLNTVKTAFAKTLQEIDRVITENG

SEQ ID NO: 25411 - DNA, 591 bp, Unknown
  Obtained from environmental sample
  misc_feature (1)..(591): n is a, c, g, or t
atggctaacaatacccccaccgttatgatcgtcgatgacattgatatcaatgtcgagatgcttcaggaaatattaaaagataaatatgaaataatcacggcaaacaacggtaaacaagcgcttgacctcctccgtaccgcggttattctgccaaaactcatcctcctggacgttatgatgccggtaatgaacggaccccaaatgtttgaaatcatgaaggaagacagcacatttaagaggattccggttattttcatcacggcgaaaggggattcggaaaccgagcttctggcagccggagccgtggattttatcaacaagcccctcgtgccggagattgtccagcttagggtacggaaccaaatcgaactgaagaactacagcgacagccttgaggaaatggttgcggaaaaaacagccgaggcgacaaaaacccttgataacgccctgcaaggcctggccaacataattgagcacagggacttggaatccggggaacatgtcaaacggactcagttgtacgtacaagcgctttgcaattacctgatattaaacggatcggaatatgccgaacaggtgtttaacctttaa

SEQ ID NO: 25412 - protein, 196 aa, Unknown
  Obtained from environmental sample
  DOMAIN (6)...(119): Response regulator receiver domain
  misc_feature (1)..(196): Xaa is any amino acid
MANNTPTVMIVDDIDINVEMLQEILKDKYEIITANNGKQALDLLRTAVILPKLILLDVMMPVMNGPQMFEIMKEDSTFKRIPVIFITAKGDSETELLAAGAVDFINKPLVPEIVQLRVRNQIELKNYSDSLEEMVAEKTAEATKTLDNALQGLANIIEHRDLESGEHVKRTQLYVQALCNYLILNGSEYAEQVFNL

SEQ ID NO: 25413 - DNA, 906 bp, Unknown
  Obtained from environmental sample
  misc_feature (1)..(906): n is a, c, g, or t
gtggttatttccctggaaatgtttattcccggagtagcgcgttacaactattattttaacttatcaatccgtatgctggtgacgtacagccttgtcttttttgtgatggttgtaatagaaagcacccgtaaaaccaaagaccgcctgatagaaaaccaaaaccgccgcctgcaggaacttaaaggagaggccgaggccgctaaccgcaccaaaagtaactttcttgccagcatgagccacgagatacgcactcccatgaacgccattaccggcatggcggaactgctgctgcgaggagatctttccgatgaatcccgcggttatgcgcaagatattaaacacgcggggaataaccttatctcaatcatcaacgacattttggatttttcaaaaattgaggccggcaaactggaaataatccccgtcaaatacctgctttcatctcttatcaacgattcagtcaatattatactcatgcgcatcggggaaaagccccttcggtttttcacaaatatagacggcaatattcccaacagccttgtaggagacgaagtgcgtctgcggcagatactccttaaccttttgtccaatgccgtaaagtattccgaaaaaggaaatatcggattatccattatcatacagaaaagtgaagaaaaaaaagtctggcttaaaattacggtcaccgatacaggtaagggcataaaaccagaggatcaggaaaaacttttcggagactttgttcaggttgatactaagaagaacaggggcattgaggggacgggtttgggtctggcaattaccaaacggctgtgccttcttatgggaggggatataaccgtggaaagcgaatacggcaaaggcagtactttcacggttaccattccgcaagagatttttttcacctga

SEQ ID NO: 25414 - protein, 301 aa, Unknown
  Obtained from environmental sample
  DOMAIN (70)...(135): His Kinase A (phosphoacceptor) domain
  misc_feature (1)..(301): Xaa is any amino acid
MVISLEMFIPGVARYNYYFNLSIRMLVTYSLVFFVMVVIESTRKTKDRLIENQNRRLQELKGEAEAANRTKSNFLASMSHEIRTPMNAITGMAELLLRGDLSDESRGYAQDIKHAGNNLISIINDILDFSKIEAGKLEIIPVKYLLSSLINDSVNIILMRIGEKPLRFFTNIDGNIPNSLVGDEVRLRQILLNLLSNAVKYSEKGNIGLSIIIQKSEEKKVWLKITVTDTGKGIKPEDQEKLFGDFVQVDTKKNRGIEGTGLGLAITKRLCLLMGGDITVESEYGKGSTFTVTIPQEIFFT

SEQ ID NO: 25415 - DNA, 783 bp, Unknown
  Obtained from environmental sample
  misc_feature (1)..(783): n is a, c, g, or t
ttggcagacattgcaaacgcggtaaacgctggcaaaagttttctgaacaaaactgttatgctcggcgcaaacattatgctcaacgatacggcaaactggctaaactgggaaagcaatcctcccaaaaacaaatggatacctataggaaccaaagaaaatagattcgccggaacctttaacggaaatggttttgctataagcggaatttatataaataattcaaaggacgagcaaggtttgtttggtgctatagatataaaaggaagtgtaaaaaatcttggcgtagttgcttcttacattaaagggagagataaaatcggtggaattgcagggattaatttgggcaatatatatggttgttatttcacaggcatggcaacagggtttgacgatgttggggggattgcaggcgaaagcgtatcgtacataaaaaatagttattctgggggtttggtagcaggagctaacaatgtgggtggaattgcgggttccactttcaaaaattatatatactatagttattctaccagcatagtgacgggaacaaaatctaatgtaggtggattggtggggagtggtaagaatcatagtataagcggaagctactttgctggaatggcaattggtccaaatgggctggtggaggagaaggagcgaaaggaaacttttaaagaatgggataaaaaaacttggggcataaacgacacaataaactgcggatatccgtatttgctaaattttgttcatagcttatctgtgatgaacagagattgcaaaccttag

SEQ ID NO: 25416 - protein, 260 aa, Unknown
  Obtained from environmental sample
  misc_feature (1)..(260): Xaa is any amino acid
MADIANAVNAGKSFLNKTVMLGANIMLNDTANWLNWESNPPKNKWIPIGTKENRFAGTFNGNGFAISGIYINNSKDEQGLFGAIDIKGSVKNLGVVASYIKGRDKIGGIAGINLGNIYGCYFTGMATGFDDVGGIAGESVSYIKNSYSGGLVAGANNVGGIAGSTFKNYIYYSYSTSIVTGTKSNVGGLVGSGKNHSISGSYFAGMAIGPNGLVEEKERKETFKEWDKKTWGINDTINCGYPYLLNFVHSLSVMNRDCKP

SEQ ID NO: 25417 - DNA, 321 bp, Unknown
  Obtained from environmental sample
  misc_feature (1)..(321): n is a, c, g, or t
ttgcccaaaaggggttggcgtttgccaacaatggcaaattttaaagcattgatggaaacggttgatggttctgcaaaatttctcaaggcagctaacggatggggtgaattggacggtggcatagatatttacggtttttcagctctgccgggcggtgacggctattcgcgtggcgggttctacggtggcggcgaagtcggctattggtggagtaccgataaagatggtctttacttcactattaacaaagaagacaaacactctcttaataacggcacatctagaaactcgctgctcagtgtccgttgcattcaaaactaa

SEQ ID NO: 25418 - protein, 106 aa, Unknown
  Obtained from environmental sample
  misc_feature (1)..(106): Xaa is any amino acid
MPKRGWRLPTMANFKALMETVDGSAKFLKAANGWGELDGGIDIYGFSALPGGDGYSRGGFYGGGEVGYWWSTDKDGLYFTINKEDKHSLNNGTSRNSLLSVRCIQN

SEQ ID NO: 25419 - DNA, 480 bp, Unknown
  Obtained from environmental sample
  misc_feature (1)..(480): n is a, c, g, or t
gtggagggcgccacggtaactaccaaatggggcccggtcaatacggatcacattctctttatcgcggccggggccttcaatatcagcaagccttccgaccttatccccgaactccagggccgtttccccctgcgggtagagttggattccctgggcaaagacgaattcttgcgcattttaaccgagccgaaaaacgcccttacaaggcagtacaccgaattgctggccaccgagaacgtccaaatcgaatttgccccagacgcgatagagcgcttggctgcccttgccgcggaggtcaattccaggctggaaaacatcggcgcgcgccgccttcatacgatcatggaagcgcttttggaagagctttcatttgaagcgtccgacattgccccggcaaagattccgattaccgtggattatgtaaacgagaagctggcggacatagtaaaggatcaggaccttgggcgatatattttataa

SEQ ID NO: 25420 - protein, 159 aa, Unknown
  Obtained from environmental sample
  misc_feature (1)..(159): Xaa is any amino acid
MEGATVTTKWGPVNTDHILFIAAGAFNISKPSDLIPELQGRFPLRVELDSLGKDEFLRILTEPKNALTRQYTELLATENVQIEFAPDAIERLAALAAEVNSRLENIGARRLHTIMEALLEELSFEASDIAPAKIPITVDYVNEKLADIVKDQDLGRYIL

SEQ ID NO: 25421 - DNA, 360 bp, Unknown
  Obtained from environmental sample
  misc_feature (1)..(360): n is a, c, g, or t
gtggcaagtgccgaagttataagggaggaagtttttatgaacagttttgccaaaacgattgatttattgcaccgggccatggacgtcggagtggtacgccgccaggtcatcgccaataatatggccaacgccaatgttcccaatttcaagcggagcattgtgaattttgaaagcgagcttaagcgggccctggaaaccgaaaagcaaaggcccgctttggaactgaccgtgaccaatcccaagcatatccccaactggaaagagcgggattaccgggacgtgcagattcgcagggttctggactataccagtacctataacaataacggaaacaacgttgacccggagcaggaatcatga

SEQ ID NO: 25422 - protein, 119 aa, Unknown
  Obtained from environmental sample
  DOMAIN (20)...(50): Flagella basal body rod protein
  misc_feature (1)..(119): Xaa is any amino acid
MASAEVIREEVFMNSFAKTIDLLHRAMDVGVVRRQVIANNMANANVPNFKRSIVNFESELKRALETEKQRPALELTVTNPKHIPNWKERDYRDVQIRRVLDYTSTYNNNGNNVDPEQES

SEQ ID NO: 25423 - DNA, 924 bp, Unknown
  Obtained from environmental sample
  misc_feature (1)..(924): n is a, c, g, or t
gtgctcaggatcgcccaggaagggataaaggttgttaccaccaacggctacgtgcaggtagtagacgaagctaccgccaggcgtatgaggggcatccttatcagggaagaccttattcccaaaggcgtggatccctggcaagtttttgacaaagagcgttggacaattaccgactttgagcggaatgtaaattttcaacgggcccaaaagcagatgatcatcgaccatatcaaggctcttgaagatgtggatgacgtcagtataaacattgtgtggccggaaagggtactctttcgctccgaggagaagccggtaaccgccagcgtggtcatcgtccccaaacctggaagcgacattacggagaaccggaaaaaaatcgaaggcattcagaagctcctcaaattcaccgtggaggggctacaagacgataatatcgtaatcaccgatcaaagaggccttcagcttaacgattttgagggcatggccggcatagacaggcaaaacctgattgaacgggaaaacaagttcatccagaccctggaggccaaataccgggctctggtacttggctcgctgcaacagactttttccaccgacagggtcagggacctcaacatcaagattgatatggatatgtccaaaaaaacaagccaaaaaaaggagtatttccccataaccataaagccgcggactccgggatccccctatgacgactcccaactggtagaatccatacttcgctcggaaagcgtttcggaaacaaagtgggaaggaacaggctataacccagaagggccggccggagtcgaaggctcggtccccccggcttttaaggatatgtccaacctttatggcaggatgaaccagtcaacgcttgtccataaccaggaaataacgaaaaggatacgcactcggccgatctga

SEQ ID NO: 25424 - protein, 307 aa, Unknown
  Obtained from environmental sample
  DOMAIN (1)...(158): Secretory protein of YscJ/FliF family
  misc_feature (1)..(307): Xaa is any amino acid
MLRIAQEGIKVVTTNGYVQVVDEATARRMRGILIREDLIPKGVDPWQVFDKERWTITDFERNVNFQRAQKQMIIDHIKALEDVDDVSINIVWPERVLFRSEEKPVTASVVIVPKPGSDITENRKKIEGIQKLLKFTVEGLQDDNIVITDQRGLQLNDFEGMAGIDRQNLIERENKFIQTLEAKYRALVLGSLQQTFSTDRVRDLNIKIDMDMSKKTSQKKEYFPITIKPRTPGSPYDDSQLVESILRSESVSETKWEGTGYNPEGPAGVEGSVPPAFKDMSNLYGRMNQSTLVHNQEITKRIRTRPI

SEQ ID NO: 25425 - DNA, 1614 bp, Unknown
  Obtained from environmental sample
  misc_feature (1)..(1614): n is a, c, g, or t
ttgaattatttaaccgcactgtacaaaacaggagaaaaagaatacagacggcaaaaattacttttgcatttgaccgaagaagaaagaacgtatatacacaaacacccgattgtattgattgccgccgaatacggtaattatccggttagtttttacaataaatatgaaaaagaatggcaggggatttcgcatgatgtattgaaagaaataaatcagcttacaggtttaacttttaaaatagcaaataatcaaaaaaccgatttacctgaattaacgcaaatgctgaaaaacgggacagtgtccatgataagcgaactttatcgtataaaagaacaaaaggattcatttttattggcggaaacatcgataatggaagataaccccacgttaatttcaagatcggactatccggcaatttatatcaatgatattttgagtatgaaaataggattaattaaaggaaccgcgtatgcgtctttattcaacgaatggtttccggagcataaaaaaattgtggaatatgaaaactctatcgacgcttttaacgctttggaacacggcgatgtagaagctgtaatggcgaatttcagtctgcttcttatgctgaccaattatcatgagcgctcaaactttaaggcaaactttgtgtttgattttcattttgaatacacttacggattttataaagaggaaacaattttacgttctattgttgataaagctctgttccttattgatacggtagggatttcagggcaatggatgcgaaaaacttttgattacaacgcaaaactggtgcgttctcagcatccgtggttaatcggcgcggcagttttacttttttgtgtaattgtgtttttgatcgttttgttccaaagaaaaaaaattattgaaaaatggcttgaaggtattgtatataagcgcactacggagctttatgaacagcatatacttgtaagtttgatcaatgatatagcggttgttctgctggaatcggaggcgggagattatttaacatcgataaacaaaggtatggagatgattgcccattatgtgaaagtagaccgtgtgagtatttggcaaaactaccaaaaagaagacggaaacctttactgcaagcttgcgtgtcaatgggcgaataagggactgcctaagctggaagtgggtacatcttactcgtatcatgacagtatgccaaactgggaaattctttttaacaagggaaaatatgtaaactctattattgatgacattacagagcctgaacgttcgatgttaatggaattcacgattcaatccttactagctcttccgatttttataaaggagaaattttggggttatatcagttttgatgattatcataaaaagcgcattttcccggagactgaaatgttttccctgcgctcgtggggtttgcttgccgttggaacgattcagcgcggccaaattgcttttgatatgcagagtaccctaacagagcttgtaaaactaaagcaggattttggaaactgccccttaccgtccgcgaaaggagggcaaaccgccgcaaaaatccaacatttcctttgcccaatattgaacccactcaaaaatactctaccccccaattaa

SEQ ID NO: 25426 - protein, 537 aa, Unknown
  Obtained from environmental sample
  DOMAIN (38)...(257): Bacterial extracellular solute-binding proteins, family 3
  misc_feature (1)..(537): Xaa is any amino acid
MNYLTALYKTGEKEYRRQKLLLHLTEEERTYIHKHPIVLIAAEYGNYPVSFYNKYEKEWQGISHDVLKEINQLTGLTFKIANNQKTDLPELTQMLKNGTVSMISELYRIKEQKDSFLLAETSIMEDNPTLISRSDYPAIYINDILSMKIGLIKGTAYASLFNEWFPEHKKIVEYENSIDAFNALEHGDVEAVMANFSLLLMLTNYHERSNFKANFVFDFHFEYTYGFYKEETILRSIVDKALFLIDTVGISGQWMRKTFDYNAKLVRSQHPWLIGAAVLLFCVIVFLIVLFQRKKIIEKWLEGIVYKRTTELYEQHILVSLINDIAVVLLESEAGDYLTSINKGMEMIAHYVKVDRVSIWQNYQKEDGNLYCKLACQWANKGLPKLEVGTSYSYHDSMPNWEILFNKGKYVNSIIDDITEPERSMLMEFTIQSLLALPIFIKEKFWGYISFDDYHKKRIFPETEMFSLRSWGLLAVGTIQRGQIAFDMQSTLTELVKLKQDFGNCPLPSAKGGQTAAKIQHFLCPILNPLKNTLPPN

SEQ ID NO: 25427 - DNA, 705 bp, Unknown
  Obtained from environmental sample
  misc_feature (1)..(705): n is a, c, g, or t
atgaatgacggtaaagtgcaattgagttttactttgccaatcaaggatgacgagaagggagttgagacagcgcggcagctggcaaagaaaatgggctttgaggatccggccgtcgcctatcacgctcctttggacagggaattttctttctatgtgatatacggaagcaccgcccatagcgtcgattatacaggtatccatgttcagactattgacgctgaaataatggatatggcgcagatcgatcgtttcatcgccgaacgcatcgggcggaaaattatactcgtgggggcttcaaccggcactgatgcgcatacggtgggcatcgacgcaatttttaaccgcaagggctttgccgggcattacggccttgagcgctatgagatggtcgaggcgtacaatttaggcagccaggtaccaaacgaggattttatccgcaaagcgagggagcttaacgccgatgcgctcctggtctcccagacggttacgcaaaaagacgtgcatataaaaaacctgacggaattgattgaattgcttgaggctgaaggattgcgcgacagattcatcgtggcctgcggcggggcccgcatcacaaatgaattggctaaggaattaggttatgatgccggtttcggctccggaaaattcgccgaggatgtggcatctttcattgttacgganatggcgaggcgaanatccgtttaa

SEQ ID NO: 25428 - protein, 234 aa, Unknown
  Obtained from environmental sample
  DOMAIN (93)...(226): B12 binding domain
  misc_feature (1)..(234): Xaa is any amino acid
MNDGKVQLSFTLPIKDDEKGVETARQLAKKMGFEDPAVAYHAPLDREFSFYVIYGSTAHSVDYTGIHVQTIDAEIMDMAQIDRFIAERIGRKIILVGASTGTDAHTVGIDAIFNRKGFAGHYGLERYEMVEAYNLGSQVPNEDFIRKARELNADALLVSQTVTQKDVHIKNLTELIELLEAEGLRDRFIVACGGARITNELAKELGYDAGFGSGKFAEDVASFIVTXMARRXSV

SEQ ID NO: 25429 - DNA, 924 bp, Unknown
  Obtained from environmental sample
  misc_feature (1)..(924): n is a, c, g, or t
ttgttcttcttcctttgttattttttattttttatttgttattttatctttatttgtcgcatatttgtcgcgccttgttttgtacaatattttataaaaggcggatttttttgtatgaataaaaccaataaaatcaaagaaagacgcaacggctcaacggtacgtttttccattggggcaaaattaataataattatttcgataatcgtactggtttctctcggttccattaccgccctcgtgtcatggctggtacatgaagacctgaaagtatccgccgaagaaaacaactttgaagtgaatcgccgcgcgtctgctgaaacagaacagatccttgaaaaaatgcgattactttccataacattctcccgcatagctgctcttacggaacgcgatggatcagcacagaaagaagtaaattatttttttactcaaaacccgcaaattgcggctcttttttatacaacaacctccgctgaaaccacaagacaaggttttctttcggacaaaatatttatcaacgagcgtttttttatttcacggggaattgatacaaatcttgtaaatgcttttcgcggcaataatgttaaaacgcgggaaaacgccgagatgggacagacaactcttataaacgcctcgccgcagtttaacaaagagaaaagctcaacatatcttgccgctatgttcttcccgatacaggaaggaagcggctgcgttttattctcaagcgaaaacctgaacgaaagtttcggcatgggcgtaaatacatcatatctaataaacgccgacggcgatattatcgcggatgccgacatagaaagagtaaaaactcaaacgaatctgtcggaacaggaaattatcagacagatatttaacagccctgaccgcagcaagcagatgttagccgaacttgatgttcagtaa

SEQ ID NO: 25430 - protein, 307 aa, Unknown
  Obtained from environmental sample
  misc_feature (1)..(307): Xaa is any amino acid
MFFFLCYFLFFICYFIFICRIFVAPCFVQYFIKGGFFCMNKTNKIKERRNGSTVRFSIGAKLIIIISIIVLVSLGSITALVSWLVHEDLKVSAEENNFEVNRRASAETEQILEKMRLLSITFSRIAALTERDGSAQKEVNYFFTQNPQIAALFYTTTSAETTRQGFLSDKIFINERFFISRGIDTNLVNAFRGNNVKTRENAEMGQTTLINASPQFNKEKSSTYLAAMFFPIQEGSGCVLFSSENLNESFGMGVNTSYLINADGDIIADADIERVKTQTNLSEQEIIRQIFNSPDRSKQMLAELDVQ

SEQ ID NO: 25431 - DNA, 642 bp, Unknown
  Obtained from environmental sample
  misc_feature (1)..(642): n is a, c, g, or t
atgatacagaaatacccgaaagaacatctgctttttgccgaaggcgaaaccgggcaaaccatgtatatcattcaggaaggttcggtaaaaataacaaaaattgttgacaataaagaaattatccttgcggttctgggcaaaggcgatatttttggcgaaatggcgctgttggaagacaagccccgcgccgccaccgccgaagtttacgaagattgcacattattggcggttaaccgtgataacttctcaaaccttataaaagatcaacccgacatggtagtccgcatggcaactttaatgtccgagcgcatttggctgctctaccgccagcttgataacacatttatagataatccgttagggcgcgtttatgacgctctgcttatccagcttgaaaaaaaccgtgttaacataaacagcgatgaaccgtatcaatgcaacttcggtattaaggaattaatcggtatggcgggcatgcaggaatccgagaacaaataccttgaccgtaaaatcgccggtgacggaaaactgacctttaaggacgataaaattcagataaataaaatttcggacatactgaaagaatccacattctaccgcagagcgcanaaaatatccgaaaacagaataaatagcaaataa

SEQ ID NO: 25432 - protein, 213 aa, Unknown
  Obtained from environmental sample
  DOMAIN (2)...(91): Cyclic nucleotide-binding domain
  misc_feature (1)..(213): Xaa is any amino acid
MIQKYPKEHLLFAEGETGQTMYIIQEGSVKITKIVDNKEIILAVLGKGDIFGEMALLEDKPRAATAEVYEDCTLLAVNRDNFSNLIKDQPDMVVRMATLMSERIWLLYRQLDNTFIDNPLGRVYDALLIQLEKNRVNINSDEPYQCNFGIKELIGMAGMQESENKYLDRKIAGDGKLTFKDDKIQINKISDILKESTFYRRAXKISENRINSK

SEQ ID NO: 25433 - DNA, 600 bp, Unknown
  Obtained from environmental sample
  misc_feature (1)..(600): n is a, c, g, or t
atgaatgaaagccgtatttctatcttacttccccagatacagccgcattttttatacacgccccttgccgtcatatcaaggctatgcgataaagaccctgccgaggcaaaaaaagcgacaataaatttttcaaattacctaagggcgaatatgaatttattggaacgcagtgaaccaatcccatttgagaatgaactaaaccacacgataggctttttgaatttggaaaaagccatgtacggcgaagcgttaaaggtaatatacgacatacaaacaaaaaactttacgcttccggctctcactatgcaacccattgttgaaaacgcgatcaaacacggcatagggaaaaaagaaggcggcggcactgttaccatttcaacaaaagaaacaaacagcggttatttggttattataacagatgacggcgcgggatttgaacaagggaaaattgccgatgacggacaacaacacatcggaattaacaatgtccgtctaaggctttccgcgcaatgcggcggttcgcttgaaatagaaagcaaacctggcgcggggacaaccgcctccataagaattccaaaacaggaggcgcagttaaaatga

SEQ ID NO: 25434 - protein, 199 aa, Unknown
  Obtained from environmental sample
  DOMAIN (93)...(194): Histidine kinase-, DNA gyrase B-, and HSP90-like ATPase
  misc_feature (1)..(199): Xaa is any amino acid
MNESRISILLPQIQPHFLYTPLAVISRLCDKDPAEAKKATINFSNYLRANMNLLERSEPIPFENELNHTIGFLNLEKAMYGEALKVIYDIQTKNFTLPALTMQPIVENAIKHGIGKKEGGGTVTISTKETNSGYLVIITDDGAGFEQGKIADDGQQHIGINNVRLRLSAQCGGSLEIESKPGAGTTASIRIPKQEAQLK

SEQ ID NO: 25435 - DNA, 795 bp, Unknown
  Obtained from environmental sample
  misc_feature (1)..(795): n is a, c, g, or t
atgaacatactcgccatagacgataacgttttggctctggaagaactcgtttcgtcaattaaagaagcgtgtcctgacgatgatattcacagtttttccaagccgtctgaactgcttgattttgctaaagagaatccatgcgacatagcctttttggacattgaaatgtgggggatgaacggcattgaactggcgcaaaagcttaaagaaattcacggcaaaatcaacatcgtattcgtaaccggatattctaaatatgcgctggattcctatacggttaaggcaagcgattatgtaatgaagcccgttaccaaagaagcgattaaagatgctttacaaaatcttcgctgcccggttcagaaaaaatccgataaaagggtgcgtgtgcagactttcggtaattttgaagtttttgtagacggaaacccggtttcgtttagccgttccaagacaaaggaattatttgcctatcttataagcaggaagggagcgttatgcagcaataatgaaattattgccgaaatatgggaagaaaaggacgatacatccgccctgcaaagccacttccggcatttagtagcggacttaattaagacatttcaatcattgaatgtcgaagacataataatcaaggaatggaaatatttagcggtagcgcctgataaactgtcatgtgatttgtatgaagtgctcaatggtagcgcaagagctcttaactcttacaccggtgaatttatggcgcaatacagttgggctgatatttacgccgcttatttacaaaatagaagaaaataa

SEQ ID NO: 25436 - protein, 264 aa, Unknown
  Obtained from environmental sample
  DOMAIN (1)...(113): Response regulator receiver domain
  misc_feature (1)..(264): Xaa is any amino acid
MNILAIDDNVLALEELVSSIKEACPDDDIHSFSKPSELLDFAKENPCDIAFLDIEMWGMNGIELAQKLKEIHGKINIVFVTGYSKYALDSYTVKASDYVMKPVTKEAIKDALQNLRCPVQKKSDKRVRVQTFGNFEVFVDGNPVSFSRSKTKELFAYLISRKGALCSNNEIIAEIWEEKDDTSALQSHFRHLVADLIKTFQSLNVEDIIIKEWKYLAVAPDKLSCDLYEVLNGSARALNSYTGEFMAQYSWADIYAAYLQNRRK

SEQ ID NO: 25437 - DNA, 336 bp, Unknown
  Obtained from environmental sample
  misc_feature (1)..(336): n is a, c, g, or t
ttgttgcgcatttgtcgcgccttgtttgataaggtacaaattggagttattatgtccgctgaatttcaaccagttactgtccacctaaaaaaagacgcgtatatttttgtggaaggaaaacaaaacgccgacnagttttatattgtcaaacatggcgacgtacggattctccgcgaagcgttaaacgatgaaataggaagcgtggtaggacccggagaaatgtttggtttgattttcacaatggcggcgcatggttatattgaatcggcggtagccatgtcaaatgttaccttttgctgcggtgaaacggaacaatatggaagccttatcccgtaa

SEQ ID NO: 25438 - protein, 111 aa, Unknown
  Obtained from environmental sample
  DOMAIN (26)...(110): Cyclic nucleotide-binding domain
  misc_feature (1)..(111): Xaa is any amino acid
MLRICRALFDKVQIGVIMSAEFQPVTVHLKKDAYIFVEGKQNADXFYIVKHGDVRILREALNDEIGSVVGPGEMFGLIFTMAAHGYIESAVAMSNVTFCCGETEQYGSLIP

SEQ ID NO: 25439 - DNA, 480 bp, Unknown
  Obtained from environmental sample
  misc_feature (1)..(480): n is a, c, g, or t
atggacagccgttttatgatggcaagtatgggcagcgttgtaggcgaaaaaattacccgtgccattgaatacgccactgccaataaaatgcctgtaatcattttctcggcgtcaggcggagctcgtatgcaggagggaattatctcccttatgcagatggctaaaacctcaggcgctgtagctcgtcataccgaggcaggacagctttacatttcagttattacagacccgaccacaggcggcgttaccgcttctttcgctatgcttggaaacataattcttgcggaaccaggagtaactttgggatttgcgggaaaacgtgtcattcaggatactatcggcgctgtgctacctgaaagattccagacttcggaatttgtaggcgagcacggatttgttgacgcgatatgctgccgcagtgaactacctgatatgatcgcaaagataataaagcttcacggttataaaggaggacaataa

SEQ ID NO: 25440 - protein, 159 aa, Unknown
  Obtained from environmental sample
  misc_feature (1)..(159): Xaa is any amino acid
MDSRFMMASMGSVVGEKITRAIEYATANKMPVIIFSASGGARMQEGIISLMQMAKTSGAVARHTEAGQLYISVITDPTTGGVTASFAMLGNIILAEPGVTLGFAGKRVIQDTIGAVLPERFQTSEFVGEHGFVDAICCRSELPDMIAKIIKLHGYKGGQ

SEQ ID NO: 25441 - DNA, 498 bp, Unknown
  Obtained from environmental sample
  misc_feature (1)..(498): n is a, c, g, or t
ttgacaatagtgttgacaaaggttatattaagaaaaatgaacaaaacgattgtttcaccgtcaatattgtccgctgatttttcggaattcggcaaagccgccgccgatgttgacgcttccggagccaaatggcttcacatggacgttatggacggttcttttgtgccaaatttgaccttcggaccgcctttagtaagcgcaatgaggaaaaaaaccaaagcttttttggatgttcacctgatgatcgtgaatccgggcaagtttattgatgaatttgcccgcgcgggagcggacggaattacctttcactacgaagcggaaacccattcgcagaaatatctggcggaaattcgcactcttggtttaaaagcgggcattgccattgtcccgtcaacgccggtaagcgtactggaagaggttctgccttttattgacttggctttgattatgactgttaaccccggtttggagggcaaaaactcatacccgaatgtctga

SEQ ID NO: 25442 - protein, 165 aa, Unknown
  Obtained from environmental sample
  DOMAIN (17)...(164): Ribulose-phosphate 3 epimerase family
  misc_feature (1)..(165): Xaa is any amino acid
MTIVLTKVILRKMNKTIVSPSILSADFSEFGKAAADVDASGAKWLHMDVMDGSFVPNLTFGPPLVSAMRKKTKAFLDVHLMIVNPGKFIDEFARAGADGITFHYEAETHSQKYLAEIRTLGLKAGIAIVPSTPVSVLEEVLPFIDLALIMTVNPGLEGKNSYPNV

SEQ ID NO: 25443 - DNA, 936 bp, Unknown
  Obtained from environmental sample
  misc_feature (1)..(936): n is a, c, g, or t
atggaatgcaagcaggcggcacagttgttaaaagaagcatatgaaaaattaaaagcctccgacgcaatgaccgcatgtatgcttctggatcaggcaatgaacatggattgcggtaacgaagaaatcaaatacgcgttaaaaagcgtccattggtggctggatcaatccggaaagattgacgaaataaaaaacccttacgaaaaaggaggatatataatatcccttttaaaacaatactatgtctttctggagcaatttgacaatgtctatgaccaatgccggtacgcggtacgttattatgttttttcaagggcgttgtttttttttgaaggtttgctgggaaaccacgcgaaccagcatgatcctgggcttttattgcttgtaggacgctgttataaagggcttggcaattatgacgaggcgctttactaccttgaacaggccgtccgttttaagcgggaagacgccgaaaccctcgccgaagtcgcggatattaacgcgctgttagctgaaacaaaggccgcaaaggcccttttccgcgaggcgttttttttggatccttccaaaatcgattttaattccctggaatcggcgatgattctgcagttatgggaaaaagtaaactctcttgggtataaagacgaacttgtctgcgaatggataccggtttacgcttccctttggggcgtgttttccgtaaagcgcgagttaaaacagatggaggtcggcaggttaagacaatctattttttcactggaagcggaatattacgccaatccggcaaggcaagagcaaataaaacctcgcctgttaaaccgttatttttggctggttgatcattacgaaaacagccacgaggactcttctttgatcgatgagaccttgttaagaattaaatcaatcgatccggatatttatcagaaatataccggttaa

SEQ ID NO: 25444 - protein, 311 aa, Unknown
  Obtained from environmental sample
  DOMAIN (122)...(155): Tetratricopeptide repeat
  misc_feature (1)..(311): Xaa is any amino acid
MECKQAAQLLKEAYEKLKASDAMTACMLLDQAMNMDCGNEEIKYALKSVHWWLDQSGKIDEIKNPYEKGGYIISLLKQYYVFLEQFDNVYDQCRYAVRYYVFSRALFFFEGLLGNHANQHDPGLLLLVGRCYKGLGNYDEALYYLEQAVRFKREDAETLAEVADINALLAETKAAKALFREAFFLDPSKIDFNSLESAMILQLWEKVNSLGYKDELVCEWIPVYASLWGVFSVKRELKQMEVGRLRQSIFSLEAEYYANPARQEQIKPRLLNRYFWLVDHYENSHEDSSLIDETLLRIKSIDPDIYQKYTG

SEQ ID NO: 25445 - DNA, 882 bp, Unknown
  Obtained from environmental sample
  misc_feature (1)..(882): n is a, c, g, or t
atgatgaaaggaagagcagttctgctggtcaaccctcaaaaaggccatgcgcgaaagctgggcaaagaaatattaaatgaattgctctccatgaatattgaagcggatatctactcggttaaggaaagacccgttatctcccaggataataaatacagcgtcgcgttagtccttggcggagacggtactgtcctatccgcagccagagctgtgtcccaatttggcatcccgattttccctataaacctgggaacatttggctttattgccgaagtgcagccccttgaatggcgggatgttttcgacaggtggatggcagggaaggtgcccgtttcccggcggctcatgcttgaagtctcggtagaaagggatggccgcaaggtttttctggaatcctgccttaacgatgtgattatttcctcttccgtcattgccaaaattattaatctgcgccttttaagcagggaaatgggaatggaaacagacttaaagctaggctcatatcgctctgacggtctcataatagccactcctaccggttctaccgcctattcggctgcggtgggcggtcccattgtcgatcctgaacttgaggcgatgatattgagccccatttgcccttttatgctaacacatcgcccatttgtattgccggcagccggtacagtgattgcggaggtggcggatgaacagcaaagcggggtaatattgacattggacggtcaggtcaaagaaaaaataaaaaaaggggacaggatccttattgaaaaggcgccttattcttgttttctaatagcctccagccgtaacggtttttattcggcgctcaggaaaaaactctcatgggcaggagaagaggaagcccaggtacagaatgattga

SEQ ID NO: 25446 - protein, 293 aa, Unknown
  Obtained from environmental sample
  DOMAIN (5)...(268): ATP-NAD kinase
  misc_feature (1)..(293): Xaa is any amino acid
MMKGRAVLLVNPQKGHARKLGKEILNELLSMNIEADIYSVKERPVISQDNKYSVALVLGGDGTVLSAARAVSQFGIPIFPINLGTFGFIAEVQPLEWRDVFDRWMAGKVPVSRRLMLEVSVERDGRKVFLESCLNDVIISSSVIAKIINLRLLSREMGMETDLKLGSYRSDGLIIATPTGSTAYSAAVGGPIVDPELEAMILSPICPFMLTHRPFVLPAAGTVIAEVADEQQSGVILTLDGQVKEKIKKGDRILIEKAPYSCFLIASSRNGFYSALRKKLSWAGEEEAQVQND

SEQ ID NO: 25447 - DNA, 708 bp, Unknown
  Obtained from environmental sample
  misc_feature (1)..(708): n is a, c, g, or t
atgattgaagaacttagcgtaaggaatttcgcgctgattgacagccttaacctctcatttgaaaagggcttcacggttctttcaggagaaacaggagccggaaaatccataatcgtgggctctcttagttttctttttggcgcaaaagcagacagtgaaattatccgttcaggttcggaagaggcaagcgtctcggcggtgattgccgttgacggcaagaaccgggatgccctgcaatggcttaaccagcgggaaattgagactgaagattccaggcttgtaatccgacgcagcgttaaagcttcaggccgaaattcaatctatatccagaatgtccctgtaacgcgaaacgatctcgcggaatttatggggtttctctttgatcttcacggccagcatacccacgaatcgcttttgagaaaggaaacccaccgtgtttaccttgaccggttttccggcctggaagacgaagttacagcctttggtcaggtttttacggaactggcggaaaagcgcaagacccttgaatcgctgaaccgttccgaaaaggaaagggagcagaggcttgagctgttaattacgctatcggggaaatacaaaagccgcacccaaaacggggagataaagagctggagacagagacccagcgccttgcggattttgaaaactcagccttcatgtgaacgctgggtcttcctctctttttaa

SEQ ID NO: 25448 - protein, 235 aa, Unknown
  Obtained from environmental sample
  DOMAIN (1)...(160): RecF/RecN/SMC N terminal domain
  misc_feature (1)..(235): Xaa is any amino acid
MIEELSVRNFALIDSLNLSFEKGFTVLSGETGAGKSIIVGSLSFLFGAKADSEIIRSGSEEASVSAVIAVDGKNRDALQWLNQREIETEDSRLVIRRSVKASGRNSIYIQNVPVTRNDLAEFMGFLFDLHGQHTHESLLRKETHRVYLDRFSGLEDEVTAFGQVFTELAEKRKTLESLNRSEKEREQRLELLITLSGKYKSRTQNGEIKSWRQRPSALRILKTQPSCERWVFLSF

SEQ ID NO: 25449 - DNA, 594 bp, Unknown
  Obtained from environmental sample
  misc_feature (1)..(594): n is a, c, g, or t
atggaatctctgggagagaaattaaaaacaacccgcgaagaaaaaggactgactcttgatcaaatcagccgtgaaacaaatatttccattcgttaccttgaagctttagagactgaaaattttgctatttttcccggcgagccctatgttatcggctttataaaaaattacggctcgtaccttgaacttgacaatcaaaaattaatttcgctttatcgagcgctccgtattcaggaacagcctatccctgtagaacagcttttaaaaaatccgccaagactgccggggtttatcattcctttggtaataatattggcgattttaggcgcgggcggctgggttgcccgttctataattttaaatagacagaataatcctgatcataaaaaccctgtcagccaaacgtccgccgaatacataatggaaggcaattccatggaaaggcgcttatataaaaatgactctgttttaatttccgtagataatgaaacatacaaactggaactcttcaatatgggcgaagccgtaacaatccgcactccatcgggccaggaaatactggatttaagcccaggaagtggctatcgatcttaa

SEQ ID NO: 25450 - protein, 197 aa, Unknown
  Obtained from environmental sample
  misc_feature (1)..(197): Xaa is any amino acid
MESLGEKLKTTREEKGLTLDQISRETNISIRYLEALETENFAIFPGEPYVIGFIKNYGSYLELDNQKLISLYRALRIQEQPIPVEQLLKNPPRLPGFIIPLVIILAILGAGGWVARSIILNRQNNPDHKNPVSQTSAEYIMEGNSMERRLYKNDSVLISVDNETYKLELFNMGEAVTIRTPSGQEILDLSPGSGYRS

SEQ ID NO: 25451 - DNA, 855 bp, Unknown
  Obtained from environmental sample
  misc_feature (1)..(855): n is a, c, g, or t
atgattattaatcacaacatgagcgccatttatgccgatcgtcaactcggtgtaacccagcttgatttgtccaaagacattgagaaacttagctcgggtctaaggatcaatcgcgccggggacgatgcttccggactcgcggtttccgaaaaaatgagaagccaggttcgcggattacatcaggcagaacgcaatatccagaacgggatatcctttattcaggctactgagggttaccttcagcagacacaggatattcttcaccgtctgagagaattgtcggtacaatcagctaacggtatttataccgatgaagatcgcatgcagatccaggtagaagtatcgcagatggttgatgaagtgaatcgtatagcaagtcatgcgcaattcaacggcatgaatatgcttacaggcgctttcgcgcaagattcagctaccggcagaattatgcagcttcatatcggcgctaacatggatcagaacacaagggtctatgtaggcaatatgtcagccggcgctctgggactggtaacatcgcagggagaatcgggaaaactttcaatttccgatccctcagaagctaacatggcgattggttcaatagacaaggcgttaaagatcgtttccaaacaaagagccgatctcggcgcttatcagaacaggtttgaatcagcggcacaaggcgtcgccgtagcggccgaaaacattcaggctgccgaatcccgcattagggatgcgaacatggcgtcaaagatggttgacttcacaaagaacaccatccttagccagagcgggactgcaatgttggcgcaggccaatttgcgcacacagtcggtgctgcagcttctttcataa

SEQ ID NO: 25452 - protein, 284 aa, Unknown
  Obtained from environmental sample
  DOMAIN (191)...(262): Bacterial flagellin C-terminus
  misc_feature (1)..(284): Xaa is any amino acid
MIINHNMSAIYADRQLGVTQLDLSKDIEKLSSGLRINRAGDDASGLAVSEKMRSQVRGLHQAERNIQNGISFIQATEGYLQQTQDILHRLRELSVQSANGIYTDEDRMQIQVEVSQMVDEVNRIASHAQFNGMNMLTGAFAQDSATGRIMQLHIGANMDQNTRVYVGNMSAGALGLVTSQGESGKLSISDPSEANMAIGSIDKALKIVSKQRADLGAYQNRFESAAQGVAVAAENIQAAESRIRDANMASKMVDFTKNTILSQSGTAMLAQANLRTQSVLQLLS

SEQ ID NO: 25453 - DNA, 1455 bp, Unknown
  Obtained from environmental sample
  misc_feature (1)..(1455): n is a, c, g, or t
atgtttcatgccgggagtaaaagccggtttaattcagaagatatcatcgataaactgatgcgtcttgaacgcgtcccaaaagaaagaaccgaaaaaaacattgaaaacctgcaaactcaaaaaagttattggcaggaagtcggacggcgtattaattcaatgcgtgaaagcgcccgctttctttattcttttcaaaatccgtttaacgaaagactcgccctttctactgatgaatccgcgttaacggctaccgccacgcgtgaagccgatgagcaatcttaccgttttaccgttaaacaaacggcgcaggccgaccgtttcttgtcctcccctcttgatgaaaaaaccaaaattgaagccggcagttataactttaccgtaggcaatgacaagatatcgataaacttccgcggcggcactttaaaagattttgttgaggttattaaccgaagaggcaacgataaaatctccgcaaaccttatagcggtgcaaagcggaacaaaatccctgttaattgagtccaaaaaaaccggatccgcatacaggctgggcttccttgacgacgccgctaagctggcgcttaaaacgggcatggttgaacaggggaatgacacccgaaagaatatcgctataacggaaaacaacgtaaactcaggcggcggaacaaccagcataaatgacggcgttttgaaagtaggggtacaatcctccgcgacgcttcctctcggactgtctttaagcgccgattctccggtgatattaaaactggaaacctccactatggtggataattccggcggtttaagcgttccacagaggccgccgggcccgtctataccaaaaggctctgttacttacggaggcattacggttgaaaacgaaccgtcgtccgcgcctattcccgaatggaaaactcccgaagctcctcagcgccgcgacgatatggcggttttaagccttgttttctctgacggaacctccgccaaattgccgcctatcacggattcaggcgcgtttgtgtcaaggcagtaccttctttccgatgccgcgcagggcaggactatttcttctcttaaaattgaaaataacaatacccaccgcgaagtctcggtaggtaaggttgaaatttttgacccgacctccacaaccggcggtttggtaccgcagaattctctttccaccgcccgcgatgcgattataacaatggaaggcatagaaataattcgcccgaccaataatatcgacgaccttattcccggccttactctgaatgtaaggggggtatcagagcgccctgtggaattaaaagtaaaaggcgacacggaaaaagtaaaagaatcaataataaattttgtcggaaactacaacaggcttatagccgaaataaacgtgcttacagcaagaagcgtatcctcgggttcgggaaccaaaacaagcgtagacgattccgtataa

SEQ ID NO: 25454 - protein, 484 aa, Unknown
  Obtained from environmental sample
  DOMAIN (7)...(106): Flagellar hook-associated protein 2 C-terminus
  misc_feature (1)..(484): Xaa is any amino acid
MFHAGSKSRFNSEDIIDKLMRLERVPKERTEKNIENLQTQKSYWQEVGRRINSMRESARFLYSFQNPFNERLALSTDESALTATATREADEQSYRFTVKQTAQADRFLSSPLDEKTKIEAGSYNFTVGNDKISINFRGGTLKDFVEVINRRGNDKISANLIAVQSGTKSLLIESKKTGSAYRLGFLDDAAKLALKTGMVEQGNDTRKNIAITENNVNSGGGTTSINDGVLKVGVQSSATLPLGLSLSADSPVILKLETSTMVDNSGGLSVPQRPPGPSIPKGSVTYGGITVENEPSSAPIPEWKTPEAPQRRDDMAVLSLVFSDGTSAKLPPITDSGAFVSRQYLLSDAAQGRTISSLKIENNNTHREVSVGKVEIFDPTSTTGGLVPQNSLSTARDAIITMEGIEIIRPTNNIDDLIPGLTLNVRGVSERPVELKVKGDTEKVKESIINFVGNYNRLIAEINVLTARSVSSGSGTKTSVDDSV

SEQ ID NO: 25455 - DNA, 918 bp, Unknown
  Obtained from environmental sample
  misc_feature (1)..(918): n is a, c, g, or t
ttgcatagaacggaaggaaagcttcgtgggagatactcccagagggcgcgggaagcaatttgcgctttcgcgaacgatcttcccaatcataacaaagccggtgttttgtttgtcggcgctacagatgacggaaagcccagcggacttaaaataacagatcaactcttattgaccttatcagacatgaagaccgacggtaatatcctgccttttcccgtaattaccgttgaaaagagaacccttgaaggcgctgaaatggcggtcgttacagcactgccttccgattcaacgccggtaaaatatgacggacggatttggatacggacaggcccccgccgcgccctggcaaatgaacaggaagagcgtatattagtcgagaaaagacaaagtaaaaatgttccgtatgatcttcgtcctgtatatggatcaaccattaaagatttatccagaagcttttttgaagatgaataccttccatatgctattgccgaagaaattctcgaagccaataaccgcagctatgaagaacgcctcgcggcctgtaaaatgatcgtttctattgatgacaccactccgacttttttggggctaatggcgattggcaagaaaccacgcttccatcttggcggggcttatatccaattcttgcggatcgacggccctgatcatatgtcgcgaattatcgacgagctggaaattgacggaagaatacttcaaatgtacaatctggcagaatggaaatttaaagcttacaacaatagagatattgaagtactttccggttcaactcacgaaataacttataattaccccgagatcgctttcaggcagatcttatgtaacgcaattttacaccgccgctacgaagaaataacgcgccgattcatttttactggtacaatgaccggatcgaaataa

SEQ ID NO: 25456 - protein, 305 aa, Unknown
  Obtained from environmental sample
  DOMAIN (23)...(119): Divergent AAA domain
  misc_feature (1)..(305): Xaa is any amino acid
MHRTEGKLRGRYSQRAREAICAFANDLPNHNKAGVLFVGATDDGKPSGLKITDQLLLTLSDMKTDGNILPFPVITVEKRTLEGAEMAVVTALPSDSTPVKYDGRIWIRTGPRRALANEQEERILVEKRQSKNVPYDLRPVYGSTIKDLSRSFFEDEYLPYAIAEEILEANNRSYEERLAACKMIVSIDDTTPTFLGLMAIGKKPRFHLGGAYIQFLRIDGPDHMSRIIDELEIDGRILQMYNLAEWKFKAYNNRDIEVLSGSTHEITYNYPEIAFRQILCNAILHRRYEEITRRFIFTGTMTGSK

SEQ ID NO: 25457 - DNA, 615 bp, Unknown
  Obtained from environmental sample
  misc_feature (1)..(615): n is a, c, g, or t
atgggtagatcatactacatagcgggaaactggaagatgcacaaaacccgcgccgaggccgcggaacttgccaaggcgctggtcgctcagttaaaggacgggaagcacaaataccttgtcgcgccgtcttttaccagccttgaaactgtgggcgccattgtcaaaggcactaatataaggcttggcgcgcaggactgcgcgtttgaagagcagggcgcacataccggcgaggtttctgtcctgcagttgaaagaccttggcgtgcagaccataatcctgggccacagcgaaaggcggcacgtctacaaggaagacgacgcgctgatcaacaagaaagtgaagctggccctgaagcacggctttgaagtgattctctgtattggggaactactggaagaacgcgaggctggcaaggttgaaactgtctgcgaatcccagaccgtgaaaggtcttgagggtgtcagcgcggctgagctggcgaatatccttattgcctacgagccggtctgggctatcggcaccggaaagaaccgccaccccggaagacgcggaggctgttcacgcttttgtgcgcaaggtaattgcgcggctttacggacaacctgccgcggataa

SEQ ID NO: 25458 - protein, 204 aa, Unknown
  Obtained from environmental sample
  DOMAIN (5)...(202): Triosephosphate isomerase
  misc_feature (1)..(204): Xaa is any amino acid
MGRSYYIAGNWKMHKTRAEAAELAKALVAQLKDGKHKYLVAPSFTSLETVGAIVKGTNIRLGAQDCAFEEQGAHTGEVSVLQLKDLGVQTIILGHSERRHVYKEDDALINKKVKLALKHGFEVILCIGELLEEREAGKVETVCESQTVKGLEGVSAAELANILIAYEPVWAIGTGKNRHPGRRGGCSRFCAQGNCAALRTTCRG

SEQ ID NO: 25459 - DNA, 300 bp, Unknown
  Obtained from environmental sample
  misc_feature (1)..(300): n is a, c, g, or t
ttgagggtgtcagcgcggctgagctggcgaatatccttattgcctacgagccggtctgggctatcggcaccggaaagaaccgccaccccggaagacgcggaggctgttcacgcttttgtgcgcaaggtaattgcgcggctttacggacaacctgccgcggataaaatcattattcagtacggcggttcggttaaaccggataacgccgcccagttgatggcaaaagagaacatcgacggcgccctggtcggaggcgcggctcttaaaccggatacctttgttccaatcgcaaaattctag

SEQ ID NO: 25460 - protein, 99 aa, Unknown
  Obtained from environmental sample
  SIGNAL (1)...(22)
  DOMAIN (1)...(97): Triosephosphate isomerase
  misc_feature (1)..(99): Xaa is any amino acid
MRVSARLSWRISLLPTSRSGLSAPERTATPEDAEAVHAFVRKVIARLYGQPAADKIIIQYGGSVKPDNAAQLMAKENIDGALVGGAALKPDTFVPIAKF

SEQ ID NO: 25461 - DNA, 1197 bp, Unknown
  Obtained from environmental sample
  misc_feature (1)..(1197): n is a, c, g, or t
atgtttaaatttaagcttaacaaaaacatttttgcctgctgtctgatttatttcgtgattgtttcctgttctattgtcagaaatgaaaatatcagcctggcgactgacgaccaaagaactgatgagcttttgaccgaaacggcgctggcggaaccggcgcccatggcggaacctggtatggtttcttatgaaggtgaattactcaatattttctttcatccgcttgtcgcccatcccgagatcgcgtttaagggaagcatgaaagcgcattttctggaatggtttgttacagccgatgaatatataaaaattctggatgaattatacatacgggattatgtacttgtcgatatcaatgaattttatacagtgacatatacaaataatataaaaacagttgaggcgaaaaaattcgtgattccggcagggaaaaagccagttattttatctgttgacgatttgtcttactatgaacattgcaggaataacggaactgtacataaacttgtactcgatcaaaacggaaatatcgcggcctggaccgccaccccgtccgacgtaggcgcctccttggagggcggcgccttctccgaaggcacgcntttctccgaaggcgagatttcttatgacctggatattattaccattacggaagactttattaaaaaacatcctgatttttcaatccggggcgcaaaaggcattatcgcgcttaccggatacgaaggaatattgggttatcaaacccaggcagagaattcaaagacccccgggtatcaaaaagaaatagaaaacgccgttataatagtaaacaaattaaaagaactgggatggcgtatggcgtcgcacagctgggggcatttgaacatgcccaaggtgcccatgtcatggtttacttatgacaataaattatgggacagagaagtaaaacccattctaggcgaaacggatctttacatttatccttttggcgcgggactggaaaatatagaggaaaaacataaaatactccgcgacagaaattttaacttgtttttcggtgtcggcagcgggttcggttataaaatcggcccgaattcagaatatatctttttatcacgcagaaatattgacggacagtatttcaggatattcagaaacagtgataaaaaattgtttgatattgacaaagtcatggataaacagaaccgcaggtga

SEQ ID NO: 25462 - protein, 398 aa, Unknown
  Obtained from environmental sample
  SIGNAL (1)...(28)
  misc_feature (1)..(398): Xaa is any amino acid
MFKFKLNKNIFACCLIYFVIVSCSIVRNENISLATDDQRTDELLTETALAEPAPMAEPGMVSYEGELLNIFFHPLVAHPEIAFKGSMKAHFLEWFVTADEYIKILDELYIRDYVLVDINEFYTVTYTNNIKTVEAKKFVIPAGKKPVILSVDDLSYYEHCRNNGTVHKLVLDQNGNIAAWTATPSDVGASLEGGAFSEGTXFSEGEISYDLDIITITEDFIKKHPDFSIRGAKGIIALTGYEGILGYQTQAENSKTPGYQKEIENAVIIVNKLKELGWRMASHSWGHLNMPKVPMSWFTYDNKLWDREVKPILGETDLYIYPFGAGLENIEEKHKILRDRNFNLFFGVGSGFGYKIGPNSEYIFLSRRNIDGQYFRIFRNSDKKLFDIDKVMDKQNRR

SEQ ID NO: 25463 - DNA, 1131 bp, Unknown
  Obtained from environmental sample
  misc_feature (1)..(1131): n is a, c, g, or t
atggccgggtgcctcgttcgcggcctcaggcttccgggacgggttctggttggcagcgccgtgtcaaattttggcggaaggtcaacatgggcgcagggcgcgcccggcgtaccgggcgatacatatttcatcgcggaaacctgcgagtaccgcaggcattttcttctgtttcatcccaagcgcatagtgttaaccgcggttgaaagcgaccaccaggactattacccgacttatgaatccatacgcgacgcctttgccgaatactgccgccttattccccccggcggtgaattgttttactgcgccgatgatcccggagcttgcgaagtcgccggcatcattaaaagcgaggaacgcggcgttgcccttgtcccttacggttttaccgcagaaggtgattttcacatcgcttcgtaccgcgttgaaaatgaaagggcgtactttcgcgttaacgcgtttagtctggaactcgccctgcccgtccccggccgccatcaggctttgaacgccgccgcggccatagcccttgctataactctgcttaaaaaggaatctgcgctaagcggcgctttaaaaagcggtcagagtcataaaaacgaactcacgcagtttaccgtaaaaaaggcgctggaggaattcaaaggctcaaaacgcaggtcggaaattatcggcagcgcgggcggcatacttttcatggacgattacggccaccacccgacggcaataaaaacaactcttgagggcttaaggggtttttatcccgcaaggcggcttgtggtcagtttcatgtcccatacttatacaaggacagcagctctgctggatgaatttgcctcttcccttgcgtcagccgatatactgttcctccataagatttacgcgtcggcgcgcgagaaatttgacggacatatcgaaggcaggtctataatggaaaagatcgaaagcctgcccgccaaaagagccgaagtttattacgttgacgagccgctggacgcgtttgatcagttaaaagacattcttaaacccggcgacctttttcttactctgggcgccggcagcaactggcctcttggggtaaagctctttgagtattttaatggctctgaaagagccacgaggttacccaaatga

SEQ ID NO: 25464 - protein, 376 aa, Unknown
  Obtained from environmental sample
  DOMAIN (16)...(177): Mur ligase middle domain
  misc_feature (1)..(376): Xaa is any amino acid
MAGCLVRGLRLPGRVLVGSAVSNFGGRSTWAQGAPGVPGDTYFIAETCEYRRHFLLFHPKRIVLTAVESDHQDYYPTYESIRDAFAEYCRLIPPGGELFYCADDPGACEVAGIIKSEERGVALVPYGFTAEGDFHIASYRVENERAYFRVNAFSLELALPVPGRHQALNAAAAIALAITLLKKESALSGALKSGQSHKNELTQFTVKKALEEFKGSKRRSEIIGSAGGILFMDDYGHHPTAIKTTLEGLRGFYPARRLVVSFMSHTYTRTAALLDEFASSLASADILFLHKIYASAREKFDGHIEGRSIMEKIESLPAKRAEVYYVDEPLDAFDQLKDILKPGDLFLTLGAGSNWPLGVKLFEYFNGSERATRLPK

SEQ ID NO: 25465 - DNA, 1047 bp, Unknown
  Obtained from environmental sample
  misc_feature (1)..(1047): n is a, c, g, or t
atgaatagagacaaacaaagcatagtcataaaaaatatctactatatgctttcctatgcttatcaaaatttacaacataataattacaaagaaatagaaacagagtattttgaaaatatacaagacctttttgcggcaatactcgcgatgggtataacttcgcagcttaagcagggcttgagtcgtgaatatattgaaaaacaagagtctctttccaccctgaaaggaaaaatcaatatcaaggaatccatacagttaaaactgcgtaatactaacaagcttttatgttgttttgacgagttatctgaaaaccactacatgaaccagattttaaaaaccacggcgcgttttttagtcaatgacagcaatgtgaagcgtgaaaataaagatttgctaaagaaagcgctcttatttttttccgatgtagacatattggagccattgactattaactggcaaaagttgaattacaaccgtaacaatacctcgtatcgcatgatgatgaatgtctgttacctggtgctgcatgaactgttattgaccactgaagatggaaggcataaattagcttcatttatggatgatcaaacgatgtcaaaactctatgagaaatttatactggagtattataaaaagcatttttcgcaatattatcccgcctcaagagaaataaaatgggatgtaacagggaccatagattttctaccaaatatgaaatcagataccatgttatttgatggtcaaaagaagttagttattgatgcaaagtactacggaaaaataatgcaaacacagtatgataccgatacatttcgatcaaataatttatatcagatattcacctatgtgaagaatgaagacaaaaataataccggattagtcagtggaatgcttgtttatgcaaagacagatgaagatattattccggccataacctatgatttaggcggtaatcagatcggtgtaaaaacacttgatcttagtaaggactttaccattcttaagaaacaactcaatgcaattattaatgaatggagtttagtataa

SEQ ID NO: 25466 - protein, 348 aa, Unknown
  Obtained from environmental sample
  misc_feature (1)..(348): Xaa is any amino acid
MNRDKQSIVIKNIYYMLSYAYQNLQHNNYKEIETEYFENIQDLFAAILAMGITSQLKQGLSREYIEKQESLSTLKGKINIKESIQLKLRNTNKLLCCFDELSENHYMNQILKTTARFLVNDSNVKRENKDLLKKALLFFSDVDILEPLTINWQKLNYNRNNTSYRMMMNVCYLVLHELLLTTEDGRHKLASFMDDQTMSKLYEKFILEYYKKHFSQYYPASREIKWDVTGTIDFLPNMKSDTMLFDGQKKLVIDAKYYGKIMQTQYDTDTFRSNNLYQIFTYVKNEDKNNTGLVSGMLVYAKTDEDIIPAITYDLGGNQIGVKTLDLSKDFTILKKQLNAIINEWSLV

SEQ ID NO: 25467 - DNA, 429 bp, Unknown
  Obtained from environmental sample
  misc_feature (1)..(429): n is a, c, g, or t
atggcatataacggtattccgttttctgtacctgaaaatatctatataatcggcatgatgaatacggcagacaggagtcttgccattattgattatgcccttcgcagaagatttagttttttcgatatgaggccggcatttgaaagcgacagtttcaaatcatatcaacaatttttaaacaatgaaacgtttaatgagttaattgagcttgtaaaagaacttaaccgggatattgagaaagacgcctcactcggcaagggtttctgcataggacatagctatttctgcgggcaggaaatatacactgatgaatggctttcagaagttattgaatatgaccttataccaatgcttaatgaatactggtttgacgatgaaactaaagctcaaacatgggcgagaaaattacgcggtgtcttagatgaatag

SEQ ID NO: 25468 - protein, 142 aa, Unknown
  Obtained from environmental sample
  misc_feature (1)..(142): Xaa is any amino acid
MAYNGIPFSVPENIYIIGMMNTADRSLAIIDYALRRRFSFFDMRPAFESDSFKSYQQFLNNETFNELIELVKELNRDIEKDASLGKGFCIGHSYFCGQEIYTDEWLSEVIEYDLIPMLNEYWFDDETKAQTWARKLRGVLDE

SEQ ID NO: 25469 - DNA, 861 bp, Unknown
  Obtained from environmental sample
  misc_feature (1)..(861): n is a, c, g, or t
gtgcctgacacccagaatatcagcggggaggccatgacgccggaaggcacggtaaaccgggctgcccttccggctatttttaaccccgacgatctatacgccctggaagcggctctgcaaataaaagacgccaaccctgacaccaaggttagcgtgataaccatgggccctccttccgccaccgcagtgttaaaagagtgcctttaccgtggagcggattttaccgccctggtttccgaccgaggttttgccggagcggatacccttgccacttcctacgctcttaaatgcgcgataaacaaagccggtgcttttgacctagtgctatgtggacggcaggctatagacggggacaccgcgcaggtaggcccccagaccgcggaaaagctgggcgtcaaccagatcacctgtgtctccaagatcgaagcccttgatgccgcaaaaaaagagatcgttgcggttcgttccatcgagggcggctgggaaagggtgaaggcgaaattgccagtcctcgttacattcaatgccgaaggcgaaatgccccggcccgcttctgctattaagagcatgacctacaaacgcgcggttcccatttctgatgctggttcgccgagcaaccctgcgggctttgttgaaaaacctgacgcggaggaaaatggtgcggcaaacccgatggccctttggaacattcccgccatcaacgccgacccgcttcagtgcggccttgccggctctcccaccaaggtaaagcatatcaattccgtggtgctaaccgccgcggacatcaggtacatcgatcccggcgaagcgggaattgcggagctgatccacggcctcatcgcggatcatacttttggataa

SEQ ID NO: 25470 - protein, 286 aa, Unknown
  Obtained from environmental sample
  DOMAIN (15)...(212): Electron transfer flavoprotein domain
  misc_feature (1)..(286): Xaa is any amino acid
MPDTQNISGEAMTPEGTVNRAALPAIFNPDDLYALEAALQIKDANPDTKVSVITMGPPSATAVLKECLYRGADFTALVSDRGFAGADTLATSYALKCAINKAGAFDLVLCGRQAIDGDTAQVGPQTAEKLGVNQITCVSKIEALDAAKKEIVAVRSIEGGWERVKAKLPVLVTFNAEGEMPRPASAIKSMTYKRAVPISDAGSPSNPAGFVEKPDAEENGAANPMALWNIPAINADPLQCGLAGSPTKVKHINSVVLTAADIRYIDPGEAGIAELIHGLIADHTFG

SEQ ID NO: 25471 - DNA, 906 bp, Unknown
  Obtained from environmental sample
  misc_feature (1)..(906): n is a, c, g, or t
atggcgagagcgttcttcccacgcgacaagcaaatccgttccctcgacgatttggaaactgtggaaacgcttggtttccgcggcgaggctcttgcggcggcggcggcggttgcccggcttgaaattatcagctgcgcaggcggcggcgccgtttgtagcggcggcgccgcttatagcggcggctccggaaacggcgaggcatggcggattgaagcgggcccgggtgaaggtaaattgcacataacggccgcgagcaggaccaggggcaccacggtacgcgccctcaacctgtacgaaagcatacccgcgcgcaaaaaattccttaaacgcgaaggaagcgaggccgcgctgtgccaccaggtttttatggacaaagcgcttgcctttccggaaataaccttccgttttaaccaggacggtaaacccagggatttctttcccgccgcgaactcaaagaaagaacgcttcgccgccgtagctccggaagcggcgctttcagtgagggaagaaaattttcttcacgagattaatgtttcaggagagggattttccgttgatatcgtaataggcggcccggaactttttcgcgcggacaaaaggatgctgtacgtctttgccaacggcaggcgcatacaggactattcactcattcacgcgatggaatacggaactcaagggtggtttcccaacggaacccaccccataggggccgtgtacctggacatagatcctgcccttgccgattttaatatacaccccgccaaaagggaggcgcgttttaaggatccgggggcgatccaccacgcgataagttcaggcctgagggatttttgccgtcgccatgggcgcatccaggaccttacatcagaaataaagaaaatccggatactaattacaactctataa

SEQ ID NO: 25472 - protein, 301 aa, Unknown
  Obtained from environmental sample
  DOMAIN (165)...(279): DNA mismatch repair protein, C-terminal domain
  misc_feature (1)..(301): Xaa is any amino acid
MARAFFPRDKQIRSLDDLETVETLGFRGEALAAAAAVARLEIISCAGGGAVCSGGAAYSGGSGNGEAWRIEAGPGEGKLHITAASRTRGTTVRALNLYESIPARKKFLKREGSEAALCHQVFMDKALAFPEITFRFNQDGKPRDFFPAANSKKERFAAVAPEAALSVREENFLHEINVSGEGFSVDIVIGGPELFRADKRMLYVFANGRRIQDYSLIHAMEYGTQGWFPNGTHPIGAVYLDIDPALADFNIHPAKREARFKDPGAIHHAISSGLRDFCRRHGRIQDLTSEIKKIRILITTL

SEQ ID NO: 25473 - DNA, 651 bp, Unknown
  Obtained from environmental sample
  misc_feature (1)..(651): n is a, c, g, or t
gtgcttggcaggatgttcagcgccatacagttcaggggatataagcaaaaaacggttgaaacactggcaaagtattcaggcatacccgtgtacaacggcctgacagacgagttccaccctacccaggctttagctgacattatgactatggaggagaattttggcgcggtaaagggaaagatcctgtgttatgtgggagacgggcgcaacaatgtagctaactccctcatggtgatttccgccaaactgggattgaattttaccgttgtgactccgcctgaacttaaccccgaccccgtactgcgggaaaagtgcgcccctttagccgccgcttccggttcgaagataaccgtcagcgccgacattgccgccgtttccggcgcggacgctatatataccgatgtgtgggtatctatgggagaggatgacaaaagagaggaacgcctaaagctgctgtccccctatcaagtgaaccaggcgttgatggaaataaaccatcgcaatgattctattttcctccactgccttcccgcggtcagaggcgaggaagtaacttcagacgtgatagacggcccgcacagccgtgtctgggatcaggcggaaaaccgtaaacacacgataaaggcgattatgttagctacgctaacataa

SEQ ID NO: 25474 - protein, 216 aa, Unknown
  Obtained from environmental sample
  DOMAIN (2)...(53): Aspartate/ornithine carbamoyltransferase, carbamoyl-P binding domain
  misc_feature (1)..(216): Xaa is any amino acid
MLGRMFSAIQFRGYKQKTVETLAKYSGIPVYNGLTDEFHPTQALADIMTMEENFGAVKGKILCYVGDGRNNVANSLMVISAKLGLNFTVVTPPELNPDPVLREKCAPLAAASGSKITVSADIAAVSGADAIYTDVWVSMGEDDKREERLKLLSPYQVNQALMEINHRNDSIFLHCLPAVRGEEVTSDVIDGPHSRVWDQAENRKHTIKAIMLATLT

SEQ ID NO: 25475 - DNA, 381 bp, Unknown
  Obtained from environmental sample
  misc_feature (1)..(381): n is a, c, g, or t
ttgttttcaaccatgatcagcggtataatcaatattacccgtatgcaaacctcagaacaaaatcaagctttaagtatcgccggaattgacatggcaaaaggactcgccatgcttagcgggtctcaggatgcttacaggcagatattgataacattcagcgaggatgtggaagaacgactgacattattacaaaacacgcctggagcggatacactttccgctttcattacaagtgttcacgccctgaaaagcgcgtcggcttcaatcggggcgatggaattgtcggcgcaggcattagggcttgaaaccgctggtaaatccggggacatggctttcattcgggaaaatttgcctgttttgcgaagtctcggccgaatctga

SEQ ID NO: 25476 - protein, 126 aa, Unknown
  Obtained from environmental sample
  DOMAIN (47)...(123): Hpt domain
  misc_feature (1)..(126): Xaa is any amino acid
MFSTMISGIINITRMQTSEQNQALSIAGIDMAKGLAMLSGSQDAYRQILITFSEDVEERLTLLQNTPGADTLSAFITSVHALKSASASIGAMELSAQALGLETAGKSGDMAFIRENLPVLRSLGRI

SEQ ID NO: 25477 - DNA, 1299 bp, Unknown
  Obtained from environmental sample
  misc_feature (1)..(1299): n is a, c, g, or t
gtgcggacgcaaaataccgccctatcacacgggcgtttcagcctattaacggactttacgttagacgaaataaaagcctttatcctagccaactacaatcccgccctgtacggcggcattaaagttatccctcttagaacaagaaccgagcatgatttggaaaagtttaacaaggccgtcgaggtaattcaggaagcgatagaagccgcctccgcggatttcagcgttcaggcgcactttgggctccgctggttttccaacattatccgcaacataaaaaacgccgaaaccgcaagcccggcttttcacgctaaaaaaattaaagaggcggcgattgcggcggcgggcccttcgctggacgggcagatagccgctcttacagaatataaatcgcgcggtgttttcattatctgttccgacaccgccctgcccgtccttttgcaaaacggcgttgaacccgacgcggttgtctctatcgactgccagcacatcagccactatcattttttcggctgtaatatacaaaacattccgcttgttctggacatagcaagccctcccctgctctcgcgcttttcaactcttcccgtctttttctcaggcggccatcctctggcgctctacatctcccgccattggcggcctttgcctttacttgacacatcgggcggcaatgttacttacgcctgcctttcccttgcggaaaagctcggcgctcaaatcataactctcttcggcgcggatttttcgtatatacgctcgcaatcctacgcgagaggaacatatatcaatccctattttgaaagaaagcaaaaccgttttcaccctttggaagccttatcttccgctttcttataccgcgtcccttttctgccccgcgaaaacgagaatcagatttaccgtgaaacgtcgtcgctgcgtttttaccgtcaaaaactggaagaaaaagcggctgcaatgaacgcgcaaatcaacgttttcccgggacaaggcgccccggttaaccttacaaacaaaacagcgcataacgcaattaaaacaaatcatgttaaaaccgcgcctgaaaactcgcagagcgtgcaaaaaagcggaattgagtttctggaacagtatcgaggcgaaatagccgctctgcccgcaagcggcttaaatgaaaaggaaagacagctttttacaacattgctccccacagccgccgcgctaaaacaccgcaatcttgagataaaatcagcggaattaattgaggaaactaaacgttattgtatagggcagattgataagatattatgttcatgttga

SEQ ID NO: 25478 - protein, 432 aa, Unknown
  Obtained from environmental sample
  DOMAIN (87)...(249): Protein of unknown function DUF115
  misc_feature (1)..(432): Xaa is any amino acid
MRTQNTALSHGRFSLLTDFTLDEIKAFILANYNPALYGGIKVIPLRTRTEHDLEKFNKAVEVIQEAIEAASADFSVQAHFGLRWFSNIIRNIKNAETASPAFHAKKIKEAAIAAAGPSLDGQIAALTEYKSRGVFIICSDTALPVLLQNGVEPDAVVSIDCQHISHYHFFGCNIQNIPLVLDIASPPLLSRFSTLPVFFSGGHPLALYISRHWRPLPLLDTSGGNVTYACLSLAEKLGAQIITLFGADFSYIRSQSYARGTYINPYFERKQNRFHPLEALSSAFLYRVPFLPRENENQIYRETSSLRFYRQKLEEKAAAMNAQINVFPGQGAPVNLTNKTAHNAIKTNHVKTAPENSQSVQKSGIEFLEQYRGEIAALPASGLNEKERQLFTTLLPTAAALKHRNLEIKSAELIEETKRYCIGQIDKILCSC

SEQ ID NO: 25479 - DNA, 1134 bp, Unknown
  Obtained from environmental sample
  misc_feature (1)..(1134): n is a, c, g, or t
atgaaaatagggttagatacttttgcctgtgacggcggcaagtccggagtgggtatgtatttaaaccaatttttaaaacgcataaaaccgtcagaagccctatttgagctttttggttgggaatatgacaggtatacatacagtgaagttgcgccgaactttgaatttattccgcaatgttcaattcatggggtaaccgcgaattcactatggcatgtttacagatacccaaaatttgccttgaaccgtaaatttagcgcctgtttttttgccgccgcccaccgtcaccttccgtatgattcgccatgtcctaccatcggcgtcgttcatgatatggcggcttattacggcagccgtaaaacaagggttcatcttggcgtatttttaagaatgatttttcccaattctttgcgcaggttggacagaattatcgccgtaagcgaatttgtgaaaaaagaattggtagagcttgcgcatgtgaaagaaaacagaatagaagtggttccaaacggaattgatcatgaatcgttttttccacggcagagaaacgaggagagcgtgcttttaatccagcctttcagttttaagcggccttatgtgctttgcgtatcgcgcattgatcatccgattaaaaaccatatccgtctgataaacgcttttaacatttttaaggaaaaaacgaaatttccgcacaggcttgttatggccggagccgacagtaacaacgccgctcttgtaaaagaagccgcttcctcctctccgtggagaagcgatattttctttacggggcattttcccgcaaaaagcctgcccgaactttacgccggcgccgatttcgccgttttaccgtccatgtacgaaggttttggaatgggcgcggtggaagcgatggcctgcggagtgccggtattatgcgcccgcgccgcatcgttaccagagaccacggaacacgccgcgttatactttgatccttttaatgttgaagatatggcggacagaatgattacggtcagcaccgaccgtaacatttacaacgagtgcagaagacttggccttgaaagggcgcaagccttttcatgggacaagtgcgtaggaagaacattacagataatttacgagaccgcgggcaattga

SEQ ID NO: 25480 - protein, 377 aa, Unknown
  Obtained from environmental sample
  DOMAIN (185)...(354): Glycosyl transferases group 1
  misc_feature (1)..(377): Xaa is any amino acid
MKIGLDTFACDGGKSGVGMYLNQFLKRIKPSEALFELFGWEYDRYTYSEVAPNFEFIPQCSIHGVTANSLWHVYRYPKFALNRKFSACFFAAAHRHLPYDSPCPTIGVVHDMAAYYGSRKTRVHLGVFLRMIFPNSLRRLDRIIAVSEFVKKELVELAHVKENRIEVVPNGIDHESFFPRQRNEESVLLIQPFSFKRPYVLCVSRIDHPIKNHIRLINAFNIFKEKTKFPHRLVMAGADSNNAALVKEAASSSPWRSDIFFTGHFPAKSLPELYAGADFAVLPSMYEGFGMGAVEAMACGVPVLCARAASLPETTEHAALYFDPFNVEDMADRMITVSTDRNIYNECRRLGLERAQAFSWDKCVGRTLQIIYETAGN

SEQ ID NO: 25481 - DNA, 735 bp, Unknown
  Obtained from environmental sample
  misc_feature (1)..(735): n is a, c, g, or t
ttgcggagaatacagattaatatggcaagtgaaaaattacggataaataatttgaatctcttttacggcgaatttcaggcgctaataaacgttaattttgatataggcaacaacgaggcggcggctcttatcggcccgtccggctgcgggaaatcgacctttataagggttataaaccggatgaacgatctcatcccttcatgccggattaccggggaagtgattttggacggcgagaatatttacggcgacatcgacgtaagtgaactacggacgagaattggcatggtattccaaaaaccgaatccctttaacatgagcgtttttgacaacgtggcttacggcaggcgaatgcagggcatgaaagataaaaagaagctggcggagctggtggaacagtccctgatcaaagccgccttgtgggatgaagtaaaagatcgcctgaaaaaacctgcgcacagcctttctggcggccaacagcagcggctctgcattgcacgaagcatttccatggcgccggagatcatcctaatggacgagccgaccagcgctttggacccgattgccacaggaagaattgaggaactcatcggcgaactaaaacgggatttcagcatcatcattgttacccattcaatgaatcaggccgcacgtatcagcgaccggacggctttctttttattgggggagcttatcgaatatgccgagacggcaaaggtgttctcggccatctga

SEQ ID NO: 25482 - protein, 244 aa, Unknown
  Obtained from environmental sample
  DOMAIN (38)...(229): ABC transporter
  misc_feature (1)..(244): Xaa is any amino acid
MRRIQINMASEKLRINNLNLFYGEFQALINVNFDIGNNEAAALIGPSGCGKSTFIRVINRMNDLIPSCRITGEVILDGENIYGDIDVSELRTRIGMVFQKPNPFNMSVFDNVAYGRRMQGMKDKKKLAELVEQSLIKAALWDEVKDRLKKPAHSLSGGQQQRLCIARSISMAPEIILMDEPTSALDPIATGRIEELIGELKRDFSIIIVTHSMNQAARISDRTAFFLLGELIEYAETAKVFSAI

SEQ ID NO: 25483 - DNA, 381 bp, Unknown
  Obtained from environmental sample
  misc_feature (1)..(381): n is a, c, g, or t
atggcttttatcaataatataactaacgctgatcttaaggtttgcggatcagcggcttcttttttacaatccgccatgtggggagaatttaaatcccgatttggctggacaagcagggagttcctgatagaatggtcaggatacgcggctactaccctgttattactcttccgccgtcttgcccccggcttctcatttgcgtatgtcccgtggggcccccctttgcccgataattttcccgcctcggaaaaaacggcggttctctcagaacttgcggtaaaactaaaacctttactttcgcgtaacaccacatttatccgttttgatccgccgtgggcagtcaatgaaggcgaagactcgttgttgctttccgaaggttaa

SEQ ID NO: 25484 - protein, 126 aa, Unknown
  Obtained from environmental sample
  misc_feature (1)..(126): Xaa is any amino acid
MAFINNITNADLKVCGSAASFLQSAMWGEFKSRFGWTSREFLIEWSGYAATTLLLLFRRLAPGFSFAYVPWGPPLPDNFPASEKTAVLSELAVKLKPLLSRNTTFIRFDPPWAVNEGEDSLLLSEG

SEQ ID NO: 25485 - DNA, 552 bp, Unknown
  Obtained from environmental sample
  misc_feature (1)..(552): n is a, c, g, or t
atgacccgctttggcatgagggtgcatctcgcccatccccagggctacgaggttatgccggaggttgaggcggtggcgaaggaaaatgctcaccttagcggcggcaaattcaccaaatcaaattccatgcatgaagcgtttaaagacgccgacatcgtgtaccccaagagctgggcgccttttgccgcgatggagaaacgcaccaacctgtacggcaacaacgactttgacgggataaaggccctggaaaaagagctgctggcccagaacgccaaacacaaggactgggaatgtaccgaagacctgatgaaagagaccaaagacggcaaggccctgtacctgcactgccttcccgccgacatttcaggcgttagctgcaaggaaggggaggttgccgccacggtttttgaccgctaccgcgtccccctttacaaggaagcgagccacaagccctacgtcatcgccgcgatgatcttcctttccaagattaagtgtccgcaggaaaccctgacgaatatggttttgcggaatagcccccggcatttcggctga

SEQ ID NO: 25486 - protein, 183 aa, Unknown
  Obtained from environmental sample
  misc_feature (1)..(183): Xaa is any amino acid
MTRFGMRVHLAHPQGYEVMPEVEAVAKENAHLSGGKFTKSNSMHEAFKDADIVYPKSWAPFAAMEKRTNLYGNNDFDGIKALEKELLAQNAKHKDWECTEDLMKETKDGKALYLHCLPADISGVSCKEGEVAATVFDRYRVPLYKEASHKPYVIAAMIFLSKIKCPQETLTNMVLRNSPRHFG

SEQ ID NO: 25487 - DNA, 855 bp, Unknown
  Obtained from environmental sample
  misc_feature (1)..(855): n is a, c, g, or t
ttgtacagctcttccaagagggaatcgacaagggggtttttcaagaggcgtatccgcgaggctgtcctcaggcgcatgtttttccgcgacctttcccgcgaaccggcgcggctggtttttgcggaagcggattttttgcccgggcttatcattgactgtttcgcgggctggccattagctgatattgaagccgctgttacccagcgccccctcacttttgaactaacacaggccgctctcggccctccgcgcttttggatttcggcgcagtttcttgtctggggaatggactgccgcagagagatgataaccgaagcgctgagggaggtggtaacaatcatcaacgcgccgggcgctgataattcaggcgaggcgccattcggcgcaccgtatccggcggcgtttatcccggacggcgcgtttgccggcattatcgaaaaatccagcgcccatgtccgcgaactggaagggctgcccctgcgcgaaggagcgctgtggggaacttttccagaaacggggattgtcattttcgaaggcggactgccttttattgtggatctgcttcacgggcaaaagaccggtttttttctggatcaaagggacaaccgcctgcttgcgtctcaatacgccgccatgctgcaaaaagagactggaacagagctgagaattctcgacgcatgctcgtatactggctgcttcggcctgcacgcagtgcgtccggcggacgcagtgcgtccgatggggaagctcaccatgctggatatatcggcggctgcgcttgaaacagcgcgaaagaacgccgcgcttcagggcgctggggatcgcgtaacggcaatcgaaagcaaatgtttttga

SEQ ID NO: 25488 - protein, 284 aa, Unknown
  Obtained from environmental sample
  misc_feature (1)..(284): Xaa is any amino acid
MYSSSKRESTRGFFKRRIREAVLRRMFFRDLSREPARLVFAEADFLPGLIIDCFAGWPLADIEAAVTQRPLTFELTQAALGPPRFWISAQFLVWGMDCRREMITEALREVVTIINAPGADNSGEAPFGAPYPAAFIPDGAFAGIIEKSSAHVRELEGLPLREGALWGTFPETGIVIFEGGLPFIVDLLHGQKTGFFLDQRDNRLLASQYAAMLQKETGTELRILDACSYTGCFGLHAVRPADAVRPMGKLTMLDISAAALETARKNAALQGAGDRVTAIESKCF

SEQ ID NO: 25489 - DNA, 960 bp, Unknown
  Obtained from environmental sample
  misc_feature (1)..(960): n is a, c, g, or t
gtgcgatcccttgaacaggcggcccttaacggcaagcatgtgacggcgctagtggaactcaaggcccgctttgacgaggaacgcaacatatcctgggcgaaccgccttgaaaaggccggggtgatagtggtgtacgggctttcacagctcaaagtgcacgcgaaagtgacaatggtgctgcggcgtgaaaacgagcgcgtcaggcgttatgtgcatctttccaccggcaattacaatgacaagaccgcgaagttatacgaagacatctgcctttttacctgccgcgaggaaatcgcctacgacgccggactgctgtttaacatgatcaccggctattcgctgagacaggccatgcggtatctggtaatcgccccctacagcctgaaaccgaaatttctggaactggtggagcgtgaggcgacgcgttccagccacctgtattccggcaagataataataaagtgcaattccattacagataacgatacgattaacgccctgtaccgcgcctcccgcgccggagtgaagattctcgtttgcgtcaggggaatctgcgccctggttcccggcgttccggggctttccgaaaacatcagggttatcagcgttattgactattaccttgaacattcaagaatgtactactttgccaacggcggggccggggaactgtacctttccagcgccgaccttatgcaccgcaaccttgaacgccgcgttgaaattatgtttcccgtccaggatgaaaagatacgggaggagcttcttgacgtattaaacgcctatttcatggacaactgccaggcgagggttcttgattccgccggaacatggaaacagattagcccgtccccgggtgaaaagcagttccgcctccagaaagacatgctttcccgcgccgccaggaattccgacatccccgcggctgttaagcaggaatttactgtaagaagggcgtga

SEQ ID NO: 25490 - protein, 319 aa, Unknown
  Obtained from environmental sample
  DOMAIN (1)...(298): Polyphosphate kinase
  misc_feature (1)..(319): Xaa is any amino acid
MRSLEQAALNGKHVTALVELKARFDEERNISWANRLEKAGVIVVYGLSQLKVHAKVTMVLRRENERVRRYVHLSTGNYNDKTAKLYEDICLFTCREEIAYDAGLLFNMITGYSLRQAMRYLVIAPYSLKPKFLELVEREATRSSHLYSGKIIIKCNSITDNDTINALYRASRAGVKILVCVRGICALVPGVPGLSENIRVISVIDYYLEHSRMYYFANGGAGELYLSSADLMHRNLERRVEIMFPVQDEKIREELLDVLNAYFMDNCQARVLDSAGTWKQISPSPGEKQFRLQKDMLSRAARNSDIPAAVKQEFTVRRA

SEQ ID NO: 25491 - DNA, 381 bp, Unknown
  Obtained from environmental sample
  misc_feature (1)..(381): n is a, c, g, or t
gtgctggagcttgcggcaaaggatgattcatgggacaaagaagtggacagccgccaggtacagcttgcccgtgaaagcggaggctgcgtaattggttcacgtcttgcgatctggatgctggaagaagcggatctgaaggtgtacctcagggcgaagcctgagaccagggccgcgcgaatcgttaaccgcgagggtggaaatcttgaggagatcgcggcctttaccgcggaacgtgacaagcgggataaccagcgctatatccgcatatacaatattgataattacaaatatgaatttgccgaccttatcattgacgccgataatctgactcctgacgagatagccaatttgattatcgaagccgctgaaaaaattgtttaa

SEQ ID NO: 25492 - protein, 126 aa, Unknown
  Obtained from environmental sample
  DOMAIN (2)...(120): Cytidylate kinase
  misc_feature (1)..(126): Xaa is any amino acid
MLELAAKDDSWDKEVDSRQVQLARESGGCVIGSRLAIWMLEEADLKVYLRAKPETRAARIVNREGGNLEEIAAFTAERDKRDNQRYIRIYNIDNYKYEFADLIIDADNLTPDEIANLIIEAAEKIV

SEQ ID NO: 25493 - DNA, 576 bp, Unknown
  Obtained from environmental sample
  misc_feature (1)..(576): n is a, c, g, or t
atggaaatcgccgaattcaaagaagcagtcctttcaaattaccggcagcagggaaggaaattcccctggcatttcgctgatccctggggggtgatggtctcggagttcatgctacagcagacgcgggccgagagggttattccctactgggaaaactggatgaaactctggccgcggccaaaaaccctcgcggacgcctcaatggaaaccgccctgcgcgcctggtcgggacttggttacaaccgccgctgccgttaccttaaagaaagcgccacgatcatcgcacacgagtacgacggcagggtgccggaaacgcctcaggctttgctttcgcttcccggagtcggcccctacatgtccgccgccattgcctgctttgcgtataactatccggcggttttatcgagacaacnatacgatcggccgtcatccattgcttctttcccggcagagatgatgtcaggatttccgagattatcccgatactggaagccgctcttcaaccgagcccgcagggcgtcgaatcagaggttcgcggttcccctcttgatccgcgcacatggcattacgcgctga

SEQ ID NO: 25494 - protein, 191 aa, Unknown
  Obtained from environmental sample
  DOMAIN (97)...(126): Helix-hairpin-helix motif
  misc_feature (1)..(191): Xaa is any amino acid
MEIAEFKEAVLSNYRQQGRKFPWHFADPWGVMVSEFMLQQTRAERVIPYWENWMKLWPRPKTLADASMETALRAWSGLGYNRRCRYLKESATIIAHEYDGRVPETPQALLSLPGVGPYMSAAIACFAYNYPAVLSRQXYDRPSSIASFPAEMMSGFPRLSRYWKPLFNRARRASNQRFAVPLLIRAHGITR

SEQ ID NO: 25495 - DNA, 315 bp, Unknown
  Obtained from environmental sample
  misc_feature (1)..(315): n is a, c, g, or t
atggtaacacaattgcttgaaaatcccggagcctccggcagtaacccgcccgtacccggcgttttgcccgcgacttacactgtaaggtcctggtttgagtcaaaggattgtttctggaatattgccggcttggccggggtctatgggaatccgtatctatggacaacgctttacaatgccaacaagttaaagctgcctgacccgaataacccggacaccctggagccgggtactgttttagacatccccagcataaagggcgaggtacggcagggcgcgtgggagagcggcaaggcctacgagcctatccggtaa

SEQ ID NO: 25496 - protein, 104 aa, Unknown
  Obtained from environmental sample
  misc_feature (1)..(104): Xaa is any amino acid
MVTQLLENPGASGSNPPVPGVLPATYTVRSWFESKDCFWNIAGLAGVYGNPYLWTTLYNANKLKLPDPNNPDTLEPGTVLDIPSIKGEVRQGAWESGKAYEPIR

SEQ ID NO: 25497 - DNA, 549 bp, Unknown
  Obtained from environmental sample
  misc_feature (1)..(549): n is a, c, g, or t
atggggaaattattatttgattatataagtgaaaattataaaacacctggaagaatggaaaaaagtaacagtcataattattgggttatattttgcaaatcaattatatcgatcgcaaattatttatcaaaattcaataatatagatgattttaataaatatgtatttcaatttataaatagtaactcggatataaggttatctttaccattaattttaaaagaggaaatatttggttatcaatttgctttatcttgtgatttcataaaagaaaatatatctcctgaatttattaaacctgatgttcatataagagatatttttattggaattggaatttcacatgataatatatctgactatcaattgtttagagatgtaataaatttttctgaatcaatttcagaggtaccttatactgtagataaattattctggttaattggaagtggtaatttttataattataatattaaaataaataccaataagaagttatttatagaaaaaattagaagtaaaacgggaaccgcacataacaaacggtaa

SEQ ID NO: 25498 - protein, 182 aa, Unknown
  Obtained from environmental sample
  misc_feature (1)..(182): Xaa is any amino acid
MGKLLFDYISENYKTPGRMEKSNSHNYWVIFCKSIISIANYLSKFNNIDDFNKYVFQFINSNSDIRLSLPLILKEEIFGYQFALSCDFIKENISPEFIKPDVHIRDIFIGIGISHDNISDYQLFRDVINFSESISEVPYTVDKLFWLIGSGNFYNYNIKINTNKKLFIEKIRSKTGTAHNKR

SEQ ID NO: 25499 - DNA, 312 bp, Unknown
  Obtained from environmental sample
  misc_feature (1)..(312): n is a, c, g, or t
atgagggaaaaccgccgtctgtaccccgatgaagtttttgtaaacatacttaaccgttctttgacagagacgctgagcagaacaattataacaacgttaacaactatgctggcggtattgtctctgttcatctttacaaccggttccatgaaggactttgccctggccctgcttgtgggccttgtctcaggcgtttacacgacaactttcattgccaccggctttgtgtatctatgggataaagagaaggcaaaacgggccaagaagaagattgccgcgccacaagctaagggcgcgctggcaaaagcgtaa

SEQ ID NO: 25500 - protein, 103 aa, Unknown
  Obtained from environmental sample
  DOMAIN (2)...(82): Protein export membrane protein
  misc_feature (1)..(103): Xaa is any amino acid
MRENRRLYPDEVFVNILNRSLTETLSRTIITTLTTMLAVLSLFIFTTGSMKDFALALLVGLVSGVYTTTFIATGFVYLWDKEKAKRAKKKIAAPQAKGALAKA

SEQ ID NO: 25501 - DNA, 324 bp, Unknown
  Obtained from environmental sample
  misc_feature (1)..(324): n is a, c, g, or t
atggtaatactacgagctaatgtcttaggtttctgcatgggtgtcaggcgggcggttgagctagcctacagccaggcggaacgccccgaggcaaaggtttattcactcggccctttaatccataaccctcaagtgcttgaggacttacaacaacggggcgtggcaatacttgacgaggccagactgccggaaaaccttttcgggactgttgtcattatccgggcgcacggcataagccccccaaacagaagcggaacctgcgcaaaacaaggggcaattgttgttgaaccccaccctgcccaaaagtcaaagccagccagttaa

SEQ ID NO: 25502 - protein, 107 aa, Unknown
  Obtained from environmental sample
  misc_feature (1)..(107): Xaa is any amino acid
MVILRANVLGFCMGVRRAVELAYSQAERPEAKVYSLGPLIHNPQVLEDLQQRGVAILDEARLPENLFGTVVIIRAHGISPPNRSGTCAKQGAIVVEPHPAQKSKPAS

SEQ ID NO: 25503 - DNA, 1518 bp, Unknown
  Obtained from environmental sample
  misc_feature (1)..(1518): n is a, c, g, or t
atgtttgatactgaatttgcaatgggaatttatcaaagcggcggacttaaaggcggttccggtaaagatgcctttgatgaaattctgaacggagacgataagaatcatcaaaacaacaaacttttcaaatcattattaaaaaatcctgatttttgcaaaaaatttgtaaatacaatgctggatctttacaatgtaaactttcaccccgacaattatttacccaaattaaataattatgcggcggtatacagaccgcttatgaacggttatttttccagatggggcggctgggatggaatgtttaataataaagtaaatgacgctagaagttaccttaacaatataagaaccgcaatggtaaatgattatttgccgaaatattttaacggttattcaggaatagccaatatcggtatttcttcaggcaaattatacaatgttaccgtatctgcaacaggcgtatccggtacgacgataaaaattaattcattaaccccgaatattgccggaggttggacaggcaaatactattccggcaatccaattaccgtaacggcaagcgcccctccaaacggctatgaatttgacggctggacggtagtaaatggtaatgccgcaaccccttcggttttaacaacaaccgttaatattattaccgataatacgctgattatagcanaatacaagcaaacagggagtgcagttgttcccgtaaccggtataagtttgaatacatctaccctcatattatcaagcggaaatccttctactctaactgccactgttacgccgcccggcgcgacatacaatacagtaatatggagttccagcgacaccggcgtagcaagagtgaataatggagtagtaaccgctgtaagtaccggaacggcggtaattaccgcttctactgcactaggcgaatttacggcaacatgtacggtaactgtaaaagaaacagtattgctggatttagcagcaaaacttcaaactctgccggtacagactattaatactgatgcgcaattcaataccgcgtttggcggtttaccggtaagacccggagacggaatcgaaattgaaaattcaactaataaacgcgtgacttaccagataattaatgattccggcgccaggaaacttcaggttaatgtaaatataaactggggttccggattaattgttacgaatgggcaatttaaattcaaggcaggcgatattattaattttaagggtaaattcttaaacggtcccagcaattcaatatatgtcaatatagattgctgggattatgatcctcttcagggatggaatgaaggttttacaaacgggcagacttttcaaaaaaccttcactttatccgcaagtgacgcggccacaataaacgcaaatgcggataaatactacggatccgctcttaatttcaaaacagggggaacagcgccctgggatggcactgtttatcctgccggtattggttcatttattatagaacagattaaaatttacaggattgaataa

SEQ ID NO: 25504 - protein, 505 aa, Unknown
  Obtained from environmental sample
  DOMAIN (237)...(314): Bacterial Ig-like domain (group 2)
  misc_feature (1)..(505): Xaa is any amino acid
MFDTEFAMGIYQSGGLKGGSGKDAFDEILNGDDKNHQNNKLFKSLLKNPDFCKKFVNTMLDLYNVNFHPDNYLPKLNNYAAVYRPLMNGYFSRWGGWDGMFNNKVNDARSYLNNIRTAMVNDYLPKYFNGYSGIANIGISSGKLYNVTVSATGVSGTTIKINSLTPNIAGGWTGKYYSGNPITVTASAPPNGYEFDGWTVVNGNAATPSVLTTTVNIITDNTLIIAXYKQTGSAVVPVTGISLNTSTLILSSGNPSTLTATVTPPGATYNTVIWSSSDTGVARVNNGVVTAVSTGTAVITASTALGEFTATCTVTVKETVLLDLAAKLQTLPVQTINTDAQFNTAFGGLPVRPGDGIEIENSTNKRVTYQIINDSGARKLQVNVNINWGSGLIVTNGQFKFKAGDIINFKGKFLNGPSNSIYVNIDCWDYDPLQGWNEGFTNGQTFQKTFTLSASDAATINANADKYYGSALNFKTGGTAPWDGTVYPAGIGSFIIEQIKIYRIE

SEQ ID NO: 25505 - DNA, 1479 bp, Unknown
  Obtained from environmental sample
  misc_feature (1)..(1479): n is a, c, g, or t
ttgcctgagcgcataggtaagatgctgagagacgtagatactgtctacggtaaatatacggatgaagtcgttagggctgttgcaaacggcgataattatgcctgcacaagtttttctccggctttaaatacaaacttagcaattaatatacagtctttcccaatgggcaatacgggtcaatcatggagcatcatgatcgcggcgactgaatcgtacgttttaaaagaagtaaaattcctgaccaagattacgatcattattgcggcagcagccattgtaatagcggcgttaattgtattccttacgcttagcgctactaccgccccaatcgtcgatgtagcgaacacccttaaagatatatccgaaggcgaaggcgacttaacgaaaacaatccccgtcaaatccgatgacgaagtaggcgacctttccaaatacttcaacaaaacaattcaaaaaatcaggggtcttgtgcttctcattaaacagcaggcgggcgtgttgtcggatataggcaacgacctgtccagcaatatgaccgaaaccgcggcggcaatcaaccaaattaccgcaaatatacagagcataaagagccgtgtccttaaccagagcgccagcgttacggaaacaaacgcgacaatggagcaggttatcgttaacattaacaagctcaacaaccatgttgaaaaccagagcagaaacgtttcacaggtatcatccgccattgaggagatggtagcaaatatcagttctgtaactcaaacattggttaataacgccactaacgtaaaaacattaattgattcttccgaagtgggaaagaccggcttgcaggaagtagcctctgatattcaggaaatcgcgcgcgagtccgaaggcttgctggagattaactcggttatggaaaatatcgccagccagaccaatctgctttcgatgaatgccgcaatagaagcggcgcacgccggggaggcgggcaaaggttttgccgtagtcgccgatgaaatccgcaagctggctgaaagttccgaagagcagtcaaaaacaattggtacggtattgaaaaagatagcggaatcaatcaaaaaaattaccggctccaccgagaccgtactaaccagatttgaagcgattgattcaagcataaagacggtatcggagcaggaagaggtaatacgtcatgcgatggaggaacaggctgaagggagccatcaactccttcagggaaccgctaatttgaacggaattacccagcaggtaaaagccggttccgaagaaatgcttgtgggcagccaggaagtgattagggaaagccggaatctggaaagagcgacgcaggagataaccggcggcatgagcgaaatggccaccggcgcggaacaagtgaacctggcggtaaaccatgtcaacactataagcggcaagacacgcgaaggcattaatactttgttaaaggaagtttcgcgcttcaaagtggagtaa

SEQ ID NO: 25506 - protein, 492 aa, Unknown
  Obtained from environmental sample
  DOMAIN (228)...(457): Methyl-accepting chemotaxis protein (MCP) signaling domain
  misc_feature (1)..(492): Xaa is any amino acid
MPERIGKMLRDVDTVYGKYTDEVVRAVANGDNYACTSFSPALNTNLAINIQSFPMGNTGQSWSIMIAATESYVLKEVKFLTKITIIIAAAAIVIAALIVFLTLSATTAPIVDVANTLKDISEGEGDLTKTIPVKSDDEVGDLSKYFNKTIQKIRGLVLLIKQQAGVLSDIGNDLSSNMTETAAAINQITANIQSIKSRVLNQSASVTETNATMEQVIVNINKLNNHVENQSRNVSQVSSAIEEMVANISSVTQTLVNNATNVKTLIDSSEVGKTGLQEVASDIQEIARESEGLLEINSVMENIASQTNLLSMNAAIEAAHAGEAGKGFAVVADEIRKLAESSEEQSKTIGTVLKKIAESIKKITGSTETVLTRFEAIDSSIKTVSEQEEVIRHAMEEQAEGSHQLLQGTANLNGITQQVKAGSEEMLVGSQEVIRESRNLERATQEITGGMSEMATGAEQVNLAVNHVNTISGKTREGINTLLKEVSRFKVE

SEQ ID NO: 25507 - DNA, 717 bp, Unknown
  Obtained from environmental sample
  misc_feature (1)..(717): n is a, c, g, or t
ttgaagagaccgctttggaaactcttcacgcgtgaattcatgcgctccggtcctgatcctgactttccctatttaacggaaacgcagtattttccgttccgtgatccaaaggaatggaaagatgacattatcgcggtaggcgggaatctttctcccggaatgctgctttccgcttatgaacagggtatctttccctggtacaatgaaggagaccccgttgtctggcaatcgcccgatccgcgctgtgtgatctttcctgaaaaactgcatatttcctcatcaatgagaaagatattaaacaaccgcaccttcataataaaattcgacgaaaatttcacagaagtcatgaaaggctgcgcggaaacaaaacgcccgcatcagaacggtacatggatttcaaaggatattatcgaagcgtatacggaactgcaccgtcttggctgggcgcattcggcggaagcatggcaggacggagaactggcaggcggttgttacggcgtgttaatgggggatgcgttcttcggagaatcgatgttttccagaaagagcaacgcttccaaagccgccttcctgtctcttgcggaaagactttttaagtacggggcggcgtttatcgactgtcaagttccgacaaatcatttgctcagtctcggcggagaagtaatggcaagggaaaattttttaaggctccttgatattcacggaatatcacgataa

SEQ ID NO: 25508 - protein, 238 aa, Unknown
  Obtained from environmental sample
  DOMAIN (51)...(224): Leucyl/phenylalanyl-tRNA protein transferase
  misc_feature (1)..(238): Xaa is any amino acid
MKRPLWKLFTREFMRSGPDPDFPYLTETQYFPFRDPKEWKDDIIAVGGNLSPGMLLSAYEQGIFPWYNEGDPVVWQSPDPRCVIFPEKLHISSSMRKILNNRTFIIKFDENFTEVMKGCAETKRPHQNGTWISKDIIEAYTELHRLGWAHSAEAWQDGELAGGCYGVLMGDAFFGESMFSRKSNASKAAFLSLAERLFKYGAAFIDCQVPTNHLLSLGGEVMARENFLRLLDIHGISR

SEQ ID NO: 25509 - DNA, 774 bp, Unknown
  Obtained from environmental sample
  misc_feature (1)..(774): n is a, c, g, or t
atgaatcaatctcagtggggacaacagttaggcgaaatgattgcaggcggcgattatgacgtggttatcggttccaatccgtctttgcctgaaatttgcgccggtgtggcgaagaatttcccgaatcaaaaatttataatagcggatgccgaatacgaaggaaatccgcaaatcagaacatacaattataatcaaagagaacagtcgtattttttgggttatcttgccggtcttgttacaataagcaaaatgccgtacgctaacagccaaaagaaaatcggctttttagcggctcaggagtatcctcttttgacaaggcaaatggttcccggttttcttgaaggcgcaaaaaaagctgatcccgcaatagaacttgattttagagtaataggttcttgggcggacgcaaacaaagcgtcggaacttgcgtcggcgatgatggaatcgggagtcgatgtttttacttcgatagccggcggagcggcgcagggacttgttaaaaccgcgtcggataaaaaagcgtatattgtttggtataacacaaacgcgtataaaatggctccgggttttatagtcggctgcggtattatggaacagaaaaaacttatcagagaaatactggagaatgttttagccggtaaaatgcaatacggtatttcggagacaatcggggtaaaagaagggtatcttaattttatttatgatgatcccgaatataaaaaccttccggcggatatccgtgaaaaatttgaaaaatttatgaaagatttttaa

SEQ ID NO: 25510 - protein, 257 aa, Unknown
  Obtained from environmental sample
  DOMAIN (1)...(257): Basic membrane protein
  misc_feature (1)..(257): Xaa is any amino acid
MNQSQWGQQLGEMIAGGDYDVVIGSNPSLPEICAGVAKNFPNQKFIIADAEYEGNPQIRTYNYNQREQSYFLGYLAGLVTISKMPYANSQKKIGFLAAQEYPLLTRQMVPGFLEGAKKADPAIELDFRVIGSWADANKASELASAMMESGVDVFTSIAGGAAQGLVKTASDKKAYIVWYNTNAYKMAPGFIVGCGIMEQKKLIREILENVLAGKMQYGISETIGVKEGYLNFIYDDPEYKNLPADIREKFEKFMKDF

SEQ ID NO: 25511 - DNA, 789 bp, Unknown
  Obtained from environmental sample
  misc_feature (1)..(789): n is a, c, g, or t
ttggaggaatgggacttaaatatgacaactatctttattttaaagatacgctggaaaacggcgggggcgttagcgcgtaccgtaatgtttattcacaccgcaagcgatcctacggttgaatgcctgatgattcccgatatgtcactcgccgtagccgaacaatttgccctgcagggcaaggacgtgcttgtcctgttgaccgacatgacaaactttgccgacgcgatgaaggaaatctcaatcattcaagagcaggttccctccaaccgcggttatcccggcgacttgtacagccaattggcgagccgttatgaaaaagcggttgactttgaaaccgcgggttcaattacggtccttggagtaacgacaatgccaggcgacgacgttacccaccctgtgccggataataccggatacattacggaaggccagtattatcttaaaaacggccgtattgagccgtttggctccctgtcgcgccttaaacaacaggttaacggcaagacgcgcaaagaccaccgcgcccttatggacggcatgatcaaactttattcagccttccgtgacactctggaaaaaaaggcgatgggctttatcatgaccccttgggacgaaaaacttttaaaatacggcgtacaatttgaaaaaagaatgatggatctttcagtcaatattccgcttgaaaaagcgttggatttaggctgggaaatcttgtcggattgttttaacaaagaagaaacaggcttgcgcacggaattaattaatgaattctggccaaaaaaagaatag

SEQ ID NO: 25512 - protein, 262 aa, Unknown
  Obtained from environmental sample
  DOMAIN (8)...(159): ATP synthase alpha/beta family, nucleotide-binding domain
  misc_feature (1)..(262): Xaa is any amino acid
MEEWDLNMTTIFILKIRWKTAGALARTVMFIHTASDPTVECLMIPDMSLAVAEQFALQGKDVLVLLTDMTNFADAMKEISIIQEQVPSNRGYPGDLYSQLASRYEKAVDFETAGSITVLGVTTMPGDDVTHPVPDNTGYITEGQYYLKNGRIEPFGSLSRLKQQVNGKTRKDHRALMDGMIKLYSAFRDTLEKKAMGFIMTPWDEKLLKYGVQFEKRMMDLSVNIPLEKALDLGWEILSDCFNKEETGLRTELINEFWPKKE

SEQ ID NO: 25513 - DNA, 630 bp, Unknown
  Obtained from environmental sample
  misc_feature (1)..(630): n is a, c, g, or t
atgaacaaagtatacagcaaaattgaatcgataacgggaagcgttattactgtaaaggctgacggaatccgttacggtgaccttgccgaagtagatacagtattcggcacctcgcttgccgaagtaaaccgtctgcaaggtgatactgtcgcgttgcaggtattcgcgggcggacgcggtatctcaacaggcgatacagtccgttttctcggacgcccgatgcaggttccgttttcagaaaaccttatgggcagggtattctcaggttcaggcaaaccgcgcgacaaaggccccgagttaagcgaaaacatgataccaatcggcggtccgtcggttaatccttctcagcgtattataccgcgaaagatgatccgtacaggcattcccatgatagatctttttaatactcttgttgtatcgcagaaactaccgattttctctgtttcgggagaaccgtataatgaactgcttgcgcgtatcgccatgcaggctgaagttgacgtaatcgttcttggaggaatgggacttaaatatgacaactatctttattttaaagatacgctggaaaacggcgggggcgttagcgcgtaccgtaatgtttattcacaccgcaagcgatcctacggttga

SEQ ID NO: 25514 - protein, 209 aa, Unknown
  Obtained from environmental sample
  DOMAIN (8)...(71): ATP synthase alpha/beta family, beta-barrel domain
  misc_feature (1)..(209): Xaa is any amino acid
MNKVYSKIESITGSVITVKADGIRYGDLAEVDTVFGTSLAEVNRLQGDTVALQVFAGGRGISTGDTVRFLGRPMQVPFSENLMGRVFSGSGKPRDKGPELSENMIPIGGPSVNPSQRIIPRKMIRTGIPMIDLFNTLVVSQKLPIFSVSGEPYNELLARIAMQAEVDVIVLGGMGLKYDNYLYFKDTLENGGGVSAYRNVYSHRKRSYG

SEQ ID NO: 25515 - DNA, 1095 bp, Unknown
  Obtained from environmental sample
  misc_feature (1)..(1095): n is a, c, g, or t
atgttggcgagagcttcagcagcattctccgggcggctcgcccattcgcgtgtggaagaagccagaagccatgtggaaaaattgattggggcggaaccgcatactgtcatttttacctcaggcggatcggaagcaaataacgccgtgtttcagacgatgaggcagcttgcttcagcgcctaacggcagtcctcttaaggacggccgctgcgagtttatcaccagttccatagaacacccctgcgtgcttaactccgcgaaatacctgcaaagcctcggttttaaagtttattttatacaggttgacgaatacgggaaaattgacatggacgctttcaaaaaggcgttaagcgataaaaccattcttgtatctataatgatggctaacaatgaaatagggactatacaggacattaaggaaatctgttcgcttgcgaaaaactcaggcgccttggcgcataccgatgccgtgcaggcgcttggcaagatacccgtcaacgttgacgatcttggagtggattaccttaccgtgtcggcgcacaagatttatgggcccaaggggattggggccctgtacgtgcgcaaaggctcgccgctgttacccctgatccacggcgggcatcaggaagaaagcctgcgggctggaacctataacaacatcggcatacttgggtttggaaaagcggcaaagatcgccctggatgaaattgacaaatacggaaaggaaatcgccctcctgcgaaaccgcctgcgcgacggccttgtaaaagcgattcccaatataaaaataaacggccaccctgcggacgcgctgcccaatactttnaacatttcattccccggcgctgaangggaagcaatcctcctttccatggacctaatcggaatagaggcgtctaccggctcggcctgcgctttcagcagccttgagccgtctcatgtgctgatggcgaccggcgtagggccggagctggcccacggctcgatccgtttcagtctgggctgggggatcaccgtggaagatgttgattatatagtagaaacactgccgcctataatcgcccgactgcgggcaatgggagggatttatgtctga

SEQ ID NO: 25516 - protein, 364 aa, Unknown
  Obtained from environmental sample
  DOMAIN (1)...(345): Aminotransferase class-V
  misc_feature (1)..(364): Xaa is any amino acid
MLARASAAFSGRLAHSRVEEARSHVEKLIGAEPHTVIFTSGGSEANNAVFQTMRQLASAPNGSPLKDGRCEFITSSIEHPCVLNSAKYLQSLGFKVYFIQVDEYGKIDMDAFKKALSDKTILVSIMMANNEIGTIQDIKEICSLAKNSGALAHTDAVQALGKIPVNVDDLGVDYLTVSAHKIYGPKGIGALYVRKGSPLLPLIHGGHQEESLRAGTYNNIGILGFGKAAKIALDEIDKYGKEIALLRNRLRDGLVKAIPNIKINGHPADALPNTXNISFPGAEXEAILLSMDLIGIEASTGSACAFSSLEPSHVLMATGVGPELAHGSIRFSLGWGITVEDVDYIVETLPPIIARLRAMGGIYV

SEQ ID NO: 25517 - DNA, 594 bp, Unknown
  Obtained from environmental sample
  misc_feature (1)..(594): n is a, c, g, or t
atgtctgattggctttattcggatacggtcaaggagcattttaccaatccccgcaatgcccttttggaagacgaagatactttttcatataacgcaagggggcagacaggaaacatcaaatgcggggatcagatgctcatgctccttaaaattgataatgatgttatcaccgacgtgcgctggagaacctacggatgcgccagcgccatcgcgtcaacgagcatgttgtctgaagtaataaagggaatgaagatagaggacgcctacaaggtaaggccggaagaccttgttgaaaaactgggcggcctgccttcatacaagatccactgctcagtactgggcgacaaggccctccgcgccgccattgacgactacctcgccaaaacaggaagagcgggattgttacaggaagcggtcaccgaaatttgccactgcctgggcatcaccgacaaggacattgaaaacgccttccaaaacggcgcgcgcagttgggaagatttacagcaggccaccaagatcggcaccgtctgcggaaactgcaaaacaaaagcgctggatctgctgcacggcctggaacacatttacgggatgtaa

SEQ ID NO: 25518 - protein, 197 aa, Unknown
  Obtained from environmental sample
  DOMAIN (140)...(192): BFD-like [2Fe-2S] binding domain
  misc_feature (1)..(197): Xaa is any amino acid
MSDWLYSDTVKEHFTNPRNALLEDEDTFSYNARGQTGNIKCGDQMLMLLKIDNDVITDVRWRTYGCASAIASTSMLSEVIKGMKIEDAYKVRPEDLVEKLGGLPSYKIHCSVLGDKALRAAIDDYLAKTGRAGLLQEAVTEICHCLGITDKDIENAFQNGARSWEDLQQATKIGTVCGNCKTKALDLLHGLEHIYGM

SEQ ID NO: 25519 - DNA, 1020 bp, Unknown
  Obtained from environmental sample
  misc_feature (1)..(1020): n is a, c, g, or t
atgtatgccctggggcttaacacctacaccgtaggcaacgagatcaaggccgcagtggacggcgttaccgccaccaggtacaaaaccggcggcaaggattacgatgtcctccttattttggcggaagccgaccgcagtacccgtccggcgctggatcacattttcattaacagccagatggcggggcgcgttccactttccagttttgtgcaatacgaagaaggcacaggcccgatgaccataaaccgggaaaaccagagccgggtcattcacgtaacggcaggagcgaaacccggaaccaggatgaacaccctccaggacagggtagaggccctgatgacggcggaggttcccgttgaggatgacgtgattattgaatacggcggcgacaacgcggagatggtaaaaatgatgacccgctttgcccttatctgcgttgtggcgatcctgttggtattcggcgtcatggcgagcctctttgagtccttccgggatcctttcatcattatctttacgattcccctgtcgttcataggcattgtggctatctacctgatgaccggcgacactttcaatattcttaccgccgtagggcttctcgtgcttgtcggtgttattgtgaacaacgggatcgtgcttgtggactacacaaacctgcttcgcaagcgcggttattctctttacgatgcctgcgtggaagcggcgggaaaccggctccgcccaatcctgatgaccacacttactaccatcctgggacttttgccgatggcgtttttcccaggcgaaggctcggagcttgtcgcgcccatcggaaagacggttctcggcggcctttctttcggaaccctgatgaccctgttccttatgccaacggtttacttcatcatgaacaaacattcagatgaacgggctgcaaaagccgaagccaggcgcgagcggattgccgcggggctcaggaagaaagatgtcaaagcggaagtcattgtagaagtaaaggaggccaagaatgttacggcttga

SEQ ID NO: 25520 - protein, 339 aa, Unknown
  Obtained from environmental sample
  misc_feature (1)..(339): Xaa is any amino acid
MYALGLNTYTVGNEIKAAVDGVTATRYKTGGKDYDVLLILAEADRSTRPALDHIFINSQMAGRVPLSSFVQYEEGTGPMTINRENQSRVIHVTAGAKPGTRMNTLQDRVEALMTAEVPVEDDVIIEYGGDNAEMVKMMTRFALICVVAILLVFGVMASLFESFRDPFIIIFTIPLSFIGIVAIYLMTGDTFNILTAVGLLVLVGVIVNNGIVLVDYTNLLRKRGYSLYDACVEAAGNRLRPILMTTLTTILGLLPMAFFPGEGSELVAPIGKTVLGGLSFGTLMTLFLMPTVYFIMNKHSDERAAKAEARRERIAAGLRKKDVKAEVIVEVKEAKNVTA

SEQ ID NO: 25521 - DNA, 360 bp, Unknown
  Obtained from environmental sample
  misc_feature (1)..(360): n is a, c, g, or t
gtggcttcccatatcggcgaacttgaaaattctattaaagaaaatataaaggcccgttttaaggaaatttcaggcgatactattgatgagaatcgtattcttgcggaaactgccgttctactgatgaagtacactatctccgaggaggtttcccgtctttcttcccaccttgccgagttcagggcggaaaccgcaaaaaatgaaagaccgggaaagaaacttgattttctctgtcaggaaattaaccgcgagattaataccatcggctcaaaaagcgccatactggaagtaagccgcgctgtggtgggaatgaaggaatcacttgaaaatatcagggaacagttaaggaatgttgaatag

SEQ ID NO: 25522 - protein, 119 aa, Unknown
  Obtained from environmental sample
  DOMAIN (32)...(119): Domain of unknown function (DUF1732)
  misc_feature (1)..(119): Xaa is any amino acid
MASHIGELENSIKENIKARFKEISGDTIDENRILAETAVLLMKYTISEEVSRLSSHLAEFRAETAKNERPGKKLDFLCQEINREINTIGSKSAILEVSRAVVGMKESLENIREQLRNVE

SEQ ID NO: 25523 - DNA, 441 bp, Unknown
  Obtained from environmental sample
  misc_feature (1)..(441): n is a, c, g, or t
atggcttttgcagggttacgcaaagaagaagcaagacaacttaaaatggaaaatatagaaggtgggaaaatatccctaatcggtaaaggtggcaaagccgctactatacctatttctagcaggctcaaagaacacctaaataaatacctagctttaaggggggacgcagcaggtttattattccctaaattaggaattaaaaccgactataataataattttggaatgttaataacaaagtgggcaaaaatagcaggcgtttcaaatgcagacacggcacacctacaccgctttcgtcatagctttgcaagcaacctactaagggcaggtaaaagcataaaagccgtacaaatgctaatgagacacgaaaacgttacattaactttaaacatttacggtcacttattgcctagcgatttagaaaaagaaatagaaatataa

SEQ ID NO: 25524 - protein, 146 aa, Unknown
  Obtained from environmental sample
  DOMAIN (1)...(142): Phage integrase family
  misc_feature (1)..(146): Xaa is any amino acid
MAFAGLRKEEARQLKMENIEGGKISLIGKGGKAATIPISSRLKEHLNKYLALRGDAAGLLFPKLGIKTDYNNNFGMLITKWAKIAGVSNADTAHLHRFRHSFASNLLRAGKSIKAVQMLMRHENVTLTLNIYGHLLPSDLEKEIEI

SEQ ID NO: 25525 - DNA, 948 bp, Unknown
  Obtained from environmental sample
  misc_feature (1)..(948): n is a, c, g, or t
atggagcgccgacgacggctatattgtcgaggtaaaaagttgaagccgcaatctaacgaacgcagtaacattcggcataattacggcccgctttactcttctccaatggcaatatggttcagtctttttttccttgcccctatagtaattattatcatttacagttttttaaaaaaaggtttatacggcggcgttgaatgggaactgtcgcccgacgcttaccgctaccttggggataaggtacttctcaatataactttccgcacaattacaacttccgtaatagccacgattattacaattttaatcgccctgccgtgcggttactgcatagcaagaagcaaaaatcaaacggtttttttggtgcttatcatcattccgttctggacgaattttcttatcagggtcttcgcgtggatgaacattttgggcagtaacggttttttaaatgaatttcttattcgtatggggttaatcagtgattatataaattttttatataaccaaaaagccgtcatattggtgcttgtttatatgtacctgccctacgctattttgcccttgttttccactatagataaatttgacttttcacttctggaagcggcgcgcgatcttggcgcgaaccagtttgtttcaattatgaagatactaattccgaatatcagaagcggcatttttacggcgatactttttacattcattcccattttcggcgcttacgcggttcctcttttagtcggcggcatggattcctatatgcttgggaacgttatcgccgaccagctttcaaaatcgcgcaactggccgcgcgccgccgcgatttccatggtgcttaccctggttactacgcttggagttctaataatgatgaacatccaaaaacgcgacgcttcaagaattaccgaagcaaagagcgcggaaggaaaatttgggggcgcggaatga

SEQ ID NO: 25526 - protein, 315 aa, Unknown
  Obtained from environmental sample
  DOMAIN (86)...(303): Binding-protein-dependent transport system inner membrane component
  misc_feature (1)..(315): Xaa is any amino acid
MERRRRLYCRGKKLKPQSNERSNIRHNYGPLYSSPMAIWFSLFFLAPIVIIIIYSFLKKGLYGGVEWELSPDAYRYLGDKVLLNITFRTITTSVIATIITILIALPCGYCIARSKNQTVFLVLIIIPFWTNFLIRVFAWMNILGSNGFLNEFLIRMGLISDYINFLYNQKAVILVLVYMYLPYAILPLFSTIDKFDFSLLEAARDLGANQFVSIMKILIPNIRSGIFTAILFTFIPIFGAYAVPLLVGGMDSYMLGNVIADQLSKSRNWPRAAAISMVLTLVTTLGVLIMMNIQKRDASRITEAKSAEGKFGGAE

SEQ ID NO: 25527 - DNA, 609 bp, Unknown
  Obtained from environmental sample
  misc_feature (1)..(609): n is a, c, g, or t
atgttaattgagcttgacacaattcacgataaaatcggcataacatttatttatgttacccacgaccagcaggaagctctttcagtatcggacaggcttgccgttatgaatcagggagacattctgcaaataggcacgcctcaggaaatttacgaaagcccggcttctgattttgtcgcgcgttttataggcgagacaaatttgtttgacgcgtccgttatcagcgttgaaaagctgaacaaagagtgggatgaatttatggtggaacttgatattcccgaactggggcgcattaaagttaccaccgtagacaccgtaaaaacggggcaaaaggtaagttttacaatacgcccggaaaaaatagtaataaacacggacaagcctacgacaaaacgcgaagacattaacctttttaacggaatcgtcgacgagcctatatattccggctttcagactaaattctacgttaaaaccactcaggataaaacgcttaaggttatcaaacagcacgcgaattattccgatgacggtcctgccatacgctggaaggacaccgtttacctttcatggagcgccgacgacggctatattgtcgaggtaaaaagttga

SEQ ID NO: 25528 - protein, 202 aa, Unknown
  Obtained from environmental sample
  DOMAIN (114)...(198): TOBE domain
  misc_feature (1)..(202): Xaa is any amino acid
MLIELDTIHDKIGITFIYVTHDQQEALSVSDRLAVMNQGDILQIGTPQEIYESPASDFVARFIGETNLFDASVISVEKLNKEWDEFMVELDIPELGRIKVTTVDTVKTGQKVSFTIRPEKIVINTDKPTTKREDINLFNGIVDEPIYSGFQTKFYVKTTQDKTLKVIKQHANYSDDGPAIRWKDTVYLSWSADDGYIVEVKS

SEQ ID NO: 25529 - DNA, 1236 bp, Unknown
  Obtained from environmental sample
  misc_feature (1)..(1236): n is a, c, g, or t
atgtatatcattttgaacacccaccatgacgaggacgtgcttacatttatgaattcaaacgcggctgcggggaaggcggcgttccagaaactctgggagcagattgccgacgcctttaaggattacaacgaaaaactgatctttgagggattgaacgaaccaagaacccccggcagttccagtgaatggaacggcggcactgccgaagaacgcgccaacctgaattcctattaccccattttcgttaatacggtaagaaactcaggcggtaataacggcaagcgcgtattgatgataaatccctatgccgcttccatggaagcagtcgcgatgaacgcgttaacgctcccgacagacagcgcggcaaataaacttattgtttctttccactcttatcagccttataattttgccctggatcaagaccccacaaaaaattcgtggaacaagaacaattccggggatacttcgccgattaccggtccgattgaccgctattatactaaattcgtcagtcagggtattcccgtaataatcggcgaattcggcgccatgaataaaaacaatgaagccgtcagggcgcaatgggccgaatattatattagttacgcgcggagtaaaggcattaaatgtttttggtgggataacggcgttacaagcggcagcggtgaactatttggcctgcttaacaggcagaacaatacttttacatataacgctttacttaacggcatgatgagcggaacaggcggcgatgttccaactccgccaacccctccaactccgccggatacgccgactccgccgactaccattaccggaaatttgggcagctaccaatttggaacacaggaagacggagtttcacctaactatacacaggctgtatgggaactgtcaggaactaacttaacaaccgcgaaaacaaccggagcaaaactggtgttagtattatcaacaaccccaagcgcttcaacacactttgtatggcaggggccggctaataatctctggtggaatgaaaaagaaattcttggcggtaccggtaatccaagcggcgcaacgggcgttacatgggatttaagcacgaaaacccttacaatccccctaaacgctaactctgttaaggattacgacaaatttaccgtccagccttcattgaggatcatcattgcctattacaacggcggaaatgttaatgatcttggcatagtcagcgcaaacctgacacaatga

SEQ ID NO: 25530 - protein, 411 aa, Unknown
  Obtained from environmental sample
  DOMAIN (1)...(224): Cellulase (glycosyl hydrolase family 5)
  misc_feature (1)..(411): Xaa is any amino acid
MYIILNTHHDEDVLTFMNSNAAAGKAAFQKLWEQIADAFKDYNEKLIFEGLNEPRTPGSSSEWNGGTAEERANLNSYYPIFVNTVRNSGGNNGKRVLMINPYAASMEAVAMNALTLPTDSAANKLIVSFHSYQPYNFALDQDPTKNSWNKNNSGDTSPITGPIDRYYTKFVSQGIPVIIGEFGAMNKNNEAVRAQWAEYYISYARSKGIKCFWWDNGVTSGSGELFGLLNRQNNTFTYNALLNGMMSGTGGDVPTPPTPPTPPDTPTPPTTITGNLGSYQFGTQEDGVSPNYTQAVWELSGTNLTTAKTTGAKLVLVLSTTPSASTHFVWQGPANNLWWNEKEILGGTGNPSGATGVTWDLSTKTLTIPLNANSVKDYDKFTVQPSLRIIIAYYNGGNVNDLGIVSANLTQ

SEQ ID NO: 25531 - DNA, 378 bp, Unknown
  Obtained from environmental sample
  misc_feature (1)..(378): n is a, c, g, or t
ttgccaacgagccacccattggcaatctgcgggaccgccagatccgcaatgagcttgcaggaatactgggcagtatatttccggtatctgacagacaagggcaaacgggggaagataaatgaaataatgggacaggaggagggaatagcgatggcaagcgaagtgttaatgagcatcagcaaggacgaggcggagcgagcgcggctgatgagcgagtacaaatatcaagtggacatgcagagcaaactggtacatgcgaagcgcacgggaagggaggaaggccgtgcggaaggccgcgccgagggcatggcagaagttgctcaaaaaatgaaagtaatgggtttttccgacgaacagatacaaacggtaaccggatga

SEQ ID NO: 25532 - protein, 125 aa, Unknown
  Obtained from environmental sample
  misc_feature (1)..(125): Xaa is any amino acid
MPTSHPLAICGTARSAMSLQEYWAVYFRYLTDKGKRGKINEIMGQEEGIAMASEVLMSISKDEAERARLMSEYKYQVDMQSKLVHAKRTGREEGRAEGRAEGMAEVAQKMKVMGFSDEQIQTVTG

SEQ ID NO: 25533 - DNA, 1383 bp, Unknown
  Obtained from environmental sample
  misc_feature (1)..(1383): n is a, c, g, or t
atgcagctccgcgacatcataaacctcgacctcatgtacggcgattcgtatgtcgagaaggagatgggggacgaggaggaggaagaggacgacgccgccgaagacgaggccgacgaaaccgacatgttcgaggaatccgcttccgcttcggtcgccaccatggaggccgcgctccgcgattccgtggtcgagactttcgagagcataaggaagacctacaacaagatcgagcgcgcgcgcgccgccgccgcgagcaaggccgagttcagggtgaagcaggccaggaacatccgcgacctcgtgctccttatggccaagatccagctctccgacgccaagatagccgaaatcctggacgagatggtcgaaaagaaccgccgcctcctctcgctcgagggccgcctgctgcgcctcgccgaaaactcgcgcatccggcgcgaggagttcctctccgaatacaacggcgtcatctcggaatcgtgggtgcgccgcatcgcgcggcttcccggcaagaactggcagcgcttcgtccacgtccacggcgacgaaatcctgaagatccgcaaggaggcggacgcgatagccctggaaaccggcctccccgccggcgaatacaagagcgtggtcgaggtggtcaggaaaggcgagcgcgaggagacccgcgcgaagaaggagatgatagaggccaacctccgcctcgtgatctctatcgccaagaaatacacgaaccgcggcatgcagttcctggacctcgtgcaggaggggcacatcggcctcatgaaggcggtggacaagttcgagtaccgccgcggatacnagttttcgacctacgctacctggtggatacggcaggctattaccagatcaatttcggatcaggccagaaccatccgcgttcccgtgcatatgattgaacagatcaacaaggtagtaagggaatcgcgtcagcttatgcaggtgctgggccgggaacccacagacgaggaaatcgctgaacggctgggctggacggcccagcgcgtaaagtcggttaaaaacgtcgccagggaacccataagcctggaaaccccaataggggaagaagacgattcccttctgggggactttattgaggacaaggatgttgagaatccgtccaaccagactcagttcaagatgcttcaggaggagataatcaccatactcaagaccttgccggccagggaacaggatgtgcttaaaatgcgttttggtcttgacgacggttactccctgacccttgaagaagtggggctttactttaacgtcacgcgtgaaaggatcagacagattgaggcaaaggccctccgccgtctgaggcatccaaagcgcagccgccgcctaaaagactatcttgaccattag

SEQ ID NO: 25534 - protein, 460 aa, Unknown
  Obtained from environmental sample
  DOMAIN (394)...(447): Sigma-70, region 4
  misc_feature (1)..(460): Xaa is any amino acid
MQLRDIINLDLMYGDSYVEKEMGDEEEEEDDAAEDEADETDMFEESASASVATMEAALRDSVVETFESIRKTYNKIERARAAAASKAEFRVKQARNIRDLVLLMAKIQLSDAKIAEILDEMVEKNRRLLSLEGRLLRLAENSRIRREEFLSEYNGVISESWVRRIARLPGKNWQRFVHVHGDEILKIRKEADAIALETGLPAGEYKSVVEVVRKGEREETRAKKEMIEANLRLVISIAKKYTNRGMQFLDLVQEGHIGLMKAVDKFEYRRGYXFSTYATWWIRQAITRSISDQARTIRVPVHMIEQINKVVRESRQLMQVLGREPTDEEIAERLGWTAQRVKSVKNVAREPISLETPIGEEDDSLLGDFIEDKDVENPSNQTQFKMLQEEIITILKTLPAREQDVLKMRFGLDDGYSLTLEEVGLYFNVTRERIRQIEAKALRRLRHPKRSRRLKDYLDH

SEQ ID NO: 25535 - DNA, 477 bp, Unknown
  Obtained from environmental sample
  misc_feature (1)..(477): n is a, c, g, or t
atgcctcagacggcggagggcctttgcctcaatctgtctgatcctttcacgcgtgacgttaaagtaaagccccacttcttcaagggtcagggagtaaccgtcgtcaagaccaaaacgcattttaagcacatcctgttccctggccggcaaggtcttgagtatggtgattatctcctcctgaagcatcttgaactgagtctggttggacggattctcaacatccttgtcctcaataaagtcccccagaagggaatcgtcttcttcccctattggggtttccaggcttatgggttccctggcgacgtttttaaccgactttacgcgctgggccgtccagcccagccgttcagcgatttcctcgtctgtgggttcccggcccagcacctgcataagctgacgcgattcccttactaccttgttgatctgttcaatcatatgcacgggaacgcggatggttctggcctgatccgaaattga

SEQ ID NO: 25536 - protein, 158 aa, Unknown
  Obtained from environmental sample
  misc_feature (1)..(158): Xaa is any amino acid
MPQTAEGLCLNLSDPFTRDVKVKPHFFKGQGVTVVKTKTHFKHILFPGRQGLEYGDYLLLKHLELSLVGRILNILVLNKVPQKGIVFFPYWGFQAYGFPGDVFNRLYALGRPAQPFSDFLVCGFPAQHLHKLTRFPYYLVDLFNHMHGNADGSGLIRN

SEQ ID NO: 25537 - DNA, 1680 bp, Unknown
  Obtained from environmental sample
  misc_feature (1)..(1680): n is a, c, g, or t
ttgtccaacgcggtcaagtattcgaaaaggggtcatattggtttacccattatcatacaaaatatcatacaaaagcgggatcagcgggaggtatggctcaanatagtcgtagccgataccggaaagggaattaaacagaaagatcaggcaaaactattcgatgagtttgttcaggttgatacaaggaaaaaccgcagcattgaagggacggggctcgggcttgccattaccaaacggctatgtgtcgcgatgggcgggaacataacagtggaaagtgaatatggcaagggcagtacctttacggcaactattccccagacttttgaatcggaagtgcccatcgccgtggtggaagaaccggaaaagaaaaacgtcttggtctatgaaggccgggctatttacgctcaggcggtatgctggtccctgaacaacatgaagatcccccatactatggtaacaaattttgacgatttcaaagaagccctgtatcagaaagaatggttttatgtattttccggctacggcctctatgaaaagatcaagcctctgcttgaaaagagcgatacggctttccgcggggggaaaaagcctcctcttgccctgatgatagaatggggaaccgaagcctatatgcacggcgtgcggtttgtgtccataccggttcagtctctgtcgattgccaatattctcaatggcaagactgacagtaaagggtacaatgaaagttccggaataatccggtacgcattcccaaccgcgcggctgcttgtagtagacgacatcgccaccaacctcaaagtagccgaaggactccttgcgccttatcgggtaatagtagacacctgcctcagcggattgcaggctattgaaatggcgaaacaagccgcttcggaaaatcgcgaatacgacattatactcatggatcacatgatgcccgaaatggacggcatagaagcgacggctattatccgcgcatgggaaaaaaacgaacaggaaaaaaatcccgcgcgcaggcaaattcccattgtggcactgacagctaacgctgttgtgggaatgcgggaaatgtttatcgaaaacggctttaatgattatcttgccaaaccaatagatgtttccaagctggatgaaatgctcgaccgctggatacccagagagaaaagaaaaaaagaagactcccttcgggaacttcataaagcgggacataacgcgctccttgaacttgtcaaaatgagcaaaaagcaaaaacagatactccctgacatacccggcgttgatattcaaaaaggcgtctccatgaccggcgggactattgcatcttataagcaggtgctgtccatgttttgcaaagacgcggaaaacagactgttgcagctggaaagaatacaggaaggtgacgatttgtccgtgtttgtcacccaggttcacggcttgaaaagcgcggcggcaagcattggcggggaaaaattttcagcggatgccgctgaacttgaagccgcgggcaacgcgggcaacatgaaaatcatcaaagaaaagttacctgcttttttgaaaaacctttcggaattgataaataatatcaataccgctctggaagagaaaaaagcccaacaggacagcaaaaaaagaacaaatattaccgcatgcataccggctttccgcgaactctccgaagcctga

SEQ ID NO: 25538 - protein, 559 aa, Unknown
  Obtained from environmental sample
  DOMAIN (443)...(526): Hpt domain
  misc_feature (1)..(559): Xaa is any amino acid
MSNAVKYSKRGHIGLPIIIQNIIQKRDQREVWLXIVVADTGKGIKQKDQAKLFDEFVQVDTRKNRSIEGTGLGLAITKRLCVAMGGNITVESEYGKGSTFTATIPQTFESEVPIAVVEEPEKKNVLVYEGRAIYAQAVCWSLNNMKIPHTMVTNFDDFKEALYQKEWFYVFSGYGLYEKIKPLLEKSDTAFRGGKKPPLALMIEWGTEAYMHGVRFVSIPVQSLSIANILNGKTDSKGYNESSGIIRYAFPTARLLVVDDIATNLKVAEGLLAPYRVIVDTCLSGLQAIEMAKQAASENREYDIILMDHMMPEMDGIEATAIIRAWEKNEQEKNPARRQIPIVALTANAVVGMREMFIENGFNDYLAKPIDVSKLDEMLDRWIPREKRKKEDSLRELHKAGHNALLELVKMSKKQKQILPDIPGVDIQKGVSMTGGTIASYKQVLSMFCKDAENRLLQLERIQEGDDLSVFVTQVHGLKSAAASIGGEKFSADAAELEAAGNAGNMKIIKEKLPAFLKNLSELINNINTALEEKKAQQDSKKRTNITACIPAFRELSEA

SEQ ID NO: 25539 - DNA, 414 bp, Unknown
  Obtained from environmental sample
  misc_feature (1)..(414): n is a, c, g, or t
ttgattttctgccctgttaaatatgaaaaacgctttcatctgaaaaacaagccgaaaggcatagtcggggcattcctcgcgggcggcgctttcggcgcgggatggactccttgcgtggggccggtgctgaccgccattctgcttttagctaccaatgacggcagtatttttcgcgccgttctgtatcttgttttttattcagtcggcttgggacttccgtttttattggccgcgttcttttttaacgtatttgttaaaatttccgcgaaacttagaacttatcttccgttaatacagcgtataagcggaatattgctgattattatcggtattttgattatcaggggagattatcaggcgattaacattttagcggcaaaatggcaggcaaagctttccggcggcggtccttga

SEQ ID NO: 25540 - protein, 137 aa, Unknown
  Obtained from environmental sample
  DOMAIN (1)...(115): Cytochrome C biogenesis protein transmembrane region
  misc_feature (1)..(137): Xaa is any amino acid
MIFCPVKYEKRFHLKNKPKGIVGAFLAGGAFGAGWTPCVGPVLTAILLLATNDGSIFRAVLYLVFYSVGLGLPFLLAAFFFNVFVKISAKLRTYLPLIQRISGILLIIIGILIIRGDYQAINILAAKWQAKLSGGGP

SEQ ID NO: 25541 - DNA, 324 bp, Unknown
  Obtained from environmental sample
  misc_feature (1)..(324): n is a, c, g, or t
atgtccgagaacctgtccatcttcatagcctttggcgcgggagtactgtcttttttatccccttgcgtactcccgctgattccgtcatacctatgcataataggcggttcgcctttaaccggtactgccgaaaatacgccaagacctattgcgagaacggtaagttttattctgggctttagcgttgtatttattgttttaagcgttatcttctcatcaactataaatttgcttggcggagtttttaggtatatcaacctgatttccggcgttatcgttattattctgggattaaatattatttttgattttctgccctgttaa

SEQ ID NO: 25542 - protein, 107 aa, Unknown
  Obtained from environmental sample
  misc_feature (1)..(107): Xaa is any amino acid
MSENLSIFIAFGAGVLSFLSPCVLPLIPSYLCIIGGSPLTGTAENTPRPIARTVSFILGFSVVFIVLSVIFSSTINLLGGVFRYINLISGVIVIILGLNIIFDFLPC

SEQ ID NO: 25543 - DNA, 1263 bp, Unknown
  Obtained from environmental sample
  misc_feature (1)..(1263): n is a, c, g, or t
atgatcagatcggccgagctcatgagaaattttattattattttggcggtagtatccctgataggctcggtggtaatcatataccttgccctgaatacccttaccaagccaatcgtcagggtagccgacaccctaagggacatatctgaaggcgaaggcgatctgacgcgaaccattgccgtcagttccaaagacgagataggcgaccttgcgctgtacttcaacaaaacgcttaaaaaaattaaagacctggtacttaacattaagaaggaggcaggcattttgtcggaaatcggcaatgacctgtccagcaacatgaccgaaacggcggcaacggtgaacgaaattacctccaatattcagaacattaaaacccgcgtcataaaccagagcgccagcgttactgaaaccaacgcaactatggagcaggttgttgagaacatcaaaaaagtaaacaaacatgttgaaaaccagagtgaagatatttcccaggcttcatccgcaattgaggaaatggtagccaatatcagttctgtcaccaacacgctggttaacaacgccgccaatgtaaagaacttactggaatcctctgaaattggccgtgccggattacaggacgtggctcaggatattcaggaaatatcccgcgaatccgaaggtcttttggagattaacgctgtaatggaaaacatcgccagccagaccaatctgctttcaatgaacgccgctattgaagccgcccatgccggggaagcgggcaaaggctttgccgtagttgccgatgaaatccgcaagctggcggaaagctccagcgagcaatccaaaacgattggtacggtgctgaaaaaaatatcggaatcaatccataaaattaccctctccaccgataacgtgcttaaaaagtttgaagcgatagactcaggcgtcaagactgtgtcggatcaggaagaaaatatccgcaacgctatggaagaacagggcgagggaagcaaacaagttttgcaggcgcaaaccagtttaagcgagcttacccggcaggtaaaaagcggctccgaagagatgcttgagggcagtaaggaagtgatgaaggaaagtcagcatcttgaaatggtaacgcaggagatcacaagcggcatgaacgaaatggcttccggcgcggaacaggtaaatgtcgcggtacaccaggtaaacgatataagcgccaaaaaccgcgaaagtattgataacctgatacaggaagtttcacgcttcaaagtggattga

SEQ ID NO: 25544 - protein, 420 aa, Unknown
  Obtained from environmental sample
  DOMAIN (156)...(376): Methyl-accepting chemotaxis protein (MCP) signaling domain
  misc_feature (1)..(420): Xaa is any amino acid
MIRSAELMRNFIIILAVVSLIGSVVIIYLALNTLTKPIVRVADTLRDISEGEGDLTRTIAVSSKDEIGDLALYFNKTLKKIKDLVLNIKKEAGILSEIGNDLSSNMTETAATVNEITSNIQNIKTRVINQSASVTETNATMEQVVENIKKVNKHVENQSEDISQASSAIEEMVANISSVTNTLVNNAANVKNLLESSEIGRAGLQDVAQDIQEISRESEGLLEINAVMENIASQTNLLSMNAAIEAAHAGEAGKGFAVVADEIRKLAESSSEQSKTIGTVLKKISESIHKITLSTDNVLKKFEAIDSGVKTVSDQEENIRNAMEEQGEGSKQVLQAQTSLSELTRQVKSGSEEMLEGSKEVMKESQHLEMVTQEITSGMNEMASGAEQVNVAVHQVNDISAKNRESIDNLIQEVSRFKVD

SEQ ID NO: 25545 - DNA, 753 bp, Unknown
  Obtained from environmental sample
  misc_feature (1)..(753): n is a, c, g, or t
atgagaaaatttatattatatgccataatgcttatttcagtattttcatgtaagaataaaaaattatcttcggaaataattgatgacataaacagcggtattttgtattatagaaatatttatcaatccacattatatattgaaaatgatgagataaaagaaaaagataaaactaaaattaaaacagaatattttgataagaataacaatataattatggaattatcttcaatttacggaacatcttacaacacctatgaatatgatgagaatggcaatcaaatcagtcagaatacttataataaagacggtgaattaatataccgaaatgaatatagttttaacgaaaacaataaaataatttccgttatttattacgataaaaacggcaaatatgacggtgaagctaactttttatatgattattttggaaatataatacaaaaaattattattgataagaatcataaagttaataattccattatatatgcgtttgataacaagggacggtgtaatgctgcaattaatagttataatgataatactcaatcagtaaatatttattcatataaaattgacgggaaattatataatattcaatcatttgagaatggtatcaaacaaacaatgacaaaaatattggaatatgatgataaagacagggaaataaagagtataacttatgtatatgattttaacgcgaaagaaattcctttcaacatggactattatgagtatcacgataattaa

SEQ ID NO: 25546 - protein, 250 aa, Unknown
  Obtained from environmental sample
  misc_feature (1)..(250): Xaa is any amino acid
MRKFILYAIMLISVFSCKNKKLSSEIIDDINSGILYYRNIYQSTLYIENDEIKEKDKTKIKTEYFDKNNNIIMELSSIYGTSYNTYEYDENGNQISQNTYNKDGELIYRNEYSFNENNKIISVIYYDKNGKYDGEANFLYDYFGNIIQKIIIDKNHKVNNSIIYAFDNKGRCNAAINSYNDNTQSVNIYSYKIDGKLYNIQSFENGIKQTMTKILEYDDKDREIKSITYVYDFNAKEIPFNMDYYEYHDN

SEQ ID NO: 25547 - DNA, 444 bp, Unknown
  Obtained from environmental sample
  misc_feature (1)..(444): n is a, c, g, or t
atgctgcaagtagggagagtagctacaatcttgctcggtgttattggctatgccctcacaatggcacgttccgtgagcttttgggactgcggtgaatatatagcggcagccaatgtccttggtattccgcacccgcccggtaatccgctctttgttctgctggggcgcgtttttattattctctttggctggctgaatggtcctgcgtttgccgttaatttgataagcgcaataagttcaattctgtgttgcctgctggtttttgaaatcaccgttaaaattttgccaaaagagttggacgaacgtatttactttaaacagagtttacgttgcctgctgggattttttgctgcttcaatttccctttttggcaacgccttttggttcaacgcggtggaggctggggcttacgcccccgcctcggccgatctgatccatgggtaa

SEQ ID NO: 25548 - protein, 147 aa, Unknown
  Obtained from environmental sample
  misc_feature (1)..(147): Xaa is any amino acid
MLQVGRVATILLGVIGYALTMARSVSFWDCGEYIAAANVLGIPHPPGNPLFVLLGRVFIILFGWLNGPAFAVNLISAISSILCCLLVFEITVKILPKELDERIYFKQSLRCLLGFFAASISLFGNAFWFNAVEAGAYAPASADLIHG

SEQ ID NO: 25549 - DNA, 393 bp, Unknown
  Obtained from environmental sample
  misc_feature (1)..(393): n is a, c, g, or t
atggtaagccaaaatgctgctgttatgctttgcgaaaatgccggcaaaagattgtgctccgtagaggaatggcaagccgcttgccagggtaatcagaactcgcgctacccttacggaagttcttacaaccaaacaaaatgcgcaacagatttaaaatccgcaaaggaaccgagccgttccggctatgccgagcattgccgcagctattacggcatgtacgacatgagcggcaatctttgggagtggacaagcacgccagcggaaagagagggtttgtttttggttgcgggcggcgcgtggaacacgcaaaacgcgagcagctgcgcagagaccaaattcagtttttaccctcagaacgagtatccttttgtagggtttagatgctgcaagtag

SEQ ID NO: 25550 - protein, 130 aa, Unknown
  Obtained from environmental sample
  DOMAIN (1)...(130): Domain of unknown function (DUF323)
  misc_feature (1)..(130): Xaa is any amino acid
MVSQNAAVMLCENAGKRLCSVEEWQAACQGNQNSRYPYGSSYNQTKCATDLKSAKEPSRSGYAEHCRSYYGMYDMSGNLWEWTSTPAEREGLFLVAGGAWNTQNASSCAETKFSFYPQNEYPFVGFRCCK

SEQ ID NO: 25551 - DNA, 801 bp, Unknown
  Obtained from environmental sample
  misc_feature (1)..(801): n is a, c, g, or t
atggcactttcaaacgagcaattagagcgatactcccgccacataatactctccgaggtaggtgcgaaaggtcagaaaaaaattttggattccaaggtactgatcataggcgcaggaggtcttggcgcacctgctgccctgtatctcgccgccgcaggtgttggcactattggcattgcagatgcagacgaggtggatctttcaaatctccaacggcaggttatccacaccacgccagacgttggcaaggcaaaggtactttctgctcaggaaactatgaaagccataaatccagacataacggttaacacatatcgtcaattcgtggatgcgagcaatataatggatttaatcgcagattacgattttatccttgacggaaccgacaacttccccgctaaatttctaatcaatgatgcctgtgttctggcaaaaaagcctttttcccacgcagggataattcggttcaaagggcaactgatgacttatgtacctggcaaaggtccgtgctatcgttgcgtttttcgccagccaccaccaccagatgcggttcccacttgtaggcaggctggggtaattggagcaatgggcggtgtgataggctctttgcaggcgatggaggctatcaagtacattattggcaaaggtgatttgctaacgggatatctcttgacctacgatgctctaaaaatggatttccgcaaagtcaaacttccaaaagttccaaactgtgccgtatgcggggacaatccctccatactgaaaccctttgactatgaacaggcggtgtgcaaaatatga

SEQ ID NO: 25552 - protein, 266 aa, Unknown
  Obtained from environmental sample
  DOMAIN (166)...(251): MoeZ/MoeB domain
  misc_feature (1)..(266): Xaa is any amino acid
MALSNEQLERYSRHIILSEVGAKGQKKILDSKVLIIGAGGLGAPAALYLAAAGVGTIGIADADEVDLSNLQRQVIHTTPDVGKAKVLSAQETMKAINPDITVNTYRQFVDASNIMDLIADYDFILDGTDNFPAKFLINDACVLAKKPFSHAGIIRFKGQLMTYVPGKGPCYRCVFRQPPPPDAVPTCRQAGVIGAMGGVIGSLQAMEAIKYIIGKGDLLTGYLLTYDALKMDFRKVKLPKVPNCAVCGDNPSILKPFDYEQAVCKI

SEQ ID NO: 25553 - DNA, 1191 bp, Unknown
  Obtained from environmental sample
  misc_feature (1)..(1191): n is a, c, g, or t
atgtggtcaaaaaaagtaaacgccgaaataatgatggcgataaaccttgggacgcggggcgctcaggaggcaagggattttgtcgaatactgcaacttccccggcggcacttattggagcgatctccgtaaaagccacggggtaagcgagcctcataaaataaatctctggtgcctgggtaatgaaatggacggcaactggcagatatgcatgcgcacagccgaggaatacggcagggtcgcgctggaagccgccaaagtaatgaagtggacggatccttcgatagagcttgttgcctgcggcagttctgcttcgggaatgccgacattcggcagttgggaaaataccgtgcttgatcatgtgtatgatcatgttgattatgtttcactgcatacgtattttgccaacagggataaagacgttcccaatttcctggggcgcagtcttgaaatggaacgttttattaaaactgtcgcgggaatttgcgatcttgttaaaataaaaaagaaaagcaaaaaaaccgttaatttgtcatttgatgaatggaacgtatggtatcactccaacgaaagcgacaaaaaaattgaaaaatggagcgaagcgccgccgcttttggaagacatctacacgatggcggacgcgctggcggtcggttgtatgctgataaccctgttaaaaaacgctgaccgggtgaaaatcgcgtgccttgcgcagttggtaaatgttatcgctccaatcatgactgaaaaaaacggcggcgcatggcggcagacaatttttttcccgttcaaggacgcgtcaacttacggacggggctccgtgcttcgctgtcccgtcaccgttgacaaatacgattcgcgggaattctgcgacataccgtatcttgaagccgtgggtgttcacaacgccgaaaaaaaagaaataacaatttttgccgtaaacaggaacataaaggaagcgataaatcttgaagccgaaatagcgggttttgggaaagtgaaccttattgaacaccgccttatttgtaatgaagacttaaacgcctgcaacagtataaaggaagaaaaagtaaaacccattgttcagactggtggcagtcttgaaggtggagaaggagggatgaaattaagtctcaatttaccgccggcttcatggaatgtgataagactgaagattcaggagttattatga

SEQ ID NO: 25554 - protein, 396 aa, Unknown
  Obtained from environmental sample
  DOMAIN (180)...(384): Alpha-L-arabinofuranosidase C-terminus
  misc_feature (1)..(396): Xaa is any amino acid
MWSKKVNAEIMMAINLGTRGAQEARDFVEYCNFPGGTYWSDLRKSHGVSEPHKINLWCLGNEMDGNWQICMRTAEEYGRVALEAAKVMKWTDPSIELVACGSSASGMPTFGSWENTVLDHVYDHVDYVSLHTYFANRDKDVPNFLGRSLEMERFIKTVAGICDLVKIKKKSKKTVNLSFDEWNVWYHSNESDKKIEKWSEAPPLLEDIYTMADALAVGCMLITLLKNADRVKIACLAQLVNVIAPIMTEKNGGAWRQTIFFPFKDASTYGRGSVLRCPVTVDKYDSREFCDIPYLEAVGVHNAEKKEITIFAVNRNIKEAINLEAEIAGFGKVNLIEHRLICNEDLNACNSIKEEKVKPIVQTGGSLEGGEGGMKLSLNLPPASWNVIRLKIQELL

SEQ ID NO: 25555 - DNA, 381 bp, Unknown
  Obtained from environmental sample
  misc_feature (1)..(381): n is a, c, g, or t
atgaacaacattttagatagactgaaagaagaaaaacaaatgcggcttaaaggaggcttgtatcattatacgcaagtaaaattcgcgtataataacaaccgaattgaaggaagcaagcttaccgaggaagaaacaagatatatttatgaaacttttaccataagcacaggggataaaaaaacagcaaaagtagatgatattgttgaaacaataaatcattttggatgttttaattatttactggaaacagctgaaaaaccgctttccgaagaaattataaaaaattttcataaaatattaaaaacaggaacttttgattctttaaaggattggtataaagtaggagattataaaaaattaattcaaaaatatctaaattaa

SEQ ID NO: 25556 - protein, 126 aa, Unknown
  Obtained from environmental sample
  misc_feature (1)..(126): Xaa is any amino acid
MNNILDRLKEEKQMRLKGGLYHYTQVKFAYNNNRIEGSKLTEEETRYIYETFTISTGDKKTAKVDDIVETINHFGCFNYLLETAEKPLSEEIIKNFHKILKTGTFDSLKDWYKVGDYKKLIQKYLN

SEQ ID NO: 25557 - DNA, 312 bp, Unknown
  Obtained from environmental sample
  misc_feature (1)..(312): n is a, c, g, or t
atgaagttatttgaaattattttaatcgccgtagggctttcgatggacgctttcgcggtatcaatcacattgggtttatcggtggaaaagccaagagccaaagaaatattaacacccggcgtcttttttggttttttccaagccctcatgccgataataggatattttgccggaacatattttgccgctaaaatacaacagtttgagcattgggtcgcctttgttttactcggcattatcggcgggtacatgataagggaaagtttatcaaaaaaagaagaagaagccgatggaaatccttttcatttatga

SEQ ID NO: 25558 - protein, 103 aa, Unknown
  Obtained from environmental sample
  SIGNAL (1)...(19)
  DOMAIN (6)...(82): Domain of unknown function DUF
  misc_feature (1)..(103): Xaa is any amino acid
MKLFEIILIAVGLSMDAFAVSITLGLSVEKPRAKEILTPGVFFGFFQALMPIIGYFAGTYFAAKIQQFEHWVAFVLLGIIGGYMIRESLSKKEEEADGNPFHL

SEQ ID NO: 25559 - DNA, 750 bp, Unknown
  Obtained from environmental sample
  misc_feature (1)..(750): n is a, c, g, or t
atgtttttacaagatattaaaataattctgtgcagagcgacggatgccggtaatataggatcggtttgccgcgccatgaaaaacatggaacttgctgaattaagacttgtaattgataatacagacacagaagcggctcaacctcttgatatggataaaatccgcgtaagggcggttcacgccgaagatgttttggaaaaagcaaaaatttttaataatttggaagacgcagttaaagattgttcgattgtaataggaaccacacgcagacgcggacaatacagaaaaaatgtttctatgacgcctcgcattctggcggaatggctcgcacagcgacccggtccggcggcaatagttttcggcaatgaacgcacaggattggaagactcggaattggatctttgcaacacggcgtctcacatccccgtttctgacattcagccctcgctaaacctgtcccacgccgtgcagatttacgcctacgaattttttcttgcgctcaagcctcaaacgcaagttaaaggagagtggacgccgatgaaccaaagcgaagtttccgcccttgttgaagaaatcgccgatactcttgcaaatctcggcttttacagacatccaaaccgtgaggagcaaactcgttttttgcgcgacataatttcccgcgcaggaattatggaaagcgaagggaaatattttaaggatatttttttaaaagcggctaaattggggagaatgcaaaatgaagttatttga

SEQ ID NO: 25560 - protein, 249 aa, Unknown
  Obtained from environmental sample
  DOMAIN (5)...(161): SpoU rRNA Methylase family
  misc_feature (1)..(249): Xaa is any amino acid
MFLQDIKIILCRATDAGNIGSVCRAMKNMELAELRLVIDNTDTEAAQPLDMDKIRVRAVHAEDVLEKAKIFNNLEDAVKDCSIVIGTTRRRGQYRKNVSMTPRILAEWLAQRPGPAAIVFGNERTGLEDSELDLCNTASHIPVSDIQPSLNLSHAVQIYAYEFFLALKPQTQVKGEWTPMNQSEVSALVEEIADTLANLGFYRHPNREEQTRFLRDIISRAGIMESEGKYFKDIFLKAAKLGRMQNEVI

SEQ ID NO: 25561 - DNA, 405 bp, Unknown
  Obtained from environmental sample
  misc_feature (1)..(405): n is a, c, g, or t
atgacagattggccgagttcagttttgaaggcggtctttgacgcgggatcttcctcgcgcgaaagagcctggcttttcaatcgaaagctgaagaagtttccgttcaagtttatcaagttccgtggggcggctgtccagttccatcttaaggcggcttgcagcctcatcaacaagatcaatcgccttgtccggcaggaagcggcttgtgatgtaacggctggacaaagtcgccgccgccacaagcgcctcatctttaatccgcacgccgtggtgaacctcgtaccgctccttaagcccgcgcaaaatcgcaatcgtatcctcaacagaaggttccgccgtgtacacctgctggaaacgccgttcaagggccgcgtccttctcaatgtgttttcggtattcgtctaa

SEQ ID NO: 25562 - protein, 134 aa, Unknown
  Obtained from environmental sample
  misc_feature (1)..(134): Xaa is any amino acid
MTDWPSSVLKAVFDAGSSSRERAWLFNRKLKKFPFKFIKFRGAAVQFHLKAACSLINKINRLVRQEAACDVTAGQSRRRHKRLIFNPHAVVNLVPLLKPAQNRNRILNRRFRRVHLLETPFKGRVLLNVFSVFV

SEQ ID NO: 25563 - DNA, 1038 bp, Unknown
  Obtained from environmental sample
  misc_feature (1)..(1038): n is a, c, g, or t
atggagaaaaaaagggagaacgcgaaagggggcgaggcttccgcgctgttacgcgaagaagtcagcgaagaagacattgcgggagtagtgtcaacgtggacgggtattcccgtctccaaaatgctctccggcgaattgcaaaaatatttggacttggaaaaggctctcgaaaagcgggttgtcggtcaggatgaagctcttgccgcagtcgccgacgccatcagacggaacaagtcagggctctccgacgcggcgcgcccgctggggtctttcctcttcttgggaccgacgggcgtgggaaaaacagaactcgccaaaacactggcggattttttgtttaatgacgaaaaagctctcaccagaattgacatgagcgaatacggagaaaaacattcggtaagccgccttatcggcgcgccgcccggctatgtggggtatgagcagggcggtcagcttacagaggctgtcagacgccgcccctacagcgtgattctttttgacgaaattgaaaaaggtcaccccgaagtgtttaatgtgtttttgcaaatactcgacgacggcagattgacagacggtcagggacgcgttgtcgattttaaaaatgtaattatcattatgacaagcaatttaggatcggacttgatactggaagcaaaaaatcctgaatccttgcgtgaatctttaatggaacttctaaagcacagtttcagaccggagtttatcaaccgcattgacgagactgtaatttttaaccgtctcgggcaaagcgaaatcggtaaaatagttgatattcagctaacgcggctttcgcaaaggctttcggagcgaaaaatcacgctgaaggtaacagacgtggcaaaatccctgcttgccgaaaggggttatgatcccatgttcggggcgcgtcctttgaagcgcacaatccagtccgatcttgaaaatccgcttgcaaagcaggttattgcgggtgctatcaaagacggggaaacggtgacggctgatgtgtcgggcggcgggatagtgtttaagaaacgatga

SEQ ID NO: 25564 - protein, 345 aa, Unknown
  Obtained from environmental sample
  DOMAIN (90)...(299): ATPase family associated with various cellular activities (AAA)
  misc_feature (1)..(345): Xaa is any amino acid
MEKKRENAKGGEASALLREEVSEEDIAGVVSTWTGIPVSKMLSGELQKYLDLEKALEKRVVGQDEALAAVADAIRRNKSGLSDAARPLGSFLFLGPTGVGKTELAKTLADFLFNDEKALTRIDMSEYGEKHSVSRLIGAPPGYVGYEQGGQLTEAVRRRPYSVILFDEIEKGHPEVFNVFLQILDDGRLTDGQGRVVDFKNVIIIMTSNLGSDLILEAKNPESLRESLMELLKHSFRPEFINRIDETVIFNRLGQSEIGKIVDIQLTRLSQRLSERKITLKVTDVAKSLLAERGYDPMFGARPLKRTIQSDLENPLAKQVIAGAIKDGETVTADVSGGGIVFKKR

SEQ ID NO: 25565 - DNA, 312 bp, Unknown
  Obtained from environmental sample
  misc_feature (1)..(312): n is a, c, g, or t
ttgcaaaaacacattaaacacttcggggtgacctttttcaatttcgtcaaaaagaatcacgctgtaggggcggcgtctgacagcctctgtaagctgaccgccctgctcataccccacatagccgggcggcgcgccgataaggcggcttaccgaatgtttttctccgtattcgctcatgtcaattctggtgagagctttttcgtcattaaacaaaaaatccgccagtgttttggcgagttctgtttttcccacgcccgtcggtcccaagaagaggaaagaccccagcgggcgcgccgcgtcggagagccctga

SEQ ID NO: 25566 - protein, 103 aa, Unknown
  Obtained from environmental sample
  misc_feature (1)..(103): Xaa is any amino acid
MQKHIKHFGVTFFNFVKKNHAVGAASDSLCKLTALLIPHIAGRRADKAAYRMFFSVFAHVNSGESFFVIKQKIRQCFGEFCFSHARRSQEEERPQRARRVGEP

SEQ ID NO: 25567 - DNA, 537 bp, Unknown
  Obtained from environmental sample
  misc_feature (1)..(537): n is a, c, g, or t
ttggccgagattaaccagggcatacagttaaagcctgattatgcggcggctttcaataatcgttcttctgaaatagataaattagggggtgaggacaatacaaagaaagcaatagctgatctatcggaagctatacggatacggccttctcatgcaacgtattattataatagagccggatgctattcagatttagagatgcatgaaaaagctatagaggatctctccaatgccataaattgcagttccgacgctttcaaaaaaataaaccgtatttttctaaggcgcgggaaaaaatatatgcagttaaaagaatacgttaaagcaattgacgatttttccaattcactgaatctggaaaaggatcatgtcaatacattgcttatgcgcggaaaagcctattatctggctggtgaaaaagacaaagccaaagcggatattgaagaatacttaaaacgcaaacgaaaatcggcgtatgacgcgggcagggaggaaatttttaagcatatcggtgttatgccggaagatattttataa

SEQ ID NO: 25568 - protein, 178 aa, Unknown
  Obtained from environmental sample
  DOMAIN (52)...(85): Tetratricopeptide repeat
  misc_feature (1)..(178): Xaa is any amino acid
MAEINQGIQLKPDYAAAFNNRSSEIDKLGGEDNTKKAIADLSEAIRIRPSHATYYYNRAGCYSDLEMHEKAIEDLSNAINCSSDAFKKINRIFLRRGKKYMQLKEYVKAIDDFSNSLNLEKDHVNTLLMRGKAYYLAGEKDKAKADIEEYLKRKRKSAYDAGREEIFKHIGVMPEDIL

SEQ ID NO: 25569 - DNA, 558 bp, Unknown
  Obtained from environmental sample
  misc_feature (1)..(558): n is a, c, g, or t
ttgatggccgagggaggtattattaagataatggaaactgttacaaatttaaacaattccgccgtcgcgttaaccgaggcaaataagccttttgaagcgattcccttgtttcgcgaagcgttaattttagagcctgaaaacccgcttttatggctaaatttaggcatagcccagcagaagacaggtgaatatatggaagcgattgacagttttaagcgttctttagtcattgacaacgatatttatgaggcatggaattccatgggccttatttattatgaattgaacgattttgttcttgcggaaaattgctataagacggccgtgtcctgcaacgacaacgatccaaagatatggaataatcttggcgttttatattttaacataaataattttgaagaggcccgtaattgctttgaaaaggcgataagcattttcccacagtataacgacgcgatgatcaatttgcgggacacatgcagggaattgggcgattaccgggcggccgctgaatttgaacgtattatttccaatttaggttttagcggccgggaataa

SEQ ID NO: 25570 - protein, 185 aa, Unknown
  Obtained from environmental sample
  DOMAIN (48)...(81): Tetratricopeptide repeat
  misc_feature (1)..(185): Xaa is any amino acid
MMAEGGIIKIMETVTNLNNSAVALTEANKPFEAIPLFREALILEPENPLLWLNLGIAQQKTGEYMEAIDSFKRSLVIDNDIYEAWNSMGLIYYELNDFVLAENCYKTAVSCNDNDPKIWNNLGVLYFNINNFEEARNCFEKAISIFPQYNDAMINLRDTCRELGDYRAAAEFERIISNLGFSGRE

SEQ ID NO: 25571 - DNA, 816 bp, Unknown
  Obtained from environmental sample
  misc_feature (1)..(816): n is a, c, g, or t
atgaaagtactttatgtggcggaacttgtaggtaaggccggcgtttatacgtttaaaaacgcgttaaaagaattaaaaacccgttacccgtggaatatcatgattgtctgcgccaacggggctacggggggaaacggattaggcagaactcatgccgcctacatccacaaacttggcgctaatgttattacccttggcgattgttgtttctacaaaaaagatttaacggaaaatttggataagtgcaattatgtactgcgcccggaaaatttaagttcggacgctccgggtatagggtcaaaaattttcaatatagaaaacgaaaaagtagccgtcgcggtttttatcggtcaaaacggattcgcgcgcgtccacgcgaataaccccttcactgccctgcccacagtccttgaacgcctgcgaaaacaaactccctatattattgtagatttccacgcgcaggcaagcgctgaaaaaaagacatttatttacgccgccgacggcctttgttccgccgtaatcggctcccacgccagagttcaaaccgccgatgaaaccgtcatgccaaacggaaccgcctacataagcgacgccggccgcacaggaagccaacaatccgtcggcggctgcgaaataaattcgcgcataaaagaatacctgacaggcatccccgaatggacaaaagaagcctgggaagcgccggagttacagggcgtgtatattgacataggcaaggatggtaaagcgctctccatagagcggatacgccttgctataaataatcccgaagaagaaaaaataaaaaatatgaaataa

SEQ ID NO: 25572 - protein, 271 aa, Unknown
  Obtained from environmental sample
  misc_feature (1)..(271): Xaa is any amino acid
MKVLYVAELVGKAGVYTFKNALKELKTRYPWNIMIVCANGATGGNGLGRTHAAYIHKLGANVITLGDCCFYKKDLTENLDKCNYVLRPENLSSDAPGIGSKIFNIENEKVAVAVFIGQNGFARVHANNPFTALPTVLERLRKQTPYIIVDFHAQASAEKKTFIYAADGLCSAVIGSHARVQTADETVMPNGTAYISDAGRTGSQQSVGGCEINSRIKEYLTGIPEWTKEAWEAPELQGVYIDIGKDGKALSIERIRLAINNPEEEKIKNMK

SEQ ID NO: 25573 - DNA, 732 bp, Unknown
  Obtained from environmental sample
  misc_feature (1)..(732): n is a, c, g, or t
gtggatgagtataagttttattactgcgacaactgtgatggcgatcaaaccgccgacacggtagaggcctttgtccaaaatttgcggacactgctcaagcagtataacggcctgccagagtcaaaggactctgaaagcacactcaatgagtcgctggtcgcctttgacttccgcaggcacctttatgcgccgcttattttcctgaaggcgaatgggttgcaattgaccgtctcgccggtcagtttgaacgacgacgagaaaaaattcatagataaacttaagagataccttgaaggcaatgccggcgtcttcgagggtaaagaccttttcctgctccgcaacaagagcaaggcgggcatgggcttctttgaggcgggcaatttctaccctgattatgtgttgtgggtggatacgccggaggcgcaatatatctcctttatcgaccccaaagggttgcgccatttggggtgggatgatcctaaaatcacattctgccacaccataaaaaaacttgagacccggctccagtcttcaagccctgataaacggattgttctgaattcctttatcatctccggcactcctcacgcagacctctttcaatggtggggcaagggcctgcaggagcttcgcgccaggaatgtgttttgccttgatgatccctactgcgtggaaaaaatgatacataaaatattattggaacctctagaaaataggggaaaggaatattaa

SEQ ID NO: 25574 - protein, 243 aa, Unknown
  Obtained from environmental sample
  misc_feature (1)..(243): Xaa is any amino acid
MDEYKFYYCDNCDGDQTADTVEAFVQNLRTLLKQYNGLPESKDSESTLNESLVAFDFRRHLYAPLIFLKANGLQLTVSPVSLNDDEKKFIDKLKRYLEGNAGVFEGKDLFLLRNKSKAGMGFFEAGNFYPDYVLWVDTPEAQYISFIDPKGLRHLGWDDPKITFCHTIKKLETRLQSSSPDKRIVLNSFIISGTPHADLFQWWGKGLQELRARNVFCLDDPYCVEKMIHKILLEPLENRGKEY

SEQ ID NO: 25575 - DNA, 720 bp, Unknown
  Obtained from environmental sample
  misc_feature (1)..(720): n is a, c, g, or t
atgcagacgtcggaagcatcgcccctatcgataccgttcaacaagccgcacttgaccggcgatgagtccgcctatatagaagaggccgtccgatccggcaagctctccggcaacggcgcgttcacaaagcggtgccaggagttctttgagcggcgctacaactttaagaagtgtttgttgaccacctcgtgcaccgacgccctagagatgtgcgccatcctagccggggtgggcgatggcgacgaagtgatcgtgcccggctatacattcgtctccaccgccctcgctttcgtccgccaaggcgccaagatcgttttcgccgacagccgcgccgaccatccgaacatcgacgccgccgcgatagagcctctgattacgccgcgtaccaaggctatagcgctcgttcactacgccggcgccgcctgcgacatggacgccgtaatgcgggtcgccgagaagcacggcctggtagtgatagaggacgccgcccaagcggttgaatcattctataccggcgctaccgcggacgcctcgccgcgccccctcggaggcatcggccacctcgccgctttctcgttccacgataccaaaaacatcacctgcggggagggcggtatgctcgccgtgaacgacggccgcttcgtcgcccgatcggagatagtctgggagaaggggaccaaccgggccgacttctgccgcggcaacgctcggccgatctga

SEQ ID NO: 25576 - protein, 239 aa, Unknown
  Obtained from environmental sample
  DOMAIN (16)...(239): DegT/DnrJ/EryC1/StrS aminotransferase family
  misc_feature (1)..(239): Xaa is any amino acid
MQTSEASPLSIPFNKPHLTGDESAYIEEAVRSGKLSGNGAFTKRCQEFFERRYNFKKCLLTTSCTDALEMCAILAGVGDGDEVIVPGYTFVSTALAFVRQGAKIVFADSRADHPNIDAAAIEPLITPRTKAIALVHYAGAACDMDAVMRVAEKHGLVVIEDAAQAVESFYTGATADASPRPLGGIGHLAAFSFHDTKNITCGEGGMLAVNDGRFVARSEIVWEKGTNRADFCRGNARPI

SEQ ID NO: 25577 - DNA, 846 bp, Unknown
  Obtained from environmental sample
  misc_feature (1)..(846): n is a, c, g, or t
atgggtcagaattcggcacgagatattgacctgctcatcctcggcctcgggctgtgcggcgacgcgtcgaacgcgatcccgtccgccgcgtcggtttacgccgccgtccccgccgggcaggagaaaaaacttcgggcggaggcggaggagattgagtctatattcaagcaaatgtacgaggagcgcgacggcggggtgcgcatagaggtgcgggggagcaaagaggccgcctcgcttgctaagacggctgaggagagggtgcggaagaggcccaaaccggctcagccttctgaccacggggatttcggcgacggtacgccgtactccgtggagacggtctccaacctgacgaaattggccgaagagatcgacaacggccccatagcctacaatgccgctatgccgacgcttgtggagaccagctcgaacctcggcataatgagggacgacggcaaccatatagcaatggtctacatggtgcgcagctctatagacgcggaacgggagcgggtggtggaaaagatgagccgcgaagccgggaattatagctcggaagtcgaggcgggcagccggtcgcccggatgggcttacaaggagaagagcgcgttgagggatcttttcctgaacaagtacaaagagctgttcggcgaggatgcggaggcggccccggtgcatgccgggctggagtgcgggcactttgcggagaagttcggcaaatttaaggatatggacttcatatcgtgcggcccgacgacgacggagatacacagcgtaaacgagacgctgcatacggatacggtgagaaaattcgggaagctgttaatagaagtactgaaaagtctttaa

SEQ ID NO: 25578 - protein, 281 aa, Unknown
  Obtained from environmental sample
  misc_feature (1)..(281): Xaa is any amino acid
MGQNSARDIDLLILGLGLCGDASNAIPSAASVYAAVPAGQEKKLRAEAEEIESIFKQMYEERDGGVRIEVRGSKEAASLAKTAEERVRKRPKPAQPSDHGDFGDGTPYSVETVSNLTKLAEEIDNGPIAYNAAMPTLVETSSNLGIMRDDGNHIAMVYMVRSSIDAERERVVEKMSREAGNYSSEVEAGSRSPGWAYKEKSALRDLFLNKYKELFGEDAEAAPVHAGLECGHFAEKFGKFKDMDFISCGPTTTEIHSVNETLHTDTVRKFGKLLIEVLKSL

SEQ ID NO: 25579 - DNA, 969 bp, Unknown
  Obtained from environmental sample
  misc_feature (1)..(969): n is a, c, g, or t
atggaaattatcggtatcgccaacggtttccgcggccttatcgacgaagattacagagtgctcaagccggtggattttacgggcattcttacgcgcggcggaactattctgggatcaagcagggaaaaacctttttcttcttcaggcgatgaggacgtaaccgaaaaagtttcggcgataaaagaaacatattcaaaactggaacttgactgccttgttgttcttggcggaaacggaaccaatacaacaggttataaactttcgcgcgagggcctcaatataatcggccttccgaaaacaatagacaacgatattttcggcacggataaaactttcggttttgattcggcgctgacaatagggacggaagcaatcgaccgcttgcactccaccgcgcagagccacagccgcatcatcgttatcgagttgatgggacacaaagcgggctggctggcgctttatgcgggagtcgcggggggagccgacgttatcctgcttccggaattcaattacgatatgaacgcgatttctcatcatcttgaaaaacgcgcaaagtccggcagaatgttttccatcgttgtcgccgcggaaggagcgctgtccgtcaaagaagcggagatggataaaaaggacagaaaaaaattacgcgcggaaagcggcccgtccgtggcataccgcgtcgcccataaaattactgaagaaacaggcatggaaacacgcgccacagttttaggatatgtccagcgcggaggaatccccagcgccgccgaccgcgttctcgcaacaagcctcggaaccgccgcggcggatcttctcgcgaacggcaaatacggccgcatggtcgcactgcagggagaaagcataggctccgtagacctcagcatccccgaaggcaaagtgaaaaatgtcccaacggatcactatatgatcgatactgccagagccgtcggcacttgcatggggatttag

SEQ ID NO: 25580 - protein, 322 aa, Unknown
  Obtained from environmental sample
  DOMAIN (1)...(274): Phosphofructokinase
  misc_feature (1)..(322): Xaa is any amino acid
MEIIGIANGFRGLIDEDYRVLKPVDFTGILTRGGTILGSSREKPFSSSGDEDVTEKVSAIKETYSKLELDCLVVLGGNGTNTTGYKLSREGLNIIGLPKTIDNDIFGTDKTFGFDSALTIGTEAIDRLHSTAQSHSRIIVIELMGHKAGWLALYAGVAGGADVILLPEFNYDMNAISHHLEKRAKSGRMFSIVVAAEGALSVKEAEMDKKDRKKLRAESGPSVAYRVAHKITEETGMETRATVLGYVQRGGIPSAADRVLATSLGTAAADLLANGKYGRMVALQGESIGSVDLSIPEGKVKNVPTDHYMIDTARAVGTCMGI

SEQ ID NO: 25581 - DNA, 921 bp, Unknown
  Obtained from environmental sample
  misc_feature (1)..(921): n is a, c, g, or t
ttgcaacgggaattgcggtgcatatttggttttgaaaaattttctattttacctcactcaatgcaaaaaataaaaattctctctctgcaaggcaagtggcttgggaactcggctaaaacgctagagtggtataaatctaaggctttggcgaataagggcaaattcgatttgcttgtgctgccagagctttgccacacgtcttattttccttttgagcaaaatgaaaaatattttgactatgcaatttccaaagattcccctgttatagaagagtggaaaaatttagccaagttgctgaattgcgttttggtttttcccttttttgaaaaaagagcaaggggggtttaccacaacagcgtttatgtttttgaacgaaatggctcggttgcaggcttttaccgcaaaagccacattccagacgacccctgcttttacgaaaaatactatttcaccccaggcgacacaggattcaaaaccattcgcacaagtgctggcaatttgggcgttttgatatgctgggaccaatggttccccgaagcggctcgcattttggctttgcagggtgcggatattttaatttacccaacagccataggctgggatttgcacgagcccaaaaaaatctatgctcgccaactggattcgtggcaaaccgttatgcgcggtcacgccatagcaaacagaatttttgttttggctacaaatagaacgggtaaagaaaataatttgtctttttggggaaattcttttttgtgcgctccagacggttttgtgataaaacaactttcaacagatattgcaacaatggcagcagacatagactttgatgaaatagagcaaaaccgcaggatttggcctcatttgagagaccgcagggtggatttgtattacgatattttgaatgtgtggaatgagcaatga

SEQ ID NO: 25582 - protein, 306 aa, Unknown
  Obtained from environmental sample
  DOMAIN (25)...(197): Carbon-nitrogen hydrolase
  misc_feature (1)..(306): Xaa is any amino acid
MQRELRCIFGFEKFSILPHSMQKIKILSLQGKWLGNSAKTLEWYKSKALANKGKFDLLVLPELCHTSYFPFEQNEKYFDYAISKDSPVIEEWKNLAKLLNCVLVFPFFEKRARGVYHNSVYVFERNGSVAGFYRKSHIPDDPCFYEKYYFTPGDTGFKTIRTSAGNLGVLICWDQWFPEAARILALQGADILIYPTAIGWDLHEPKKIYARQLDSWQTVMRGHAIANRIFVLATNRTGKENNLSFWGNSFLCAPDGFVIKQLSTDIATMAADIDFDEIEQNRRIWPHLRDRRVDLYYDILNVWNEQ

SEQ ID NO: 25583 - DNA, 951 bp, Unknown
  Obtained from environmental sample
  misc_feature (1)..(951): n is a, c, g, or t
atggtctatcggtgtaatattaagtcttttgtcctgatggcagctctttttggcctgttttcatacagtatttttgccgaaaacctggtccacatggtggcaaagggcgataccatttactccatctcgcgtttatacaaaataagccaggaagagcttatgcgttccaataatatcaccgatgcttccaaattaaagacggggatgcggctggttatcccttccaaaacaaacctgcggactgaaattccgcagaccgagcgtccccggattgaaaatccacagactgaaagtccccggattgaaaatccgaagactgccaatccgcccgctgtcattgccgccccccccgccaattctgtcttctttttctataccgtgtcaaaaaatgataccctctacagcatagcccgctcacggggtgtaacgcttcaggcgctgcgcgatctcaacggattttccaaaaattatgtcctgaaaacaggcgaaaaaataaaaataccgggtcccgcccccgctcccacaacggcaacgataacggcggcgggtaaaccgccctcaaagtcctccgcgcaaagtacggcaaaaacggctgacccctcaatccgctggccggtcgcggcaaaggaagtgctgtacatgagcagcaatacgggagtgctggtatccggcagggaatccgaatcaattaaaagcctgagcggaggggttgttgttcacgcaagcccctggcggggttatggcaatgtagcggtggtagaaacagacgaaggctaccggtatttatacggctcttgtgaaactctttcggtaagaaagggagacagtatagaaccgggaaccgaattgggaaaattgggaatctatccggcatcgggaaagccggatttggttctaatcgtatcgcataacggatccccggtggatccggcaaaagcccccagattttag

SEQ ID NO: 25584 - protein, 316 aa, Unknown
  Obtained from environmental sample
  SIGNAL (1)...(26)
  DOMAIN (215)...(310): Peptidase family M23
  misc_feature (1)..(316): Xaa is any amino acid
MVYRCNIKSFVLMAALFGLFSYSIFAENLVHMVAKGDTIYSISRLYKISQEELMRSNNITDASKLKTGMRLVIPSKTNLRTEIPQTERPRIENPQTESPRIENPKTANPPAVIAAPPANSVFFFYTVSKNDTLYSIARSRGVTLQALRDLNGFSKNYVLKTGEKIKIPGPAPAPTTATITAAGKPPSKSSAQSTAKTADPSIRWPVAAKEVLYMSSNTGVLVSGRESESIKSLSGGVVVHASPWRGYGNVAVVETDEGYRYLYGSCETLSVRKGDSIEPGTELGKLGIYPASGKPDLVLIVSHNGSPVDPAKAPRF

SEQ ID NO: 25585 - DNA, 1101 bp, Unknown
  Obtained from environmental sample
  misc_feature (1)..(1101): n is a, c, g, or t
ttggtagagagccttgcaagcgacgccgcttatgaacaatattccgactcaacatacactgaggatggcggccttttttggcctgaaccggctgaccttggattaggcgaaaaggaatacgtcctgtacacggcttacggagacgatgacaggattcggaccctggcggaagaaataaccgccggttatgaacgttacggcgacaaggtggaagtgatttatgaatggttgaaatacggcgacttccgctacagtcttaaaccgggtattgcgcctgacggtgaccagctcgcgtggtttttgttccggtcaaagaaaggttattgttcttattatgcattcgcgatgaccctgctcttgcgatctctcggaattccggcgcgtattgccgccggtttcttccttgatccggggaccggaacttttgattattatcaggtacgttccgatatggcccacgcctgggtcgaggttccttttcccggctacggctggattgaatttgatccgacttcggaaaaccttgcggaaggcgaggaattccgtttttctaccggagttgactctcaattgtttgagcggctgatgcgggagattctggagaaccgttcgcgtctgcgggtcaaaacgggaaatgagcttagggataccctggggaacgcccaatcgttggcaagtttatccgctatgctgcttaggaaaatattgcttccgctgctaatcgtgtcgctgatcataatttttattctaatccgctgcggattctggcttttatatgttatgcgtcataacaaacgggggcgggcggtttgcctctggaaacacgcgcggcggaggctcagacttgccgctttgggttaccccggagtaaagagcgggctttcagaatccgaatgggccttgcgtagcgacaccgcagttaaaggcgcgtatgttctgtaccttgnggccgcggccgcgcgtttcgcgcctgaataccatgatgatgattttgccgccatgncaaacgattaccgtcttttctcgnattcgtacaggaaaactattcccctgtggcgcaggncgcttgcgtggcttcttccccctctgccnntatgctaa

SEQ ID NO: 25586 - protein, 366 aa, Unknown
  Obtained from environmental sample
  DOMAIN (104)...(171): Transglutaminase-like superfamily
  misc_feature (1)..(366): Xaa is any amino acid
MVESLASDAAYEQYSDSTYTEDGGLFWPEPADLGLGEKEYVLYTAYGDDDRIRTLAEEITAGYERYGDKVEVIYEWLKYGDFRYSLKPGIAPDGDQLAWFLFRSKKGYCSYYAFAMTLLLRSLGIPARIAAGFFLDPGTGTFDYYQVRSDMAHAWVEVPFPGYGWIEFDPTSENLAEGEEFRFSTGVDSQLFERLMREILENRSRLRVKTGNELRDTLGNAQSLASLSAMLLRKILLPLLIVSLIIIFILIRCGFWLLYVMRHNKRGRAVCLWKHARRRLRLAALGYPGVKSGLSESEWALRSDTAVKGAYVLYLXAAAARFAPEYHDDDFAAMXNDYRLFSXSYRKTIPLWRRXLAWLLPPLPXC

SEQ ID NO: 25587 - DNA, 1041 bp, Unknown
  Obtained from environmental sample
  misc_feature (1)..(1041): n is a, c, g, or t
atgcgccggcttgatctggaagaagcccacgcggatttccagacagcccgcgaaattgatcaatcgccgctggcaaaggtcaatcttgcacaggcatatcaaatnttcggcaggctggaagaagcccgcctgtacgcccttgactgcctgaaagcgggcgaccaatcctggatggcttattacggaatagaccctgttcgttataaacgtgatattcacgagattctctataaaacatattccggactcgcgaaggccgagcggttcctgccctggggaactatagacggtgttatacgatccgctgtcagatcggtatcatacaggtttaattacgccgtccatcgtatgctttaccaaaaatacagccttgcatcaggcgacgcatacgacatccgtgagtccaacggccatccgcctcttgatcaatatatccaatattataacgcccttgaaacatatccgcgccgcgcccttgtgtatctgcgtaaagcccgtgattttgagaccaccattatcccggcatccgttggctcgtattatcttgaagagggcgtcctgcgtaaaaatacaggtttggcggcgcaggcattggacgcgcttgatccggtttgggagcgtgatttgatatccaattgttaccgtgaattgtcccttagtggatcaacgcgcagcgcgcgtcaggccgccgttgtggaactgtttgccctgaaccacggggcattgcttcaaacgggaatcaacctgcctttggaaattagcgtgcttaacgcgggcagccgggaaaaaactttgcgccgcgcgcgtgcgaaagcgggctttacgcacatcgccgccaaagacggcgaaacccgtttcaggctcaatattgccgtcagcaaatcgtctacagggacttacaccgcttcttgcgagttaattgacacggcaggcgaagaaaagccgctgcgccgtattattccgttgcgttccctgtccagggcggacatttacgattttgccggcgcgttaagtaatgccgcttttggtgtaactcaataa

SEQ ID NO: 25588 - protein, 346 aa, Unknown
  Obtained from environmental sample
  misc_feature (1)..(346): Xaa is any amino acid
MRRLDLEEAHADFQTAREIDQSPLAKVNLAQAYQXFGRLEEARLYALDCLKAGDQSWMAYYGIDPVRYKRDIHEILYKTYSGLAKAERFLPWGTIDGVIRSAVRSVSYRFNYAVHRMLYQKYSLASGDAYDIRESNGHPPLDQYIQYYNALETYPRRALVYLRKARDFETTIIPASVGSYYLEEGVLRKNTGLAAQALDALDPVWERDLISNCYRELSLSGSTRSARQAAVVELFALNHGALLQTGINLPLEISVLNAGSREKTLRRARAKAGFTHIAAKDGETRFRLNIAVSKSSTGTYTASCELIDTAGEEKPLRRIIPLRSLSRADIYDFAGALSNAAFGVTQ

SEQ ID NO: 25589 - DNA, 720 bp, Unknown
  Obtained from environmental sample
  misc_feature (1)..(720): n is a, c, g, or t
atgacaacatcaacattctgccccctctgcgattccaacgttatgtccctcatcagccaagacgagaggcgcaagcgccctttttacctttgccccgattgcggcctgatctccgtcccgccgcgataccatctgtcaaaaaccgacgaactggcccgctacgccctccacgacaacaccatatccaatcagggttacgtcgactttctgtccgaagtcgccgacgtcgccgttaatatagcctccgaaatgccgcataccgccggtctgcccgttaacgaccatatggaacatacggtaaaactgctggatttcggatgcggcggcgaggcggtgctctgccgtctgcttgtgaggcgggggataggtatagactgccaaccctacgacccgttgtacgaagggttgcggaggttgccggacgcggtcggcaaatacgatataattgttgcaagcgaggtcgtcgagcaccttcgcgacataacgggggagttgcgtatgatggtcaggttgctgagtgacagcggggcgattattttgcgtacgcggctatacgacgaatccggtgtcgacgcgtcgccggctttcaaaagctggtggtacgctcaggatcctacgcatataaattttttcagcaggaaatcgctcgataaattggcgcggatcgccggcaagcggattggggagacggcgcatcgggatatatttactcttaggtga

SEQ ID NO: 25590 - protein, 239 aa, Unknown
  Obtained from environmental sample
  DOMAIN (103)...(180): Methyltransferase domain
  misc_feature (1)..(239): Xaa is any amino acid
MTTSTFCPLCDSNVMSLISQDERRKRPFYLCPDCGLISVPPRYHLSKTDELARYALHDNTISNQGYVDFLSEVADVAVNIASEMPHTAGLPVNDHMEHTVKLLDFGCGGEAVLCRLLVRRGIGIDCQPYDPLYEGLRRLPDAVGKYDIIVASEVVEHLRDITGELRMMVRLLSDSGAIILRTRLYDESGVDASPAFKSWWYAQDPTHINFFSRKSLDKLARIAGKRIGETAHRDIFTLR

SEQ ID NO: 25591 - DNA, 327 bp, Unknown
  Obtained from environmental sample
  misc_feature (1)..(327): n is a, c, g, or t
atgatggcgggccttgtaccgcgttcccttatcgttgccacagaagacggctccgagggagttaaaggccgcattctggactttttctcgcctatggggtacagcggagtgtttgcctgcggccccgagccgatgcttcaggagatagccgacagaagcgtagcgtgcggaatcccctgctttgtaagtaccgaaagacatatggcctgcggtgtaggagcctgtcttggctgcaaaataagaaccaccaggggaagccggcgttgttgcgccgacggcccaatattctcaggcgaggagatctgctttgaaagcaaaagagcctga

SEQ ID NO: 25592 - protein, 108 aa, Unknown
  Obtained from environmental sample
  misc_feature (1)..(108): Xaa is any amino acid
MMAGLVPRSLIVATEDGSEGVKGRILDFFSPMGYSGVFACGPEPMLQEIADRSVACGIPCFVSTERHMACGVGACLGCKIRTTRGSRRCCADGPIFSGEEICFESKRA

SEQ ID NO: 25593 - DNA, 1005 bp, Unknown
  Obtained from environmental sample
  misc_feature (1)..(1005): n is a, c, g, or t
ttggccgatttggggaaaggaacgcccatctccctcttcgccgcgcccgcaaaccgcgccaacggcgagaattgggggcgcctcctgacgtggctcaggcagatgggggtgaggaagatatacgacgtctcattgggggcggacatctgcacttgggggcatatccggtacatccagaagcatatccccgaatccgtcgtcacgcagccttgtccggccgtcgtgaactatatccttatgcaccggcaggagttgataccgtacctctcccccgtccaaagccccatgctctgcaccgctatctacatgaagaaatacgagggcgtaaacgaccgtatagccgccctgtctccgtgtatagcgaagtcggacgaattcgccgccacggggtacgttgactacaacgtgacgctgaaaaaactttacgagcatatagaggcgcacgggatagcgctgccgaaagaggagtccggcttcgaccacgctgagtcctcgctcgggtgcctttactccatgccgggcggattgcgcgaaaacgtggaatggtacctcggcaagattctgcgcatcgacaagtccgagggtcaggggacggtgtaccgcgcgttggacagattcgccaagaagcgcgggaccaacctgcccgcgatattcgacgtgctgaactgccccgaaggctgcaacttagggacaggttgcgcccacgagcgcgacgagttcgacgtaaacgccattatggacgaggcgcggcaaaacatattgcagaggcgtagccaagaggatttcgaggccttgtacgccgattacgacaaaagattgaaattggacgatttcatccggcaatacacacccgtgcgcctcgccccctacaccgcttcccaagagcagatagaccgctctttcgagcggctcggcaaggagacggaagagaaaaaaacttcgattgctccgcgtgcggctcggacacctgccgcgatatggcgaaaaaggtggcttgcggtttga

SEQ ID NO: 25594 - protein, 334 aa, Unknown
  Obtained from environmental sample
  DOMAIN (1)...(234): Iron only hydrogenase large subunit, C-terminal domain
  misc_feature (1)..(334): Xaa is any amino acid
MADLGKGTPISLFAAPANRANGENWGRLLTWLRQMGVRKIYDVSLGADICTWGHIRYIQKHIPESVVTQPCPAVVNYILMHRQELIPYLSPVQSPMLCTAIYMKKYEGVNDRIAALSPCIAKSDEFAATGYVDYNVTLKKLYEHIEAHGIALPKEESGFDHAESSLGCLYSMPGGLRENVEWYLGKILRIDKSEGQGTVYRALDRFAKKRGTNLPAIFDVLNCPEGCNLGTGCAHERDEFDVNAIMDEARQNILQRRSQEDFEALYADYDKRLKLDDFIRQYTPVRLAPYTASQEQIDRSFERLGKETEEKKTSIAPRAARTPAAIWRKRWLAV

SEQ ID NO: 25595 - DNA, 306 bp, Unknown
  Obtained from environmental sample
  misc_feature (1)..(306): n is a, c, g, or t
atgcagccggactcgcctttccacgggcttgagggaatgaagcacatggattcaaccataaagcccaaaatatttgacaagagcgtcgccgatttgcatataacggttaaaacagaagacgcctacaaaacggcgcggcggcttgccgcggaagaaggattgttcgtcgggataagctcgggggctaacgtgtacgccgcgatggaaatcgcgaaaacactgcctgccggttcgcgggtcgctactattctgtgcgataacggcagccgttatctgtcacagccgttatggagagatttcgcgtaa

SEQ ID NO: 25596 - protein, 101 aa, Unknown
  Obtained from environmental sample
  misc_feature (1)..(101): Xaa is any amino acid
MQPDSPFHGLEGMKHMDSTIKPKIFDKSVADLHITVKTEDAYKTARRLAAEEGLFVGISSGANVYAAMEIAKTLPAGSRVATILCDNGSRYLSQPLWRDFA

SEQ ID NO: 25597 - DNA, 450 bp, Unknown
  Obtained from environmental sample
  misc_feature (1)..(450): n is a, c, g, or t
atggagagatttcgcgtaatgctgcggctttcttccgatttggaaaaaaacataagaacggacggcgaaaccgcgtatcccaatgaatgctgcggcgtattaatcggcgaggttgataacgcgggagttaaaacagccaggcggacgctgaccattggtaacgcgagggaggacggcgagcaataccaccgctttctcataacgccggaagatatgatgaacgccgagcaaaccgcaagatcgatgaaacttgacgttataggcttttaccactctcaccccgaccatccttcggcgccttcaggttatgacaaggatcacgccctgcccttttactcgtatgtgattgtatcggtagacaagggcaaggcgcaggttcttgcaagctgggagcttacagacgacagaactgattttttacaggaagaaataaataaaggaggatactaa

SEQ ID NO: 25598 - protein, 149 aa, Unknown
  Obtained from environmental sample
  misc_feature (1)..(149): Xaa is any amino acid
MERFRVMLRLSSDLEKNIRTDGETAYPNECCGVLIGEVDNAGVKTARRTLTIGNAREDGEQYHRFLITPEDMMNAEQTARSMKLDVIGFYHSHPDHPSAPSGYDKDHALPFYSYVIVSVDKGKAQVLASWELTDDRTDFLQEEINKGGY

SEQ ID NO: 25599 - DNA, 303 bp, Unknown
  Obtained from environmental sample
  misc_feature (1)..(303): n is a, c, g, or t
ttgataaaggtacttattccttacgcgctcaggtcgtttaccgagcgcaacgcggaggtggaagtaaagggcagtacggccggagacgccattaacgccctcgcgggcgcctaccccgcccttaaaaaccatcttttcacagaagacggccagcttcgcgacttcatcaacctgttcgtaggcggcgctaacatcaacagcctgcaagggctcaacacgcccgtcgcggataacagcgaagtgatgatagtccccgctatcgccggaggatgtgcggcgataccgcaacggcgattaatatga

SEQ ID NO: 25600 - protein, 100 aa, Unknown
  Obtained from environmental sample
  DOMAIN (4)...(90): ThiS family
  misc_feature (1)..(100): Xaa is any amino acid
MIKVLIPYALRSFTERNAEVEVKGSTAGDAINALAGAYPALKNHLFTEDGQLRDFINLFVGGANINSLQGLNTPVADNSEVMIVPAIAGGCAAIPQRRLI

SEQ ID NO: 25601 - DNA, 717 bp, Unknown
  Obtained from environmental sample
  misc_feature (1)..(717): n is a, c, g, or t
atgtgcggcgataccgcaacggcgattaatatgaagataagcgatatactgaatacagaaaaaattaccgtttcttgcgaactgtttccgccgaaacagggatccggcctcgccggcgcccagaatattgtccgtgaaaccgcggccttgcgcccgtcatttataagcatcacatacggcgcgggaggcgggacaagtgattacacgacaaaccttgctgctgaaacgcaaaaatacggaataacggcgctggcgcacctgacctgtgtttcatcggatcgccggactataagagacgttttatcgaaactcgccgctgacaaaattgaaaatgtccttgccttacggggcgatataccaaacgggctcccggccgacgcgcagtatcaccatgcctgcgatttaatgaaagagattcaaaacgcgggcgatttttgcataggcggcgcgtgctaccctgaaggacatcccgaatcggaaagccttgagaaggacattgaaagccttaaaattaaaaaggactgcggctgcagtttctttacgacacagatgttttttgacaacaacattttatataactttttgtaccgtcttttgcatcataaaattgacgtgcctgtaatcgcggggattatgccggttattaacggacggcagattgcccgtatctgtaaaatttcaggcacggttctgccgccgcgtttccgcgccatgtga

SEQ ID NO: 25602 - protein, 238 aa, Unknown
  Obtained from environmental sample
  DOMAIN (12)...(236): Methylenetetrahydrofolate reductase
  misc_feature (1)..(238): Xaa is any amino acid
MCGDTATAINMKISDILNTEKITVSCELFPPKQGSGLAGAQNIVRETAALRPSFISITYGAGGGTSDYTTNLAAETQKYGITALAHLTCVSSDRRTIRDVLSKLAADKIENVLALRGDIPNGLPADAQYHHACDLMKEIQNAGDFCIGGACYPEGHPESESLEKDIESLKIKKDCGCSFFTTQMFFDNNILYNFLYRLLHHKIDVPVIAGIMPVINGRQIARICKISGTVLPPRFRAM

SEQ ID NO: 25603 - DNA, 978 bp, Unknown
  Obtained from environmental sample
  misc_feature (1)..(978): n is a, c, g, or t
atgatggccgagcgattcgacgacttgcattcgattggtaacgtagccacgatcaagcaaatgttaaattcgcaggagagttccagggccctgatttcctgcgagaaccgcggtaagctgctgcaaataaccaaacgcaagccggcgtacgtcggacaaatcgaatcttacgacgatcccgaaccgctgtatgatccggcgacgacggaaccgctgctgacgcaaacttacgcgctggcggagcgctacgctatgctggcgcagggcaacgctccggatttcccgatagacgcctccgacgtagccggcgccgaaaacccggggcgtatcgccgattactacgggcagaatatttttatgccgccgggcaacaaacaaatcctgttggaggagtttaaccctatggcgcggctggaaaagctgaacgattttctgctggagataatatcgttcctggaggttgacctgcaagtcaggatcgccaccacgcagcggcttgaagaaggccagcgcgagcacatactgcgcgagcagatgaaaataataaggcagtccttgggcgaatccgccgccgacgattcggaatacgacgccgaaatgtaccgcgacaaaatattggcgctaggcttggccgaagagagcgaatccaaactaatcaaggaatgcgaccgcctgaaacgcttgcacccgtcgtcttcagacgccgcccttatcgccaattacctcgacgtctgcttgtcgctgccttggacgtcgttgaccaaagaccgcattaacgttggcgtcacgcgtaaaatactggaagccgaccattacggcatggagaaagtaaaacagcgcattatcgagtacgtcgcggtaaggcagctatcggaagacgccaagaataacggaagcatactctgttttatcggaccgcccggaatcggcaagacgtcgatagcggcggcggtagccaagtcgcttaaccgcagatga

SEQ ID NO: 25604 - protein, 325 aa, Unknown
  Obtained from environmental sample
  misc_feature (1)..(325): Xaa is any amino acid
MMAERFDDLHSIGNVATIKQMLNSQESSRALISCENRGKLLQITKRKPAYVGQIESYDDPEPLYDPATTEPLLTQTYALAERYAMLAQGNAPDFPIDASDVAGAENPGRIADYYGQNIFMPPGNKQILLEEFNPMARLEKLNDFLLEIISFLEVDLQVRIATTQRLEEGQREHILREQMKIIRQSLGESAADDSEYDAEMYRDKILALGLAEESESKLIKECDRLKRLHPSSSDAALIANYLDVCLSLPWTSLTKDRINVGVTRKILEADHYGMEKVKQRIIEYVAVRQLSEDAKNNGSILCFIGPPGIGKTSIAAAVAKSLNRR

SEQ ID NO: 25605 - DNA, 594 bp, Unknown
  Obtained from environmental sample
  misc_feature (1)..(594): n is a, c, g, or t
atgaacaaagccgccacactcctctttctctgcaccgctctctttgcccagcaaaaaggcaccttcaccgacacgcgagacggcaaaatatacaaaacgacaaaaatcggcgaacaggtttggatggcggagaatatgtcttacagcactggcggtagcaaatgttatggagaaggttctaaagatattaaagtaactgaaattgacccctatgaagacaaaatatataccaagacatataaagcattatcaacagcagaaatacaagctaactgcgttaaatacggaaagttgtataattgggaaatggctaattggatttgtccaaaaggctggcatttgcctacaaaatacgaatggggaatattgacagaagcggttgattggaacagtggtttttctgccctgccgggcggtgtcggcaaattcggctactggtggacttcttccgagtacgggtacgataaaaaagcctactacgccatcgttattggcaacaacggtggcataagctaccaagacaattatatgcacgacttgctaagtgtccgctgcctacaagacactcccctacccaaaggaagtgccaaatga

SEQ ID NO: 25606 - protein, 197 aa, Unknown
  Obtained from environmental sample
  SIGNAL (1)...(16)
  misc_feature (1)..(197): Xaa is any amino acid
MNKAATLLFLCTALFAQQKGTFTDTRDGKIYKTTKIGEQVWMAENMSYSTGGSKCYGEGSKDIKVTEIDPYEDKIYTKTYKALSTAEIQANCVKYGKLYNWEMANWICPKGWHLPTKYEWGILTEAVDWNSGFSALPGGVGKFGYWWTSSEYGYDKKAYYAIVIGNNGGISYQDNYMHDLLSVRCLQDTPLPKGSAK

SEQ ID NO: 25607 - DNA, 537 bp, Unknown
  Obtained from environmental sample
  misc_feature (1)..(537): n is a, c, g, or t
atgttgacggtatactctaagggattcagactaaaagtggttatttattcattcacaaaatttctggttgatgtttattgtcctgttttaacaggtgtttcgttatctgtttccggcagtttttcttccgatgataaaatagttacatcttcatttgaatcatttgtttcaggttccggggctataaatgggacttttgaatgtgaaaattatttcgcagatatttcaggttcaggaaaaataaacgcaaatactacgtgtaatagtttatcggctgttatttccgggtccggagatatagctgttatcggaacaagtaataattcaaatgtcaggatttccggatcgggaagttttaatgggattgaatttaaaacaaataatgttatagcccatattagcggttctgggggtatgagtatttgggcactggaaagtattgatgcgaatgtttctggttcaggcagtataaagtaccgtggaagtcctaagattaattttagcggctctggttcagggcgaatcagaagcgaataa

SEQ ID NO: 25608 - protein, 178 aa, Unknown
  Obtained from environmental sample
  misc_feature (1)..(178): Xaa is any amino acid
MLTVYSKGFRLKVVIYSFTKFLVDVYCPVLTGVSLSVSGSFSSDDKIVTSSFESFVSGSGAINGTFECENYFADISGSGKINANTTCNSLSAVISGSGDIAVIGTSNNSNVRISGSGSFNGIEFKTNNVIAHISGSGGMSIWALESIDANVSGSGSIKYRGSPKINFSGSGSGRIRSE

SEQ ID NO: 25609 - DNA, 675 bp, Unknown
  Obtained from environmental sample
  misc_feature (1)..(675): n is a, c, g, or t
ttggggattgaaagctcttcgccaattacgggcaaagaggcttatgactgtaattttacaaatgaaagcggaattaacgacactatcctgtttttaaaaaacatttccggcctgtggcttcttcaggaaagccgcggacaatggaaacgcgaaggcgaaacattaagttacgccggaatagaagacgcaatagccaataacgcctctcctgaagtttaccttgacgcggaacttaatgatttcggcgctccgggagatcttccttccttgtttaacaagttttttagggagacaggccagaagccgctgaaaaataaaatagacatagcgcattgcatcatggaaagcctcgcgttaagttatgattacagaatcaggcagcttgagcgcataacagggaaaaaatttaacgctgtcaatattatcggaggcggatcaaaggatacgaacctgatgcgttttaccgcaaacgcgacggggaagaaggtaattgcgggcccctcggaggctaccgcgattggcaatatcatcatacagctgattgcggcaggagaattaaagtcggtaaaggaagcgcgggaaaaaattgagggcttggtcagttatcttccgacaaacggagaaatctggagcggaaaacgtgaaaaattcccaggaaattttaaccgcctctaa

SEQ ID NO: 25610 - protein, 224 aa, Unknown
  Obtained from environmental sample
  misc_feature (1)..(224): Xaa is any amino acid
MGIESSSPITGKEAYDCNFTNESGINDTILFLKNISGLWLLQESRGQWKREGETLSYAGIEDAIANNASPEVYLDAELNDFGAPGDLPSLFNKFFRETGQKPLKNKIDIAHCIMESLALSYDYRIRQLERITGKKFNAVNIIGGGSKDTNLMRFTANATGKKVIAGPSEATAIGNIIIQLIAAGELKSVKEAREKIEGLVSYLPTNGEIWSGKREKFPGNFNRL

SEQ ID NO: 25611 - DNA, 645 bp, Unknown
  Obtained from environmental sample
  misc_feature (1)..(645): n is a, c, g, or t
atgagaaataacttttttgtaatgggaatggtgactttggcgttagcatttgcttttatttttactggttgtgataccggtacgaatgatgacggtggaaatgatggaaatcagcctgtttccacaaagtcgttcgtatcagatggaaacgggttaatacaatattctaccaatgatcccaaaaattatgctcttgcatggtggcatttctttaataatataaacgatcaggatatttacgaaattgaatgtaaaaaaatgagcggagccagcggttatgggtatgggatgctttttggagcttctgatgatgataactataaatattactatttggcaatatccatagacggtacttatagtatagataaaaatatcggcaatgttttaactgaaataaaggcgcctgaaaaatcggataaattgaaaacaggatataatgtaataaacattttaaaagtagttaaaagcggagctgaatatactgtttatttgaatggcagccaagaatatcaatttacggatacggaaataagcggtaatagagtgggttatagggttagaattggttcgggatatgacgaatcctttccagacacccctgttgatgtgcggttcagacagagatacgtaaaacggaaataa

SEQ ID NO: 25612 - protein, 214 aa, Unknown
  Obtained from environmental sample
  SIGNAL (1)...(23)
  misc_feature (1)..(214): Xaa is any amino acid
MRNNFFVMGMVTLALAFAFIFTGCDTGTNDDGGNDGNQPVSTKSFVSDGNGLIQYSTNDPKNYALAWWHFFNNINDQDIYEIECKKMSGASGYGYGMLFGASDDDNYKYYYLAISIDGTYSIDKNIGNVLTEIKAPEKSDKLKTGYNVINILKVVKSGAEYTVYLNGSQEYQFTDTEISGNRVGYRVRIGSGYDESFPDTPVDVRFRQRYVKRK

SEQ ID NO: 25613 - DNA, 834 bp, Unknown
  Obtained from environmental sample
  misc_feature (1)..(834): n is a, c, g, or t
ttgatgaccgtagggcggctttcaagcgacaatgaaattctggtgtttctttcatccgggctttctttcaggaacgtgtttgtgccggcaataaccgtaggcattgttatttccattctttcttttatcgccaatgacatactgatgccgggcggttatgtgaaatttgcccagttgtacaggcgcatacttctttccaccccggcgctggaactggaggcgaactcggtaaaaaaattcaagaacacggtaattgtcacgggtaatgtgtcaggcaatgccattgacaatgtgctgatattggacaaaaccagcgatggcgagcgccgcgttatcatggcagctaacgctgaattaaaagattcgggcaaggacggcctgagccttgatcttggcagggcttttatacagtcctcaaaagaagttgcccgcgaggattacgattacgcgtccgccgggtatcttcgctactgggttcctcaggaggatcttatacaggccatgtcttcggtaagcccccgcgagatgagctccattgacgtgtataaggagataaaaaaaagaactattgatcttaacaaccgcatgaatgagaaacggaacaaggtttcatctctggcctttgcatttgaaaacagcctgcgcgccggaccctcttcctatgaatggaaccgcaggacaaatcaatttaccgctttccagcgggaagctcaggcgcttcagtccatgagtaaagacgcggggtctttcgctgtattggctggaattctacaagaaattctctatgccattcggggcttttcgttcgtattcctgcggttgcgctgggactga

SEQ ID NO: 25614 - protein, 277 aa, Unknown
  Obtained from environmental sample
  misc_feature (1)..(277): Xaa is any amino acid
MMTVGRLSSDNEILVFLSSGLSFRNVFVPAITVGIVISILSFIANDILMPGGYVKFAQLYRRILLSTPALELEANSVKKFKNTVIVTGNVSGNAIDNVLILDKTSDGERRVIMAANAELKDSGKDGLSLDLGRAFIQSSKEVAREDYDYASAGYLRYWVPQEDLIQAMSSVSPREMSSIDVYKEIKKRTIDLNNRMNEKRNKVSSLAFAFENSLRAGPSSYEWNRRTNQFTAFQREAQALQSMSKDAGSFAVLAGILQEILYAIRGFSFVFLRLRWD

SEQ ID NO: 25615 - DNA, 936 bp, Unknown
  Obtained from environmental sample
  misc_feature (1)..(936): n is a, c, g, or t
gtgtggatgcgccgcagcctccgcgcctggctgcacggaagcaggccctgggaaagcctgctgctggtaccgtctatcgaaaaaatcaaacaaaatctggcggaagacagccgctattttgaatcgctgatacagaaatacctgctggacaatccccaccgcgccctggtgacagtggagccaaaggaagatttccttccggaacaggaggcgcggcttgccgaaaaactcgccaggacggagcagggctttagcgaggcggacaggcggcgtatcattgacaaagccaatgcccttgaaaaactccagagcgagggcgacagtcccgagtcgcttgcggctattccccatctttccagaaaagacctttcgcccgaaccggaaattgtcccacgccggattgaagaccttatgggactccccgcgctgtgccatgacatttataccaacggcataagctatatcgaccttgcctttccccttgatattctcccctgggaagattaccagtggattccgttcttcacgcgggccgttgtttccgtagggctgcccggaatggattacgccgaagtatcaagcctgctcgcccgcaccgtgggcggtttaagcgtcataccgcacagcggcactcccgcgggcggcggcagcccgtttgttaaattcccatcgggaaaatttaaccttattggccgggactggctcatctgccgcgtcaaatgcctggacgaaaaaacggcggcgtccctggatctggttctgcgcctgatgagcgaagcggatttttccgatttaaggcgaatccacgaccttgttatggaaatgaaaaacggggcgcgttccagccttgcccccggcgggcatcattacgcgtcatccagggcaaaccgttatgcgtcagcttccacgcggacggaggaaacatggcacggttaa

SEQ ID NO: 25616 - protein, 311 aa, Unknown
  Obtained from environmental sample
  DOMAIN (59)...(311): Peptidase M16C associated
  misc_feature (1)..(311): Xaa is any amino acid
MWMRRSLRAWLHGSRPWESLLLVPSIEKIKQNLAEDSRYFESLIQKYLLDNPHRALVTVEPKEDFLPEQEARLAEKLARTEQGFSEADRRRIIDKANALEKLQSEGDSPESLAAIPHLSRKDLSPEPEIVPRRIEDLMGLPALCHDIYTNGISYIDLAFPLDILPWEDYQWIPFFTRAVVSVGLPGMDYAEVSSLLARTVGGLSVIPHSGTPAGGGSPFVKFPSGKFNLIGRDWLICRVKCLDEKTAASLDLVLRLMSEADFSDLRRIHDLVMEMKNGARSSLAPGGHHYASSRANRYASASTRTEETWHG

SEQ ID NO: 25617 - DNA, 654 bp, Unknown
  Obtained from environmental sample
  misc_feature (1)..(654): n is a, c, g, or t
ttgaccggctgggtaggaaccccggtgcacgaagcagggcaggcacttttttgcattatttttgggcataaaatcaccgaaatcaagtttttttcctcaagaaaagatggaaccgctggctatattaagcacgaatacaacccaaaaagcatataccaaaaaataggtaacttttttataggcatagctccaatgttctttggcgcattggtgatttacatcttgctatggatctttttgccttggtgcttgccccaggagctagatgaaggcataaggataactggttggaaaatttttaaaaatatcatcttcaactccgataactttggcaactggcggttttgggtgtttttttacctttcgctcagcgttgcgagccactctgcactaagcacccatgaccttaaaggcacggttcccagcttttttatcctgctgggttttatattcatcgtaaatttgatagctagcgcgtttttgaaatacggattggatagtttgtcttttacacatctgtttacaagaaatatagatgttatgctgtctcttttttattccataatgctttacgttctggcaatctccgttttatatctaatcttttcttatctgttgttttggatttccaaaccgtttaagcgaaaaagctag

SEQ ID NO: 25618 - protein, 217 aa, Unknown
  Obtained from environmental sample
  misc_feature (1)..(217): Xaa is any amino acid
MTGWVGTPVHEAGQALFCIIFGHKITEIKFFSSRKDGTAGYIKHEYNPKSIYQKIGNFFIGIAPMFFGALVIYILLWIFLPWCLPQELDEGIRITGWKIFKNIIFNSDNFGNWRFWVFFYLSLSVASHSALSTHDLKGTVPSFFILLGFIFIVNLIASAFLKYGLDSLSFTHLFTRNIDVMLSLFYSIMLYVLAISVLYLIFSYLLFWISKPFKRKS

SEQ ID NO: 25619 - DNA, 1260 bp, Unknown
  Obtained from environmental sample
  misc_feature (1)..(1260): n is a, c, g, or t
gtgaaagtggcagaaaagccaaagcagctaagncctgaggctcagcttgcggaaattcagagcagaatagattccctcaagaattttatatcaaagcagcctattctcaaagcagctaaggttgagcctaatcacgggcttttccagactttgcagagcgtgggcttggatttaaagcagtccctgaaaatcataaatacccttgcagataccgtggaactcggcgttttgaaggctgggcaagttttttgggtgggttttgacccaatagacacatctaaagcggttctgttcagatatgcggaaaatcccgcaacccttcattttttaatagccgattatgcgggggagtggacatataaaataatagagaacccagtgaacattcgctacgctttatatgagggagttttggtagaaggtaaaaatttatataacactttaagggatataggtattcctcaaaccatggtaggcgttgtggctggcgttttggagtgcaaagtgaactttagaacggatgcacgtgctggagatgagtttaaagttttgctaaaagaaacgcgctttcaagatactatgtggataagtggaaaggttttatatgctggctacaacggctcaaaggtaaagcacagcgaggcttttatgtaccaagaagcagaccccaagagttcatataatgctcattacaccgaagacggtgaggctcttgtccattcggggcttaggtaccctttagacagattgcatatcacaagccgctatggttaccgcattcaccctatcacaggcgcaagggcatttcacagcggggttgactacaggggtgcggttggaacacctgtttatgcggtggcggacggcgttatagtgcggtcttcttatgatgatgcgaatggcaaccacgtggctattaaacattccgataacagccagagctggtatttgcatttgtcccagcgaggcgttggaatggggcagagggttaggagccggcagattataggcaaggttggcaacacaggcaggagcagcggccctcatctgcatcttgccataaagcagccaaacggttcttggatggaccctcttcttaaaaaaatgattgcaacgcccaagctggaaggcgcatattttttggcattgcaagagcagataaaaaacattcgtagcattcttgcaagaacagacagagctgaatcaaaaaacataagcgactcgttattcgctacggtgaaatgggttgaagcgggatga

SEQ ID NO: 25620 - protein, 419 aa, Unknown
  Obtained from environmental sample
  DOMAIN (268)...(364): Peptidase family M23
  misc_feature (1)..(419): Xaa is any amino acid
MKVAEKPKQLXPEAQLAEIQSRIDSLKNFISKQPILKAAKVEPNHGLFQTLQSVGLDLKQSLKIINTLADTVELGVLKAGQVFWVGFDPIDTSKAVLFRYAENPATLHFLIADYAGEWTYKIIENPVNIRYALYEGVLVEGKNLYNTLRDIGIPQTMVGVVAGVLECKVNFRTDARAGDEFKVLLKETRFQDTMWISGKVLYAGYNGSKVKHSEAFMYQEADPKSSYNAHYTEDGEALVHSGLRYPLDRLHITSRYGYRIHPITGARAFHSGVDYRGAVGTPVYAVADGVIVRSSYDDANGNHVAIKHSDNSQSWYLHLSQRGVGMGQRVRSRQIIGKVGNTGRSSGPHLHLAIKQPNGSWMDPLLKKMIATPKLEGAYFLALQEQIKNIRSILARTDRAESKNISDSLFATVKWVEAG

SEQ ID NO: 25621 - DNA, 768 bp, Unknown
  Obtained from environmental sample
  misc_feature (1)..(768): n is a, c, g, or t
ttgtcgggggatatttcggagcaaactatgttcattttgtacggaaccggcgcaaacggtaaatcaacttttttgaatacgataatgtacctgttaggcgattacgcaaccgcaacgcctaccgaaacttttatgaaaaaatcgggggataattattccaatgacgtggctcgtctgcggggtactcggtttgtaactaccacagaggttgagcagggacggcgtatgtctgaaccgttaattaaaaagattaccggcaatgatgaaatgacggctcgttttttgtatggggagttttttaattttaagccgactttcaagatttttatggcgactaatcataagcctgttatcaagggtactgatcatgggatatggcggcgtattaaactaattccttttacgcaaaggatacctgaagaaaaacaggataaacatcttgaattgaaactgcgggaagaagcaagcggaattttgaattggcttttggaaggtatggcgatttggagacaggaaaggttgaaaacgccgaaggctgttttgtttgctactgacgaatatcgtggggaaatggacgttatcggaaatttcataaaagagaaatgtgatcagaaaaaggaaatgactattactattaaaaagttatacaaggcttattccgactggtgtgaagaanataacgaacaccctgttagcgaaaggttttttactttgcggttaaaggaaatggggtttgcgcagggcaggacggcgacggagaggttttga

SEQ ID NO: 25622 - protein, 255 aa, Unknown
  Obtained from environmental sample
  DOMAIN (1)...(246): Poxvirus D5 protein-like
  misc_feature (1)..(255): Xaa is any amino acid
MSGDISEQTMFILYGTGANGKSTFLNTIMYLLGDYATATPTETFMKKSGDNYSNDVARLRGTRFVTTTEVEQGRRMSEPLIKKITGNDEMTARFLYGEFFNFKPTFKIFMATNHKPVIKGTDHGIWRRIKLIPFTQRIPEEKQDKHLELKLREEASGILNWLLEGMAIWRQERLKTPKAVLFATDEYRGEMDVIGNFIKEKCDQKKEMTITIKKLYKAYSDWCEEXNEHPVSERFFTLRLKEMGFAQGRTATERF

SEQ ID NO: 25623 - DNA, 513 bp, Unknown
  Obtained from environmental sample
  misc_feature (1)..(513): n is a, c, g, or t
ttggccgaggatcctgatcccttgacctgtcaagacggcgaaaccggagaactggtgcttaccatactttgccgtgaggcgacgccgctattgcgttatcgtacacgcgatcttacctctttttacacggagccatgcagttgcggcagaacccaccgccgcctgcaccgcatcacagggcgaagcgacgacatgctgataatcaacggtgtaaacgtcttccccagccagatcgaagaagtgatcatgggcatgaaggaagtgggaaacaactatcttattgtggttgaaaaagacggcgctcttgaccggctgacggtaaaaaccgaagtcggcccggacatattcatggacgatgcccgccccctcaacgccctgaaggaaaagataaaggaaacccttcaggtatccatttcaatcagccccagggttgaactccacgaaagcggcagcatggctgtttcggaaggcaaagcggtaagggtgcaggacaagcggcctaaagacgtttaa

SEQ ID NO: 25624 - protein, 170 aa, Unknown
  Obtained from environmental sample
  misc_feature (1)..(170): Xaa is any amino acid
MAEDPDPLTCQDGETGELVLTILCREATPLLRYRTRDLTSFYTEPCSCGRTHRRLHRITGRSDDMLIINGVNVFPSQIEEVIMGMKEVGNNYLIVVEKDGALDRLTVKTEVGPDIFMDDARPLNALKEKIKETLQVSISISPRVELHESGSMAVSEGKAVRVQDKRPKDV

SEQ ID NO: 25625 - DNA, 624 bp, Unknown
  Obtained from environmental sample
  misc_feature (1)..(624): n is a, c, g, or t
ttgcggaaacttaaccagccgcttaccttgtatttgataatcgctacagtccctacggtaatcgcggctctggttttcagaaaaccgcttgaaagggcttttgaaacaggacattttctgggttttgcctttcttatgacatcggcattgctggcagctgcggaactgctggcgaaaaaagccgcggccaaaggcgatactgccaaaaatgccgtttcaatgggctggctggacgcgctggtcattggcgttatgcaggcggtcgccattatccccggcgtgtcccgttccggcgcgaccctgtccggggcgctttcccgcaggctggacagggactttgccgcccgcttttctttcctgctgtcgatccccgcgattcttggcgcggctgttttccagctaaaggatctggtgaaaggcggtaccgcggatgcgaccgatgtaactgcggccggcggtattggagcggcggctatgatcgcgggaaccgtaagcgccgctattgtcggttttttcgccgtgcggctgatgttgaaaattgtcagggaaaaatcgctgtggggttttgccatttacaccggcgttcttgggctgcttgtgctggtactgaggatcgggggatga

SEQ ID NO: 25626 - protein, 207 aa, Unknown
  Obtained from environmental sample
  SIGNAL (1)...(22)
  DOMAIN (1)...(200): Bacitracin resistance protein BacA
  misc_feature (1)..(207): Xaa is any amino acid
MRKLNQPLTLYLIIATVPTVIAALVFRKPLERAFETGHFLGFAFLMTSALLAAAELLAKKAAAKGDTAKNAVSMGWLDALVIGVMQAVAIIPGVSRSGATLSGALSRRLDRDFAARFSFLLSIPAILGAAVFQLKDLVKGGTADATDVTAAGGIGAAAMIAGTVSAAIVGFFAVRLMLKIVREKSLWGFAIYTGVLGLLVLVLRIGG

SEQ ID NO: 25627 - DNA, 1272 bp, Unknown
  Obtained from environmental sample
  misc_feature (1)..(1272): n is a, c, g, or t
atggacacacaaaataaatacggccagttttttgaacaaatagaaaataaacccctgccacttaccgcaacagcaataatgaacgcaatcaaagcgaatgggtacgccccggagttaaagcctttttatctttacattgcgaagctcaacggcgtagacattaagacagagctagacaatctgaccatggcgcaagaaacggcacagcaagagaaagccatgcgggaaacagtggcaagcctagcggaaaaaaatggggcgcttgccgttgagactgacccggagaaacagaaagaactcattgggagcatacacaaactcaccgcttccctgggagcatatacaaaaaataaaaaccgcagatacacagcttccgattatctgaatgaatgcctgaattatgatccctcaaaagactttaccccttcaatgcttgccggattgcggttccctaacggcacacttagttatatcggtgcaaggccgggcggtgggaaaagcaccttgcttgtaaaccttgcgagagaagcattggcagtagggcgcaatgttcatttggtaaatcttgaaatgaaaaatagagccgtcattaccaattatacgttgtctttaatatacgcatctgtaaatgaagagcagcgcaaagagttagacatgatcaataaccctatgagcaaatattacagcttattcaagtcggaatatgataatcgagaaacattcgaatcgttccggtataacgccataaataaaacacttggtttgcttgataaaagcctattcctttatgactgcacaggggaaacactggaaaccataatcggggatgttgaaaacatggtaaacgccggagatgttgtattaatagactacctacagcgtatattgccgcccagggagagtagggatcaacgctacattcagattaaacaaataagcaatgcgcttttaacccttgcgataaaaaaggacgtggttattatctccggggcgcagtttgggcggcaagcaaaagaaaacaggggcaatgaagcgacattagaagattttcgggaaggcggcgatacggagcaggacgcgcataatgccctggcaatcgaaaccattacagataaggacggcaacgatgcggggcgctatatccatgtactgaaacaacgggaaggcggggcggttttcaaacggactcccctggactgcaactttaactatctttacatggccggaaccggcaaagaacacataacggaaccggaaggccaaagcggataa

SEQ ID NO: 25628 - protein, 423 aa, Unknown
  Obtained from environmental sample
  DOMAIN (144)...(342): DnaB-like helicase C terminal domain
  misc_feature (1)..(423): Xaa is any amino acid
MDTQNKYGQFFEQIENKPLPLTATAIMNAIKANGYAPELKPFYLYIAKLNGVDIKTELDNLTMAQETAQQEKAMRETVASLAEKNGALAVETDPEKQKELIGSIHKLTASLGAYTKNKNRRYTASDYLNECLNYDPSKDFTPSMLAGLRFPNGTLSYIGARPGGGKSTLLVNLAREALAVGRNVHLVNLEMKNRAVITNYTLSLIYASVNEEQRKELDMINNPMSKYYSLFKSEYDNRETFESFRYNAINKTLGLLDKSLFLYDCTGETLETIIGDVENMVNAGDVVLIDYLQRILPPRESRDQRYIQIKQISNALLTLAIKKDVVIISGAQFGRQAKENRGNEATLEDFREGGDTEQDAHNALAIETITDKDGNDAGRYIHVLKQREGGAVFKRTPLDCNFNYLYMAGTGKEHITEPEGQSG

SEQ ID NO: 25629 - DNA, 438 bp, Unknown
  Obtained from environmental sample
  misc_feature (1)..(438): n is a, c, g, or t
ttgggcagcatcccattggtgaagctgaagaaaaaacggatagaaacgtggatgactttcatttccgaagccccccgcagaggctatgggatagtggcccagcccccgcagaccgaagacgagaagcgggcgcggaaagaaaccgccaaccgcaatttcaccatcctctgtgcggcactgaactacgccatcaggaatgatgtcaacttggcaagggagtgtgtgccttaccagtggacgcttgtcgagcgtttttccggcaccaaaaagtcaagagttgggaagctgcaaaaagataagaggaaaagcctaatcgaagcgtgcaggccggatttccggcagcttgtgataggtgcgcttatgactgcttgcagatatggcgaactgataaggctcaaatgcaaggactacaagcggcggcagcatctacattgctga

SEQ ID NO: 25630 - protein, 145 aa, Unknown
  Obtained from environmental sample
  misc_feature (1)..(145): Xaa is any amino acid
MGSIPLVKLKKKRIETWMTFISEAPRRGYGIVAQPPQTEDEKRARKETANRNFTILCAALNYAIRNDVNLARECVPYQWTLVERFSGTKKSRVGKLQKDKRKSLIEACRPDFRQLVIGALMTACRYGELIRLKCKDYKRRQHLHC

SEQ ID NO: 25631 - DNA, 486 bp, Unknown
  Obtained from environmental sample
  misc_feature (1)..(486): n is a, c, g, or t
atgttccaggacgagccccgcttcgggcgcatctcggcccccaggcggagctggtacccgaagcccttcagggcggtgtgcaagaggacggtcacccgggagtacacgtacgcctgcggggccgtaagcataagggacggccagtgggatagcctgacactgccgaaggccgacacggggtgcatgcaggtgttccttgacgaggtgtcggccaggccgcatcatcatggcgctggacggcgcgggctggcacaggagcggttccctggccgtgccggggaacatgaggctgctcccgctgcccccgtattcgccggagctgaacccggtggagaacatctgggaggagctgcgcgaaaagttcatcggcaacagcgtgttcgacagcatggccgcgctggaggactgcctccagaccggactgaagcgcctctaggatcacccagagatcaccaagtcaatttcggcttggccttggataattaa

SEQ ID NO: 25632 - protein, 161 aa, Unknown
  Obtained from environmental sample
  misc_feature (1)..(161): Xaa is any amino acid
MFQDEPRFGRISAPRRSWYPKPFRAVCKRTVTREYTYACGAVSIRDGQWDSLTLPKADTGCMQVFLDEVSARPHHHGAGRRGLAQERFPGRAGEHEAAPAAPVFAGAEPGGEHLGGAARKVHRQQRVRQHGRAGGLPPDRTEAPLGSPRDHQVNFGLALDN

SEQ ID NO: 25633 - DNA, 966 bp, Unknown
  Obtained from environmental sample
  misc_feature (1)..(966): n is a, c, g, or t
ttgggcgtgtctatggctacggcgagggccgcggcgaacttccttgatatacccctgtacagatacctgggaacattccatgcctgcctgctgcctgttccgatggcgaacattatcaacggcggcaaacactccgacaacctgattgacttccaggaattcatggtaatgcccgtaggcgcggaatcactgcgcgaagctgtccgctggactgctgaagtattccacaaccttaaaaacatcctccacagcgcaaagaaaaacaccgcggtcggcgatgaaggcggctttgcgcctgatatcagcaatgacgacgcgctggattacatcatgaaggccattgagaaagccggctacaaaccaggcgagcagatggcgattgccatggactgcgcctcttccgaactgtacggtgaaggcggcaagaaaggctacaaattctggaaatccaaccccgataaactgttcaccgccgatgaaatgatcgagaaatacacgagctggataaacaaatacccaatcatttccatagaagacccgctggatcaggacgactgggatggttatgtaaagatgaccaaggccctcggttcaaaagtgcagatagtcggcgacgacttctttgtcaccaataccaaacggcttgaaaaaggcatcgcgatgggcgcctgtaactccatcctgatcaaagtgaaccagatcggcactgtaagcgaaacctacgaagcggtcgagatggcaaagaaagccggctacacggctattgtttcccaccgctcgggcgagaccgaggacaccttcatagccgaccttgtagtggcccttgaaaccggacagatcaaaacaggttcaatgagccgcaccgacaggatcgcaaagtacaaccagcttctcagaatcgaggatcagcttgaaggcgtagccgaatacgccggcagaaaagcgttttattcaattagaaaataa

SEQ ID NO: 25634 - protein, 321 aa, Unknown
  Obtained from environmental sample
  DOMAIN (28)...(319): Enolase, C-terminal TIM barrel domain
  misc_feature (1)..(321): Xaa is any amino acid
MGVSMATARAAANFLDIPLYRYLGTFHACLLPVPMANIINGGKHSDNLIDFQEFMVMPVGAESLREAVRWTAEVFHNLKNILHSAKKNTAVGDEGGFAPDISNDDALDYIMKAIEKAGYKPGEQMAIAMDCASSELYGEGGKKGYKFWKSNPDKLFTADEMIEKYTSWINKYPIISIEDPLDQDDWDGYVKMTKALGSKVQIVGDDFFVTNTKRLEKGIAMGACNSILIKVNQIGTVSETYEAVEMAKKAGYTAIVSHRSGETEDTFIADLVVALETGQIKTGSMSRTDRIAKYNQLLRIEDQLEGVAEYAGRKAFYSIRK

SEQ ID NO: 25635 - DNA, 408 bp, Unknown
  Obtained from environmental sample
  misc_feature (1)..(408): n is a, c, g, or t
atgaaaaacactattaaatttcgatttgccggcattggattattactggtaacggttgcggtttttagcgtggtaataatgctgttatggaacgcgcttatgccgcagatttttaccctgcctgtattaaattattggcaggcggcgggcttgttgcttctggcgcggctgctttttggcggaatgagcggttctcatgccatacgcataggagcgttgggagcacgagactacaagcgtatgtcttatcccggcaaccaattgcgcgaaaaatggatgaacatgagcgaggaggaacgcaaagaattcgtgaaaaaagagaaagatttttttaaatctcatcagcgtttttctcattttcatgaaatttttgatgacaaagaaaaaccggaacagggcggagtataa

SEQ ID NO: 25636 - protein, 135 aa, Unknown
  Obtained from environmental sample
  SIGNAL (1)...(23)
  misc_feature (1)..(135): Xaa is any amino acid
MKNTIKFRFAGIGLLLVTVAVFSVVIMLLWNALMPQIFTLPVLNYWQAAGLLLLARLLFGGMSGSHAIRIGALGARDYKRMSYPGNQLREKWMNMSEEERKEFVKKEKDFFKSHQRFSHFHEIFDDKEKPEQGGV

SEQ ID NO: 25637 - DNA, 696 bp, Unknown
  Obtained from environmental sample
  misc_feature (1)..(696): n is a, c, g, or t
atgttcagaatcggccgaggggcatttagaggaaaaagcgtctgggatgtggtaaacgaagcgatgagggacagtctatccgccgcagaggctaatggagactggaagaaatgtataaggaattttcaaaatccatggtacgacaagctgggtccggattatgttgaaatttccttccgcgccgcccgcgccgctgacccggatattacgctgtattacaatgataacggccttgaggatccaaataaggcggaagcggtaaggaagatgatcaaagatattaacgaccgttataaaaaagaaacaggcggcagccgaaaccttattgaaggcgcaggttcgcaatcccatatatttaaatttgaaaatctcaatatggacaatgtgcgtttatctttggaaaagttcgttagtcttgggattgaaatttccataagcgaactggatttgtcggttatcggttatgagcgcggcaacggaagggacactgaaatgtcccacgcggatgaaacagcgcaggcaaagtattacgcggaattatttaaactgtacaaagaatattccaaatatataaagcggataaccatgtggggtatggatgacaacaccagttggatatccgccgggaatccctgtctctttgactggaaactaaacgccaaaaaagccttttatgccgtcagcgcgcctgaatag

SEQ ID NO: 25638 - protein, 231 aa, Unknown
  Obtained from environmental sample
  DOMAIN (2)...(231): Glycosyl hydrolase family 10
  misc_feature (1)..(231): Xaa is any amino acid
MFRIGRGAFRGKSVWDVVNEAMRDSLSAAEANGDWKKCIRNFQNPWYDKLGPDYVEISFRAARAADPDITLYYNDNGLEDPNKAEAVRKMIKDINDRYKKETGGSRNLIEGAGSQSHIFKFENLNMDNVRLSLEKFVSLGIEISISELDLSVIGYERGNGRDTEMSHADETAQAKYYAELFKLYKEYSKYIKRITMWGMDDNTSWISAGNPCLFDWKLNAKKAFYAVSAPE

SEQ ID NO: 25639 - DNA, 855 bp, Unknown
  Obtained from environmental sample
  misc_feature (1)..(855): n is a, c, g, or t
atgggaacgctttcggcgatggcggaggcagccggggtaccacaggaagggatacgtgcggcggaaatgaccatagcggcagcgaacgcggctatggaagcccgtgcggcagaaacccgcctggctgaggccctcgtagcggcggaagacaaggcagcggcagcccgtgaagcagaagctctcgcggcagcagcccgctcggcggtaaacccaagtgagtccaatatacgcttggctgaagcgcgcgcggcggaggctcgggcggcggaagctctggcattagcagaagctcgcatggccgaagcacatgcaatcgaagcgcgggaagcggaaaggcgcgcaacggaaacatccgtgcttgcggtggtcgcgcccgacacctccgcacctgttcaaacaaaaccgttgtttaattgggggagtaccgatggagactcgaaagacagctgggtatatctcggcggcacgttaggtggcgggcgctattcttatcacagctacaggaatgaaaacttaagcgggggcgcatttgcatttggattgctcgccgattttcactttataaattttctttcttttgaaacaattttatcccttgggtatgcagatggcactgtctcgctggttatcccattgatggcgaaagtaggatggaaatttacaaaaatagagttttccgctgatgttggctacaccattaacacagggcttacagtcggcggcactttcggtgttaatatgggccctggtgttatttttgccaaattttatgccatacctactccaacgacaatcgatgattcaattatgcttggattttttggttataaaataggcgtagggaacaaacgctaa

SEQ ID NO: 25640 - protein, 284 aa, Unknown
  Obtained from environmental sample
  misc_feature (1)..(284): Xaa is any amino acid
MGTLSAMAEAAGVPQEGIRAAEMTIAAANAAMEARAAETRLAEALVAAEDKAAAAREAEALAAAARSAVNPSESNIRLAEARAAEARAAEALALAEARMAEAHAIEAREAERRATETSVLAVVAPDTSAPVQTKPLFNWGSTDGDSKDSWVYLGGTLGGGRYSYHSYRNENLSGGAFAFGLLADFHFINFLSFETILSLGYADGTVSLVIPLMAKVGWKFTKIEFSADVGYTINTGLTVGGTFGVNMGPGVIFAKFYAIPTPTTIDDSIMLGFFGYKIGVGNKR

SEQ ID NO: 25641 - DNA, 351 bp, Unknown
  Obtained from environmental sample
  misc_feature (1)..(351): n is a, c, g, or t
atgaccgattacggggaaaagataaacagggccctggacgaataccacgcgggccgctacgaatcttccgcggaggtgtgggaagaagtgctgaaaatgaacggtaactatgaccttgcctatatcggcataggccgggcggcgctgaggcagggtgaataccaaaaggcgatgaagtactacaaactcaagcgcttccgcgaaggttacggcaaggcttttcagttataccgcaagcaattcatggaagagaacctttggaaaatgctgttggttttggcggttattttattggcgccgcggatcgtcaaaactgccgtaaaaatcgtcagggaggtcagagaagcatga

SEQ ID NO: 25642 - protein, 116 aa, Unknown
  Obtained from environmental sample
  misc_feature (1)..(116): Xaa is any amino acid
MTDYGEKINRALDEYHAGRYESSAEVWEEVLKMNGNYDLAYIGIGRAALRQGEYQKAMKYYKLKRFREGYGKAFQLYRKQFMEENLWKMLLVLAVILLAPRIVKTAVKIVREVREA

SEQ ID NO: 25643 - DNA, 816 bp, Unknown
  Obtained from environmental sample
  misc_feature (1)..(816): n is a, c, g, or t
ttggaaaatgctgttggttttggcggttattttattggcgccgcggatcgtcaaaactgccgtaaaaatcgtcagggaggtcagagaagcatgaacctcaaccaagtctggagggtgtcgaaccattgtaccgaaggtatgcggttcgcggtttccctcttgaaatacctgccggacaaagcctggtggcggcatctgggaaaaacattgcgttattcgctgtataccgccgttcatccttttgacggtttttgggatttaacccacgaaaaacgcggctcactggcggcggcgaatatcattgtcgccctggcggtactgattgatatattgcgctcaacgctgaccagtttccagtttgttacgattaacatggaggactttaacgcggttattgaaatgatgcggataatcctgccgattttcctgtgggttgtggcgaactggagccttactaccctgatggacggcaaagggcggatgattgatatttatatggctatcgcctacgccctggccccctcggtgattatcaacgccgtcatgatcatactcagccagtttataacatttgaagaaggcgcgatttactgggtgcttgcgggtttttcggtgttatggacaggtttattaattcttgccgcaatgatgatgattcacgattacagccttgttaaaaccgtgctttccagtttgttaaccgttgtgggaatgggagtaatggtgtttgtttttgtaatctttttcagccttgtaagcgacgcggtcgcgtattttatgtcgctgtataaagaaatattgttcagggtagtatag

SEQ ID NO: 25644 - protein, 271 aa, Unknown
  Obtained from environmental sample
  misc_feature (1)..(271): Xaa is any amino acid
MENAVGFGGYFIGAADRQNCRKNRQGGQRSMNLNQVWRVSNHCTEGMRFAVSLLKYLPDKAWWRHLGKTLRYSLYTAVHPFDGFWDLTHEKRGSLAAANIIVALAVLIDILRSTLTSFQFVTINMEDFNAVIEMMRIILPIFLWVVANWSLTTLMDGKGRMIDIYMAIAYALAPSVIINAVMIILSQFITFEEGAIYWVLAGFSVLWTGLLILAAMMMIHDYSLVKTVLSSLLTVVGMGVMVFVFVIFFSLVSDAVAYFMSLYKEILFRVV

SEQ ID NO: 25645 - DNA, 789 bp, Unknown
  Obtained from environmental sample
  misc_feature (1)..(789): n is a, c, g, or t
ttgatttgcctgtgttcctgcgtatggacattaaggaagatgggttacgaggttatagtaatcaacaataacccggaaaccgtctcaacggattttgacaccgcggacaggctttactttgagccgcttcacattgacgatgtgatgagcattatcgaaaccgagaaacccatcggcgttattgtcgcgttcggcggcggaacggcaatcaagctgacaaaaaaactttacgaccgaggcgtaagtataataggaacctgcgccgaaagcatagatatctgcgaagacagggaacgctttgacaaactgcttgaacaattacatgtgaaacgcccaaaaggtttcggcgtaatgacggaagagcaggcgctggatgccgccgataaactcggctacccggtgcttatgcgtccgtcctatgtgcttggcggtcagaacatgataatcgctttctcgcccgaagatatacgcgaatacatggaaataattcttcgttccaaacaggaaaaccccgtcctcatcgacaaatacctaagcgggcgagagattgaagtagacgcgatttgcgacggcgttgacaccttgatccccggtatcatggaacatattgagcgcaccggcattcattccggcgacagtatcgccgtttatcccgctttgaatattgaagacgaccttgccggaaaaatttttgagattacgaaaaaactctgcatggctttgaatgtccgcggccttgttaatattcaatatgtatattatgagaacgacatctatgtaattgagtaa

SEQ ID NO: 25646 - protein, 262 aa, Unknown
  Obtained from environmental sample
  DOMAIN (1)...(94): Carbamoyl-phosphate synthase L chain, N-terminal domain
  misc_feature (1)..(262): Xaa is any amino acid
MICLCSCVWTLRKMGYEVIVINNNPETVSTDFDTADRLYFEPLHIDDVMSIIETEKPIGVIVAFGGGTAIKLTKKLYDRGVSIIGTCAESIDICEDRERFDKLLEQLHVKRPKGFGVMTEEQALDAADKLGYPVLMRPSYVLGGQNMIIAFSPEDIREYMEIILRSKQENPVLIDKYLSGREIEVDAICDGVDTLIPGIMEHIERTGIHSGDSIAVYPALNIEDDLAGKIFEITKKLCMALNVRGLVNIQYVYYENDIYVIE

SEQ ID NO: 25647 - DNA, 660 bp, Unknown
  Obtained from environmental sample
  misc_feature (1)..(660): n is a, c, g, or t
atgtgcgaactcgccacaaaggcaagcgtcggcaaaactctggcggaactcgggttttcttcgggcattgcggaaatcccgccctatgtcgccgtaaaagtccctgtattttcgtttgagaagctgtccggcgtggacacccaccttggacccgaaatgaaatccacgggcgaagtgctggggctcggaaaaacccttgaggaagcgctttacaaagggcttctcgcggcggggtataagatggcgcggggcggcggggtgcttatcacggtccgggacagcgataaagcggaaatcataggtgtcgccgaaaaattcagcataaaccttggtttttctctgtacgcgacgagcggcacagcgaaactgctctcgggcaaaggcttcgatgtgactgctgtgcagaaaatacacgaatgcgccgacgaaaacacagcgacgctgcttgacagcggaaaaataaattatattatttcaacgtcggaaaaaagcagagacccgaacgccgacgatgtgaagatacgcagaaaggcgtgcgtgatgggtattccgtgccttacgagcatcgacacggcgaacgcgctggcggacagtcttctttcggggtacggcgaaatgaccgccgaaataatcgacataaaccgcatacacgctgtataa

SEQ ID NO: 25648 - protein, 219 aa, Unknown
  Obtained from environmental sample
  DOMAIN (98)...(187): MGS-like domain
  misc_feature (1)..(219): Xaa is any amino acid
MCELATKASVGKTLAELGFSSGIAEIPPYVAVKVPVFSFEKLSGVDTHLGPEMKSTGEVLGLGKTLEEALYKGLLAAGYKMARGGGVLITVRDSDKAEIIGVAEKFSINLGFSLYATSGTAKLLSGKGFDVTAVQKIHECADENTATLLDSGKINYIISTSEKSRDPNADDVKIRRKACVMGIPCLTSIDTANALADSLLSGYGEMTAEIIDINRIHAV

SEQ ID NO: 25649 - DNA, 453 bp, Unknown
  Obtained from environmental sample
  misc_feature (1)..(453): n is a, c, g, or t
atgaaaaaaaaggaagaacgtatttcttgttttatattggtgtttcccgccttatttttgtaccttgcggtgatggcttttccgacgtttttttccgtaatcctgagtttaaccaattattctggcgggaaggttttcggtaatccgaatgtcggtttcgcgggcctgaaggcctacaaggaaattcttaccgattcatatttctatatgtcgcttaaaaacaatatctggatagtgcttatttcggttttcggacagattccgctgggttttttcctcgcttacatattgtcccgaaagcttatccggagaacggatttttttcaatccatgatataccttcccaatgtcatatctaccgttatcattggtattctgttcagtaaattctttttaagttccaacagcgtatggctggagattcagcgtatgtttaatcctgccgcggaatag

SEQ ID NO: 25650 - protein, 150 aa, Unknown
  Obtained from environmental sample
  SIGNAL (1)...(26)
  misc_feature (1)..(150): Xaa is any amino acid
MKKKEERISCFILVFPALFLYLAVMAFPTFFSVILSLTNYSGGKVFGNPNVGFAGLKAYKEILTDSYFYMSLKNNIWIVLISVFGQIPLGFFLAYILSRKLIRRTDFFQSMIYLPNVISTVIIGILFSKFFLSSNSVWLEIQRMFNPAAE

SEQ ID NO: 25651 - DNA, 930 bp, Unknown
  Obtained from environmental sample
  misc_feature (1)..(930): n is a, c, g, or t
atgaccgtcgccaatacggtctccgatctgaagtggacattggataccttcaggaaaaacaatcntgatgtggaaatcgtaattgaaaatctgttcaacgaacctttccatcaaaaaacggaattttacgcggcggcggggcatcttcccgacgtactgtatgtgtggccgtccggaagatcgacctctctacaccggaataaactgctcaaggatttgggaccccttattgcgaaagacggcctgcagaatttctttctgccgatagcgatggatccgtcccagcaggtgtcaaaatatcaggcgatgattccctttaccataaccgtcagccacgttttttatataaacatggaagtgttggacgccttcggtctccagcccgcgcagaactatgaggaactgaaagcccaggtgccgatattgaaggccggggggtatgagacggtgattatgcccaataaggatacctgggttatgcagtcctgtctgttttccacggttgccgggcgtttctgcggggccggttgggaaaatgacattctcgccggcaaaacgaaatttaccgaccctgattttgtaaaggcgcttgattttatcaggacgctgtatgcggacggggtgctcgcgccttcttcgctgggtatggattacggcgacggcccgggcttattcgccgccaataaaggcgcgtactatatcgacggagactggcgggtaggctcttttatcaccgataaaagcacgggcaaggctctgatcagccctgatcggcaggtgaatttcagaatgaccgtattccctgacattgaagaggcaaagctcaataaatccacctccgttgttcttggaaccggctgggggatgagcgccgctattccggcaggttcggaaagagaagatgccgcgggcggcttatcaaatggctga

SEQ ID NO: 25652 - protein, 309 aa, Unknown
  Obtained from environmental sample
  misc_feature (1)..(309): Xaa is any amino acid
MTVANTVSDLKWTLDTFRKNNXDVEIVIENLFNEPFHQKTEFYAAAGHLPDVLYVWPSGRSTSLHRNKLLKDLGPLIAKDGLQNFFLPIAMDPSQQVSKYQAMIPFTITVSHVFYINMEVLDAFGLQPAQNYEELKAQVPILKAGGYETVIMPNKDTWVMQSCLFSTVAGRFCGAGWENDILAGKTKFTDPDFVKALDFIRTLYADGVLAPSSLGMDYGDGPGLFAANKGAYYIDGDWRVGSFITDKSTGKALISPDRQVNFRMTVFPDIEEAKLNKSTSVVLGTGWGMSAAIPAGSEREDAAGGLSNG

SEQ ID NO: 25653 - DNA, 1506 bp, Unknown
  Obtained from environmental sample
  misc_feature (1)..(1506): n is a, c, g, or t
ttgttggatcctactgatttaaaagagccgaaatgttcttcctgcggcggtactccgtccctgcaaaagacaaatcacctttacattgaccttcctgcggttagggaaaaattggaagaatggataaaaaccgcgtcagtaaaaggtttttgggcgaataacgccgtgcagatgacgcaggcttggatacgggacggtcttaaagaacgcgccattacaagagatttaaaatggggaatccccgttccaaaacccggttacgagaacaaagtgttttatgtctggtttgacgctccaatcggctatatttccataacgggaacgttaggtgaagaaaagggaaattggcgtgactttgtaaattattggtggaaaagcccgaatgagactgagctgtttcagtttataggaaaagacaatattccgtttcatacggtaattttcccctccagccttttgggaagcggcgaggactggacaatgttacaccacatgtccagcaccgagtaccttaactatgagaacggaaaattttctaaatcaagagggattggagtttttggcactgacgtaaaagagacgggaattcccgccgacgtatggcgtttttatatttactataacaggcctgaaaaatccgacgccatgtttacatggagtgactttaaagagaaagtaaacggcgaacttatcggtaatctgggcaacttggtaaaccgcacgctctcctttgttacgcgctactatgacggtataattcccgaaggaaagagcgatggcgcgttttgggcggaagtggtaagattggaaaactcaattacggaaaaacttgacagggcagagttacgtgacgcttttagggaaatttttgaattatcctcgtttgcgaacaaatattttcaggacaatgaaccgtggcggttgcgtaatgacgatcctgaaaaagcaaagtcagttatacgcgaccttacctacattgtccgcgacttgtcagtgttaatagagccttatatgccgagtgccgcggaaaaaatcgcctcatttttgggtcttaaacttaggagtaatcttaactggaaagacattggaaaagcggacggtatagggaatattaaaataaagagcgaaatactttttaacaaacttgaagatgaattaattgaaaccttacgcgtccgcttttcggggagccagaaagagaggcaggagagcgataatgcacaaactgcggtaagtaaacctttttcttccgtagtggatttacgtgtagcgaaaattgagaaaatagagaggcatccgaaagccgataaactttacattgaacagcttgaagtgggggagggtgttaccggaacgcgcgaagagcggacaattgtttccggccttgtgccgttctacaaagaagaagaattgcttggaaagaaaattattgtagcgtataacttaaaacccgcgaaactgcgcggcatgaatcgagggggatgcttctgccgctcggccatctga

SEQ ID NO: 25654 - protein, 501 aa, Unknown
  Obtained from environmental sample
  DOMAIN (259)...(441): Anticodon-binding domain
  misc_feature (1)..(501): Xaa is any amino acid
MLDPTDLKEPKCSSCGGTPSLQKTNHLYIDLPAVREKLEEWIKTASVKGFWANNAVQMTQAWIRDGLKERAITRDLKWGIPVPKPGYENKVFYVWFDAPIGYISITGTLGEEKGNWRDFVNYWWKSPNETELFQFIGKDNIPFHTVIFPSSLLGSGEDWTMLHHMSSTEYLNYENGKFSKSRGIGVFGTDVKETGIPADVWRFYIYYNRPEKSDAMFTWSDFKEKVNGELIGNLGNLVNRTLSFVTRYYDGIIPEGKSDGAFWAEVVRLENSITEKLDRAELRDAFREIFELSSFANKYFQDNEPWRLRNDDPEKAKSVIRDLTYIVRDLSVLIEPYMPSAAEKIASFLGLKLRSNLNWKDIGKADGIGNIKIKSEILFNKLEDELIETLRVRFSGSQKERQESDNAQTAVSKPFSSVVDLRVAKIEKIERHPKADKLYIEQLEVGEGVTGTREERTIVSGLVPFYKEEELLGKKIIVAYNLKPAKLRGMNRGGCFCRSAI

SEQ ID NO: 25655 - DNA, 387 bp, Unknown
  Obtained from environmental sample
  misc_feature (1)..(387): n is a, c, g, or t
gtgatgttttctggcagtgctgaacttgcgaaaattgctctgcgcaatttggctaggcataaggtaaaaaccgtgctaacagtgcttgcaataacggtgagttcagcattttatatatttgtggatagctggattgcaggaatgagcatagaatctaggcgcaatattgtgaactacgaaatgggtgcggctaaaattcaaactaaactctattttgaaaaaaaagacgaacttcctagttatgaaaattttgcgaattgggaaatttataaagaaattttagacaaggcntggttattatgccgctcctcgctttgttttttctggaactctttactccgagggtgcctctgcgcctgtactttcatgcgtgatcccccgcgataa

SEQ ID NO: 25656 - protein, 128 aa, Unknown
  Obtained from environmental sample
  misc_feature (1)..(128): Xaa is any amino acid
MMFSGSAELAKIALRNLARHKVKTVLTVLAITVSSAFYIFVDSWIAGMSIESRRNIVNYEMGAAKIQTKLYFEKKDELPSYENFANWEIYKEILDKAWLLCRSSLCFFWNSLLRGCLCACTFMRDPPR

SEQ ID NO: 25657 - DNA, 495 bp, Unknown
  Obtained from environmental sample
  misc_feature (1)..(495): n is a, c, g, or t
atgttcgtgggcagttccaatacgggaaatatgtcaaagcagcaactggctttgctcaggcggcaaaatataggttttatttttcaggcgtataatttgattcccgtgttgtctgtggaagagaatatttcttttcctcttacattgctcggtattgataaaaaagatattaaagaacgcacagcgaaaattctgcgagatgttggacttgaagatatggcaaaacgccgcccaaaagaaatgtctggtgggcagcaacagcgtgttgccattgcccgtgccttggtgaaaaagcccgcgcttattttagcagacgaacccacagcgaatttggattccgcaactggcaaagaaattcttgaactgatgctctctctcaataaaaccgaaggctgcacatttatcttttccacgcacgaccaaatggtaatggattacgctcgccgcattgtgcgtattagagatgggcaaatagaaagcgatgaggttaagtga

SEQ ID NO: 25658 - protein, 164 aa, Unknown
  Obtained from environmental sample
  DOMAIN (1)...(156): ABC transporter
  misc_feature (1)..(164): Xaa is any amino acid
MFVGSSNTGNMSKQQLALLRRQNIGFIFQAYNLIPVLSVEENISFPLTLLGIDKKDIKERTAKILRDVGLEDMAKRRPKEMSGGQQQRVAIARALVKKPALILADEPTANLDSATGKEILELMLSLNKTEGCTFIFSTHDQMVMDYARRIVRIRDGQIESDEVK

SEQ ID NO: 25659 - DNA, 330 bp, Unknown
  Obtained from environmental sample
  misc_feature (1)..(330): n is a, c, g, or t
gtggaaaagataaatgtgcagccttcggttttattgagagagagcatcagttcaagaatttctttgccagttgcggaatccaaattcgctgtgggttcgtctgctaaaataagcgcgggctttttcaccaaggcacgggcaatggcaacacgctgttgctgcccaccagacatttcttttgggcggcgttttgccatatcttcaagtccaacatctcgcagaattttcgctgtgcgttctttaatatcttttttatcaataccgagcaatgtaagaggaaaagaaatattctcttccacagacaacacgggaatcaaattatacgcctga

SEQ ID NO: 25660 - protein, 109 aa, Unknown
  Obtained from environmental sample
  DOMAIN (32)...(70): Protein of unknown function (DUF1602)
  misc_feature (1)..(109): Xaa is any amino acid
MEKINVQPSVLLRESISSRISLPVAESKFAVGSSAKISAGFFTKARAMATRCCCPPDISFGRRFAISSSPTSRRIFAVRSLISFLSIPSNVRGKEIFSSTDNTGIKLYA

SEQ ID NO: 25661 - DNA, 753 bp, Unknown
  Obtained from environmental sample
  misc_feature (1)..(753): n is a, c, g, or t
gtgtttattttgacattttgcatacgcaaaaataacgaatgggaacgagccattgttcttcgcttcggtaagtttcaaaaggttaggggaccggggctgtttttccttctgcctgtcgccgaccgtgtcgcccaaacagtcgatatacgaatcagggtttcggatttttccgctcagaaaactttgacgggcgattccgttaccgtcgatgttgacgcaatatgtttctggcttgtatgggacccgcaaaaagcggttcttgaagttgagaattatattgacgcggtggtgtactcttccaagactgcgctccgtaacgccgtttcaagccatgatctttccacttttcttgaacgcagtgatgtaattgaaaaacaaattcaggaagaagttgataaaaaaaccaccgattggggaataactgttcttcatatcgagattacggatattcagataccagaacccttacaagattcgctttcgcgtgtcgcgcaggcggaaagggaaaagaaggggcgtattcttcttgcggaagcggaaattgaaattgccaagaaactggaagaggcgattactatttatgccaaaaatgaaggagcgatgaaactcaaggtactttctattttgaatgaaggcttaaaagcgggtaactctatgatgcttgtgcctaatacgataacagaggaattaaaaacaaaagatgtttttggtctgcaagcgttaaatgaaattaagaaggaggcgaataaatga

SEQ ID NO: 25662 - protein, 250 aa, Unknown
  Obtained from environmental sample
  DOMAIN (7)...(181): SPFH domain / Band 7 family
  misc_feature (1)..(250): Xaa is any amino acid
MFILTFCIRKNNEWERAIVLRFGKFQKVRGPGLFFLLPVADRVAQTVDIRIRVSDFSAQKTLTGDSVTVDVDAICFWLVWDPQKAVLEVENYIDAVVYSSKTALRNAVSSHDLSTFLERSDVIEKQIQEEVDKKTTDWGITVLHIEITDIQIPEPLQDSLSRVAQAEREKKGRILLAEAEIEIAKKLEEAITIYAKNEGAMKLKVLSILNEGLKAGNSMMLVPNTITEELKTKDVFGLQALNEIKKEANK

SEQ ID NO: 25663 - DNA, 867 bp, Unknown
  Obtained from environmental sample
  misc_feature (1)..(867): n is a, c, g, or t
atggagaaagaaataatgaaagcacaattccataaaatcgcattagcagcagccctcacgctcgccaccgcactcgccctttcctgttccggtggcgatgacggtggaggaaacggcaatacgaacggcagttccgtggaatcttccagcagcaatgacgatagcagttcttctcaaccgcaggacaacatttcttccagcgaaacaccgttttcgtctagcagtggcggcgaaatcataaagaaatccaaaatcagcggtgttttccaaaagggaccattcatcgcgggcacaacagccacattgaacgaattggacaacgaactgaaccccacaggtcgcccgtatcaaacgctgattacggatgacaaagggacattcgagcttaggaatgttgaattagtttcgccctacgctcacctgattgcaagcggcttttaccgcaacgaggtgacaggcaataaatccgccgctcccataactttgcaggcgattgtggacttgagagacagggataacgtgaatgtgaatattctcactcatcttgaatactaccgagtgcttgatttggttgatgggggaatgactgtgaaagcagccaagaagcaagcccagaaggagatatttgcggtattcggcatagacagcgattctttcaaggatagcgaggatatgaccatattcggcactagtgagagcgatgcggctttgcttgccgtttccattctgttgttgggtgatttgagcgaggcggacttttcacagagacttatgaatttcgctcaaggtcttagagcgggcggaggttgggataatgaggctgagaagcaggcgatggcgggatggggttacaggcgggagcaataa

SEQ ID NO: 25664 - protein, 288 aa, Unknown
  Obtained from environmental sample
  SIGNAL (1)...(28)
  misc_feature (1)..(288): Xaa is any amino acid
MEKEIMKAQFHKIALAAALTLATALALSCSGGDDGGGNGNTNGSSVESSSSNDDSSSSQPQDNISSSETPFSSSSGGEIIKKSKISGVFQKGPFIAGTTATLNELDNELNPTGRPYQTLITDDKGTFELRNVELVSPYAHLIASGFYRNEVTGNKSAAPITLQAIVDLRDRDNVNVNILTHLEYYRVLDLVDGGMTVKAAKKQAQKEIFAVFGIDSDSFKDSEDMTIFGTSESDAALLAVSILLLGDLSEADFSQRLMNFAQGLRAGGGWDNEAEKQAMAGWGYRREQ

SEQ ID NO: 25665 - DNA, 732 bp, Unknown
  Obtained from environmental sample
  misc_feature (1)..(732): n is a, c, g, or t
atgctgtttgtgaaaaataacgacttgttgaaacaactcgtcagcgaattgttggaaatacagcttgaaagcataggagaattccaaataaccaaccccgaaatgccgcctgaaatcattggcggcaagttttgcaggcttgacatactcatgaccgtcaacggacaaccggtggacttggagatacaagtcaaaaacgaaggggactaccctgccaggacgctatacaactgggcaagggtatattccaccgcattgcctgcaggcggagcttacaaaaatttaccgcggacggtgataatcagcataatagatttcgacctgtttgaatgtaaggaatattattcggagtttcaggcgcttgaagtaacgcggcacactgcgctgacggacaaaatgagtttgtatttctttgaattgaacaaactgcccttggagttcggggcggataatatgcgtctattgtggttgaagttgttcaaagcggatactgaagaggaattggcaaagattaaatcaatgggggtaccgataatggaacaggcgataaaggcgtatcatcagataacggcggatccggaattccgagaactggagcggatgagagaaatagccaggcacaacgaggcttcggcgttgagccatgcgcgggacgaagaaaaactcgaaattgccaggaagatgaaggcaatggggttttccgacgaacagatacaaactgtaaccagatga

SEQ ID NO: 25666 - protein, 243 aa, Unknown
  Obtained from environmental sample
  misc_feature (1)..(243): Xaa is any amino acid
MLFVKNNDLLKQLVSELLEIQLESIGEFQITNPEMPPEIIGGKFCRLDILMTVNGQPVDLEIQVKNEGDYPARTLYNWARVYSTALPAGGAYKNLPRTVIISIIDFDLFECKEYYSEFQALEVTRHTALTDKMSLYFFELNKLPLEFGADNMRLLWLKLFKADTEEELAKIKSMGVPIMEQAIKAYHQITADPEFRELERMREIARHNEASALSHARDEEKLEIARKMKAMGFSDEQIQTVTR

SEQ ID NO: 25667 - DNA, 747 bp, Unknown
  Obtained from environmental sample
  misc_feature (1)..(747): n is a, c, g, or t
atgcagaatatttccgtggatataatcggcgttgataccccgctggacaattacaaaattctctttgccccaattctttacatggttaagccgggcttcgccgacaggctgaaagggttcgtcgagcggggcggcacgctggtaacgacttatttttccggcatggccgatgaaaatgacctggtaacaacggcgggttatcccggcgaactgagaactctctgcggcctgtgggtggaagaaaccgacgctttgccggaaggccaggccaacaagctgaactgttcagacggcccctggtcaggcagcctgttggaaggaagctggaaagcggacttgctctgcgacattatcagaactgagggcgccgaaaccgtcgcccgttacgcggaagatttttacgccggaacccccgccatctgcagaaacaggtacggcaagggccaggtctggtacctgggctcgcgtccccaggcgaaattcctgtaccgctttgtcaccttaacttgcggcgaactcggcataacgccggtatttccaccgcaggaatggcttgaggcgacccgccggataaagggagaaaaggaatttatttttgtgctgaatcacaacaagggcgacgcggaaataaccattccgttcgcctgccgggacttgctgacaaataacgcttttaccgcgggcgagcgttattcgcttcctgttgcgggggtgatgattttggaaataattaggaatgaggagtga

SEQ ID NO: 25668 - protein, 248 aa, Unknown
  Obtained from environmental sample
  DOMAIN (184)...(243): Beta-galactosidase C-terminal domain
  misc_feature (1)..(248): Xaa is any amino acid
MQNISVDIIGVDTPLDNYKILFAPILYMVKPGFADRLKGFVERGGTLVTTYFSGMADENDLVTTAGYPGELRTLCGLWVEETDALPEGQANKLNCSDGPWSGSLLEGSWKADLLCDIIRTEGAETVARYAEDFYAGTPAICRNRYGKGQVWYLGSRPQAKFLYRFVTLTCGELGITPVFPPQEWLEATRRIKGEKEFIFVLNHNKGDAEITIPFACRDLLTNNAFTAGERYSLPVAGVMILEIIRNEE

SEQ ID NO: 25669 - DNA, 705 bp, Unknown
  Obtained from environmental sample
  misc_feature (1)..(705): n is a, c, g, or t
ttgtatacggaaacattccgttcgatatacaagcgtcttgcccccccgcagattcactccaacggaacaatccgcgagtggaacgaggaatacgaggaagccgaaccgggccaccgtcatttttcccatttgtgggcgctctggcccggcggcgaaatcaccccggatgaaacgcccgggcttgccggggccgcccgtaaaactcttgaacgccgcctgtcccacaacgggggccataccggctggagcagggcatggctggttaatttctttgcgcgtctgaacgacggagaggccgcgctggaaaacctcaacgccatattcggcgaatttaccctgcccagccttttgaacaacggccctcctttccagatagacggcaacttcggcgcgctggcgggaataacccagatgctggtccaaagccgcgtccgttacaacagcgcgaacgccgccgctcttgcgcttgatttacttcccgccctgccgcgaagctggccttcaggccgtctgaaaggggcgcgggtcaagggaaatatggaactcgatcttgaatggcgaaacgggaagcttacctcgcttgttatacgcaataatgagaaagaggcaattcctgtcttaatccgcgccggagacaaatcgcgcgaaatgatactgaaacccggggaaacatgtataaatgaggagttaggaattaggaattag

SEQ ID NO: 25670 - protein, 234 aa, Unknown
  Obtained from environmental sample
  misc_feature (1)..(234): Xaa is any amino acid
MYTETFRSIYKRLAPPQIHSNGTIREWNEEYEEAEPGHRHFSHLWALWPGGEITPDETPGLAGAARKTLERRLSHNGGHTGWSRAWLVNFFARLNDGEAALENLNAIFGEFTLPSLLNNGPPFQIDGNFGALAGITQMLVQSRVRYNSANAAALALDLLPALPRSWPSGRLKGARVKGNMELDLEWRNGKLTSLVIRNNEKEAIPVLIRAGDKSREMILKPGETCINEELGIRN

SEQ ID NO: 25671 - DNA, 456 bp, Unknown
  Obtained from environmental sample
  misc_feature (1)..(456): n is a, c, g, or t
atgaagtcaataactttatatcatccgaacacatttcacaacgcgctgaacgattttaacaggtattttgattcgttctttgtagattcaattctgtctccggaagaaagggttttatactattcgcccgctgtagatattcaggaaaatgaaaacagctatatcatgaagatggagcttcccggttttaatgaaaaaaatatcgaggttaatgtcgacggcccttacctgagcataatttccagacaagaagaaaaaaaggagaaaaaggccgaagaagacggaaaatacattctgcgggaaagagggaacactaccttcaaccgttccttccaactgcccggaaacgccgacccgcttgcaataagcgcggtatttaaggacggcatcctaagcttagacataaaaaaacgcgcggagtcgaagaggagaataattgaaattaacgtagcgtga

SEQ ID NO: 25672 - protein, 151 aa, Unknown
  Obtained from environmental sample
  DOMAIN (46)...(149): Hsp20/alpha crystallin family
  misc_feature (1)..(151): Xaa is any amino acid
MKSITLYHPNTFHNALNDFNRYFDSFFVDSILSPEERVLYYSPAVDIQENENSYIMKMELPGFNEKNIEVNVDGPYLSIISRQEEKKEKKAEEDGKYILRERGNTTFNRSFQLPGNADPLAISAVFKDGILSLDIKKRAESKRRIIEINVA

SEQ ID NO: 25673 - DNA, 1041 bp, Unknown
  Obtained from environmental sample
  misc_feature (1)..(1041): n is a, c, g, or t
gtgagcaacgtcatagcccaaacaataatctcgccctttgactcggcagtacgcataaatggtcgctttgcaaaagaagtaggcgaaaaaaatgtcactgccagagcttcgttttccggcgttgagtttatcatcgcttttgaaggaacagaggcaagcgttttgctgaaaagccctggcaatgtgtttagcgtggctttggacgggaagcagatgccgcctcttgatttatcggcaagtcgcgaggaaaaacatctcatagcaaaaaatcttgcaaaaggaattcatataatcagcgttgccaaacgcacggaatctgcgcagggcgatgttcttttcagaggatttgaaataaaaggcgttcctaaaaaagaagcattgccgcaaaagccaaaactcaagattgaatttttaggaaattccataactgcgggctacggagttttggactcggtaaaggaacattcctattcccccataacacaagatgtgttttcgtcttatgctggggttgctgcgagggaactcaaagcggagatgcgagcggtggcgttttctggcagggggcttttccgcaaccatcccgcttctgaagacagccgcactttgccggattttttcccgtatataagcgtgaacgcaaaaatcccgtgggatttttcttggcaacccgacattgctgtcattgagcttgggacaaatgattttgccatgagcgcaccggattccgcagggtttgtcaattcagcggtaaagttcgcaaagcagattagagaaaaatatcccaaagccaaaataattataacagacggtccaatgctaaacgatttttggcccgaaggcgttccaagtttaaccctttgcagaaaattcttggatgcggcaaagagcgaactagcaaaacaaaacatctcggttcacagattttcgttttctcctcaagacggctcgcttggctatggtgcggattggcatccgagcaaaaggcaggcggagaagaatgggaaggagttagcggagtttttattttctatattttaa

SEQ ID NO: 25674 - protein, 346 aa, Unknown
  Obtained from environmental sample
  DOMAIN (135)...(338): GDSL-like Lipase/Acylhydrolase
  misc_feature (1)..(346): Xaa is any amino acid
MSNVIAQTIISPFDSAVRINGRFAKEVGEKNVTARASFSGVEFIIAFEGTEASVLLKSPGNVFSVALDGKQMPPLDLSASREEKHLIAKNLAKGIHIISVAKRTESAQGDVLFRGFEIKGVPKKEALPQKPKLKIEFLGNSITAGYGVLDSVKEHSYSPITQDVFSSYAGVAARELKAEMRAVAFSGRGLFRNHPASEDSRTLPDFFPYISVNAKIPWDFSWQPDIAVIELGTNDFAMSAPDSAGFVNSAVKFAKQIREKYPKAKIIITDGPMLNDFWPEGVPSLTLCRKFLDAAKSELAKQNISVHRFSFSPQDGSLGYGADWHPSKRQAEKNGKELAEFLFSIF

SEQ ID NO: 25675 - DNA, 672 bp, Unknown
  Obtained from environmental sample
  misc_feature (1)..(672): n is a, c, g, or t
ttgtgcggcgacacaattgagttgctggcaacggtgttgtttggcgaggaaaatcctcctgctatggaagtacctcctgtcaaggttgcaccccctgttaaagtaaaacttgaacctccaagcggcactttcactgacccaagagacggcagggtatataaaaccgtaaaaataggcgagcaagtttggatggcggagaatttggcttataatgagcctggcagcaaatgctacaaaaatgatgaaagcaacggcaaaaaatatggaaggctatataactgggacgcagctatgaaaatctgccccaaaggttggcatttgccaagcaatgaggaatggcaaactcttgttgatttcgcaggtggcgaggaaatagctggaaagaaactaaaagcaaaaagcggttggaaagatggtttcgatggaaaatctggcaacggtacggatgagtttggattttcggctttgcctggcggcaacggtaattccgatggcattttctacacaatcggcgatgaaggttactggtggagctctagtgagagtggtagctataatgcctatgctcggactatgagcagctactacgaggacacctactacagaagtaacgctaagggcttcttgcgaagcattcgttgcgtgcaagattcacaacctaggaaaaactaa

SEQ ID NO: 25676 - protein, 223 aa, Unknown
  Obtained from environmental sample
  misc_feature (1)..(223): Xaa is any amino acid
MCGDTIELLATVLFGEENPPAMEVPPVKVAPPVKVKLEPPSGTFTDPRDGRVYKTVKIGEQVWMAENLAYNEPGSKCYKNDESNGKKYGRLYNWDAAMKICPKGWHLPSNEEWQTLVDFAGGEEIAGKKLKAKSGWKDGFDGKSGNGTDEFGFSALPGGNGNSDGIFYTIGDEGYWWSSSESGSYNAYARTMSSYYEDTYYRSNAKGFLRSIRCVQDSQPRKN

SEQ ID NO: 25677 - DNA, 942 bp, Unknown
  Obtained from environmental sample
  misc_feature (1)..(942): n is a, c, g, or t
atgcgttttagagtgataaaatatgtcctgctcatcttagcgcttgctttcacctgcgcgtgcaagaacaaatcaataggctccgtggaaagggaagaacttttttctttggaaataggccctatggaagatcaaatagccctttacaaactggaaggaaacatgggcattaaacgcacaggttttacaatgagagatgggttgttttacattgccgacggaaacgccggaaaaattgtcaggtataactcctacggcgatttactgttcatgatatataacgaggaaacaaatccggcccctattaccttaaagacaaatatttcgggagaagaacagacgacaagatgggcgtatacacatgagcttgacgcgcccggctggattacagtggattcccgcaggcatatttttgtcgaagacaggtttgcggcgcagttttaccgcaccgatcccgaaaccaaggttgttcttgacgggataattcttcattttgatcaggacggccgttatatcaattatctggggcgcgaaggaataggcggcagtcctttccccaggattgtaggccttactacttcggcaaaagacgagcttgccgttatctgccggattcccgacggctggaacgtgtactggttcaacgcgtcgggagtgcttctgtatttggtaaaaatcgcgaccgaggcgattcccgcttatcccgactggccgcaagccataaccgcggtagaccatgtcgccgccgctgtagacgcgcggaaactttttattaaaacggactacagccgcgatacctttgatcaattgacaaatacccggacaggccctgagcctatcagttccattatctggattctggacattgaagacggcacttattctggctcaatagaagtcccgctttttgaatatccgaaaaccacgttccgccggttttag

SEQ ID NO: 25678 - protein, 313 aa, Unknown
  Obtained from environmental sample
  SIGNAL (1)...(23)
  misc_feature (1)..(313): Xaa is any amino acid
MRFRVIKYVLLILALAFTCACKNKSIGSVEREELFSLEIGPMEDQIALYKLEGNMGIKRTGFTMRDGLFYIADGNAGKIVRYNSYGDLLFMIYNEETNPAPITLKTNISGEEQTTRWAYTHELDAPGWITVDSRRHIFVEDRFAAQFYRTDPETKVVLDGIILHFDQDGRYINYLGREGIGGSPFPRIVGLTTSAKDELAVICRIPDGWNVYWFNASGVLLYLVKIATEAIPAYPDWPQAITAVDHVAAAVDARKLFIKTDYSRDTFDQLTNTRTGPEPISSIIWILDIEDGTYSGSIEVPLFEYPKTTFRRF

SEQ ID NO: 25679 - DNA, 384 bp, Unknown
  Obtained from environmental sample
  misc_feature (1)..(384): n is a, c, g, or t
ttgacacaatacgcgttcgtaaatgacatataccttgacatggaaagtgtcatcaacgaaatcttaccacgttctttacaacacatctttgcgaacctcccccaagcgaaggtgtatgaaattcgactccggtccgcttgtccacccatcgtggtggtcgcgggtcggagtttttatttgggggcaaatggtttaacaaatgacccatctgccgccattcgcgtaacgaaaaccgatttggaaaccattgttttcaaagcaagcgattattcggtttacgccgtaaatgagcaacttaaatccggtttcataaccattcgtggcggtgtccgtatcggcatatgtggcgaggtggttcatgaaaacggtgtcgtttcaccataa

SEQ ID NO: 25680 - protein, 127 aa, Unknown
  Obtained from environmental sample
  misc_feature (1)..(127): Xaa is any amino acid
MTQYAFVNDIYLDMESVINEILPRSLQHIFANLPQAKVYEIRLRSACPPIVVVAGRSFYLGANGLTNDPSAAIRVTKTDLETIVFKASDYSVYAVNEQLKSGFITIRGGVRIGICGEVVHENGVVSP

SEQ ID NO: 25681 - DNA, 687 bp, Unknown
  Obtained from environmental sample
  misc_feature (1)..(687): n is a, c, g, or t
ttgaccgtgcgaaatccgactaacgggcaggaagtggcattctcccttcaactcctcctgctgctcaccgtgctgtcgctcgcgccgagtatcatcatcctgatgaccagtttcctgcgcgtttccattgtactggattttatcaaacgggcgctttcccttcagcaggttcctccaaaccaggtaataatgggggtgtcgctgtttctgactgttcttataatgtggcctacattctcggcaatttatgaaagatccatacagcccctctccgccggtgaaattaacgtggcaacagcttaccgtgaagcggaagcccctttaaggcttttcatgttcaaccagatgagaagccggaccagggggataaacagtggtgaacaaaatattctgctgtttatgagaatgcgggggttaagccagcccaataatcttgcggatatccctacctatgtgctgatccccgcgtttatactgaacgaattaacaatagcgttcaagataggaataatgctctttattccttttatcgttattgacatggttgtagcgagcgccctcatgtcaatgggcatgatcatgcttccgcctgtaatgatttcgatgccgttcaaattgatcctgttcattttgattgacggctggactctgttaactgaacagcttgttcgttcatttattttttag

SEQ ID NO: 25682 - protein, 228 aa, Unknown
  Obtained from environmental sample
  DOMAIN (21)...(223): FliP family
  misc_feature (1)..(228): Xaa is any amino acid
MTVRNPTNGQEVAFSLQLLLLLTVLSLAPSIIILMTSFLRVSIVLDFIKRALSLQQVPPNQVIMGVSLFLTVLIMWPTFSAIYERSIQPLSAGEINVATAYREAEAPLRLFMFNQMRSRTRGINSGEQNILLFMRMRGLSQPNNLADIPTYVLIPAFILNELTIAFKIGIMLFIPFIVIDMVVASALMSMGMIMLPPVMISMPFKLILFILIDGWTLLTEQLVRSFIF

SEQ ID NO: 25683 - DNA, 759 bp, Unknown
  Obtained from environmental sample
  misc_feature (1)..(759): n is a, c, g, or t
atgacagacggcgcgattttgcagaacattcttaattttggccccgtgtttttgctgatcgcggccagagccatcgccatgatagaaacggcgccgctcctgtcttcggacgccattccacaggtcgccaaaatctccctcgccggttttgcggcctttgccgtgctgcccaacgccggcgttttcgccgcggagcttacagcggccggggcggcgggcgtcagcggggtaggcgcggtaaaccttcccggcgccggcgtgttaagcgatttgcgctacgagccgttcagcctgcgcttcctgcttttgcttgttggcgagggcattataggcataataatcggcttttacctgacgatcatcttcgcgaccttttccacggccggccagtttttctccctgcaaatgggcctgggcgcgtctgaaacattcgaccccctggctcagattgaaaaccccttgatgggccaatactttaaccttgtttccatgctggtctttcttgtcataggcggtttcagggaactgtttctgggcggtttttggcgttcaattcagagccttaatttcgcaatgcttgttgagggcagggaacatgttatcaggatgatggcgtcggggcttgccaagatgttccttgacgcgatggttatatcccctgcgattctcggaacgctttttttaacatcgctttcaaccggccctatatccaaagccgcgccccagatcaacatacttttccgaaggcctcccccatag

SEQ ID NO: 25684 - protein, 252 aa, Unknown
  Obtained from environmental sample
  DOMAIN (8)...(248): Bacterial export proteins, family 1
  misc_feature (1)..(252): Xaa is any amino acid
MTDGAILQNILNFGPVFLLIAARAIAMIETAPLLSSDAIPQVAKISLAGFAAFAVLPNAGVFAAELTAAGAAGVSGVGAVNLPGAGVLSDLRYEPFSLRFLLLLVGEGIIGIIIGFYLTIIFATFSTAGQFFSLQMGLGASETFDPLAQIENPLMGQYFNLVSMLVFLVIGGFRELFLGGFWRSIQSLNFAMLVEGREHVIRMMASGLAKMFLDAMVISPAILGTLFLTSLSTGPISKAAPQINILFRRPPP

SEQ ID NO: 25685 - DNA, 1212 bp, Unknown
  Obtained from environmental sample
  misc_feature (1)..(1212): n is a, c, g, or t
ttgtctatctggcatgtgtacgaaagaacgattgaatatgtgatttttaattacaatacctgtatcgcctattcaaaaccaatctcctcgatattgatggaagactttaaagctatccgtccgaaatggatggcttctgttccccgcgtatgggaagcaatcatggacggcattaacagaaacatcagggcgaaaagcggctttaccaaaaaactgttcgatatcgccgtttccatatcgatgatgttcacgcattttagagacctcactttcgggttactgcctaattttcacggacgcgtccgttttatagattctattatcggatttttaccgtgggttttgcttcttcctttcagggggcttgcccagctcatagtattcaataaaatcgcgcacgaattcggcggacgttttaaagccggactttcaggcggcggttctttgcccgcaaaggtcgatttattttttaattcgattggtctgcgcctgcaagaagtttacggtcttacggaatccgctccctttattacggtacggcggtacaaacattcacggcgcggaacgatagggcagctgcttcccaatacatacgcaaaaataatagacgaaaagggaagagttatgcctcccggcagaaacggaattatctatgtaaaaggcgaacaggtaatgaaaggttactacaaaaagcccgaagtcaccgccgccgttttaagcgaagacggctggttcaacacgggcgacattggaatgctgactcatgacaatgaaatccgtataaccggcagagcgaaagacaccattgttttaagaggcggcgaaaatgtcgagcctgttccgattgagtgcagacttagagaaagcccatatatccaacagtgcatggtagccgggcaggatcaaaaatatctcgtggtaattatcattccttggcagcagtctattatggatttcgccgaagaaatatcgatccccattgtcgattacgagttactgcttcaacaacctgaaattatcgagcttatttccagcgaggtttctaaccgcataagcgcaaaaaacggttttaagtcctatgaaagaataaacaagtttatcttaaaatcaaaaccctttgaaccgggaaaagaactttccgccaagggcgagttaatccgccgcaacatcatggacttatacggaaaagacatcaacaagctgttcaagtag

SEQ ID NO: 25686 - protein, 403 aa, Unknown
  Obtained from environmental sample
  DOMAIN (1)...(297): AMP-binding enzyme
  misc_feature (1)..(403): Xaa is any amino acid
MSIWHVYERTIEYVIFNYNTCIAYSKPISSILMEDFKAIRPKWMASVPRVWEAIMDGINRNIRAKSGFTKKLFDIAVSISMMFTHFRDLTFGLLPNFHGRVRFIDSIIGFLPWVLLLPFRGLAQLIVFNKIAHEFGGRFKAGLSGGGSLPAKVDLFFNSIGLRLQEVYGLTESAPFITVRRYKHSRRGTIGQLLPNTYAKIIDEKGRVMPPGRNGIIYVKGEQVMKGYYKKPEVTAAVLSEDGWFNTGDIGMLTHDNEIRITGRAKDTIVLRGGENVEPVPIECRLRESPYIQQCMVAGQDQKYLVVIIIPWQQSIMDFAEEISIPIVDYELLLQQPEIIELISSEVSNRISAKNGFKSYERINKFILKSKPFEPGKELSAKGELIRRNIMDLYGKDINKLFK

SEQ ID NO: 25687 - DNA, 636 bp, Unknown
  Obtained from environmental sample
  misc_feature (1)..(636): n is a, c, g, or t
gtgcccgaaaccacgcccgccgacaccaagccgctgctcgacaccgacgctatgtcgctgttgctgctcgtccaagtgacatttttgtttgtggcgttgccgggctgtattgtcgccgtgagttgctcctggctccaccccaccaacgacatcgtcgtcttgttgaggctcacgccgctcaccaggacaggcgtcaccgtcaccgcgcattgcgctattttgttgccgtcctgtgtcttgaccgttatgcccgttatgcctgcgctcagtgccgtgacgaggccgctgttcgacaccgtggccacggcggtgttgctgcttgtccaactgacggtctggtttatggcgttgctgggctggattgtggccacaagctgttcttggtcgcccgcgtttatcgtcgtctccgacttgttcagactgacgccggtcacagagatcgtttccaccgtgaccgcgcactgcgccttccagtcgccgtcatgtgtgatgaccgttattagcgccgtgccgacggccacggccctgaccaggccgtcgaccgacaccgtcgccacggcggtgttgctgcttgaccaagtgacgggcctgtacgtcgcgttgcttggctggattgtcgccgtgagttgttcttga

SEQ ID NO: 25688 - protein, 211 aa, Unknown
  Obtained from environmental sample
  misc_feature (1)..(211): Xaa is any amino acid
MPETTPADTKPLLDTDAMSLLLLVQVTFLFVALPGCIVAVSCSWLHPTNDIVVLLRLTPLTRTGVTVTAHCAILLPSCVLTVMPVMPALSAVTRPLFDTVATAVLLLVQLTVWFMALLGWIVATSCSWSPAFIVVSDLFRLTPVTEIVSTVTAHCAFQSPSCVMTVISAVPTATALTRPSTDTVATAVLLLDQVTGLYVALLGWIVAVSCS

SEQ ID NO: 25689 - DNA, 435 bp, Unknown
  Obtained from environmental sample
  misc_feature (1)..(435): n is a, c, g, or t
ttgtccaatgctatgcccgtcacggggacattagtcactgtcaccgtgcattgcgccgttttgttgctgtcctgcgtggtcacttttattgtcgcggtgcctacgcccgcgcccgtcaccaagccgctgtccgacaccctggctatggcgttgttgctgctagaccacgaaacggctttgttcgtcgcgttgtcaggctggatggtggccgtcaactgctcctggtttgaccccgccagcgtcatcgttgttttgtctaggctcacgccagtcacgggcaccggcgtcaccgtgacagcgcactgcgccgtcttgccgccctgctgggtcgtcgccgttatcgtcgccgtgcccacgctcaccgttgtgacgaggccgctgtccgacaccgtcgccacggcgctgttgctggttgaccaagtgacggatttgtag

SEQ ID NO: 25690 - protein, 144 aa, Unknown
  Obtained from environmental sample
  misc_feature (1)..(144): Xaa is any amino acid
MSNAMPVTGTLVTVTVHCAVLLLSCVVTFIVAVPTPAPVTKPLSDTLAMALLLLDHETALFVALSGWMVAVNCSWFDPASVIVVLSRLTPVTGTGVTVTAHCAVLPPCWVVAVIVAVPTLTVVTRPLSDTVATALLLVDQVTDL

SEQ ID NO: 25691 - DNA, 489 bp, Unknown
  Obtained from environmental sample
  misc_feature (1)..(489): n is a, c, g, or t
ttgtttgccgcgctgactgcgttaaagccgctggccgccacattcaccgtgcattttgccgttttgttgccgtcctgggtcgtaaccgttatttccgccgtgccgatgctcttgcctgcgacaagaccgacaaggcccacgcccgacaccgacgccacagcattgttgctgctcgtccagacgagcgtctggtttgtggcgttgctaggcaggattgatgccgtaagctgctcttggtcgccaacgctcaccgacatcatggccttgtccaggctcacgccgcccaccgccaccgttgtcactgtcaccgcgcattgcgccgtcttgttgccgtcctgcgtcgccgcggttattagcgccgtgcccccacccacgccggtgacgaggccgtcgtttgacaccgtcgctatggcgttgttgctgcttgtccagccaacgtttttgtttgtcgcgttggctggctggatcgtcgctatgagctgttcctga

SEQ ID NO: 25692 - protein, 162 aa, Unknown
  Obtained from environmental sample
  misc_feature (1)..(162): Xaa is any amino acid
MFAALTALKPLAATFTVHFAVLLPSWVVTVISAVPMLLPATRPTRPTPDTDATALLLLVQTSVWFVALLGRIDAVSCSWSPTLTDIMALSRLTPPTATVVTVTAHCAVLLPSCVAAVISAVPPPTPVTRPSFDTVAMALLLLVQPTFLFVALAGWIVAMSCS

SEQ ID NO: 25693 - DNA, 1773 bp, Unknown
  Obtained from environmental sample
  misc_feature (1)..(1773): n is a, c, g, or t
ttgaggactcganagactgaccgctgtccgccacgttcggaggcgccgcaggaggcgttatggaaaaagggggcgtacaagctctattcgctgccatgcccatacgagaactacagggtgacgcgtgtggacgcggtgaaggagccgctcaagttcagcggccccggcccgcacaacatcaccgtaaacgagccgatatccgcgacttggctggagagcggcgcgccggcgcgttttctcttcgagctctcggctgcaataaaagcgaatatctcgctgacgccggattttaagggaactatcaaacaatcgggcaacaaggaggccgcgccgataagcgtgagcggcggatacgacggcgtgttgcaaaagggcaagtacgagatctccgtaacgcctgttaaaccgcaaaattacactccgtacgagctgtcggtcgcgacggctgatttgttcgcgggtgtaggctacgaagttggcagggatcagactgtgcccgtgcaggtcggcgagcgcggcaggtacgagattttctcgcagggtcgcagcgaggtcgcggcgagactctacgcgagcgacaataagacggagatagcccgcagcggcggcgatcaattggattggaacttcttcatctcggagcggttggactccgggagctatcacctgcgtctgacggggttcgagtcgaatccggcaaaggtgtttatgcgccgcgcggcggataccgttctgtcgcaggtaaagcctgacaacgcggttgttgaaaagaggagagtgccgttgtcgtggaagcagatcgttatccccataatgagccaatcgggcaacgtgctgaatatctcggtaaacagcgggtcgcggcttgtgtgcgaattagaggccgcggataagccgcccgtcgcaaatcccgccagcgcgagcataggccgtcgtcggggcaagcaggtcaacatttccgccgttatggaaacgggcgcggcgtatacgctgcggatttggtctgaagacaggctggacgacgtcgcggcggtagaaatttgggcggcggacgcggtgccgctctcgtttgagagcgcgcggagcggcgttaccggacaggcgtctaaggaggcggggaacacgttcttctacaagatagatggtatggacgccggacccgggcactacgagatgatagcgaccgaaaacgagataagccgcgtgtcaggcgcgagcggggcaagggggatatttgaggaagaggagggtatgataatagcgaacgccgggcggcagctcattgtaggggttgcgtttaagtcgccggaaaaattccgtttcgcaatggccccggtgctgctctccgacttaagggacgcgcaggagaaaacatcgggaaaatttgagacggccgacaaataccgcggctccaaacaccatataaaatcccgggagagggaggagttgccggttgtgataaagctcggaggcgacaaggttttcgccattgacgccccggcgcaaacgctgggcgtggtaacgctaactatgcccgccggacagccgatagtcggtctctcctcgccgccgcagaccgccgagttcgtcagaaacggaataccggtgatgggcgggcaatacatatccagcggcgtcagcaagacggtcgtgattcccggcgataccggcagggtcgtcggctggaacgcgcaaaccggcgggtcggccgcgacgggggtgaacgcgacattcgcgatgaatattacagaattgagaaaaccgacacgctga

SEQ ID NO: 25694 - protein, 590 aa, Unknown
  Obtained from environmental sample
  misc_feature (1)..(590): Xaa is any amino acid
MRTRXTDRCPPRSEAPQEALWKKGAYKLYSLPCPYENYRVTRVDAVKEPLKFSGPGPHNITVNEPISATWLESGAPARFLFELSAAIKANISLTPDFKGTIKQSGNKEAAPISVSGGYDGVLQKGKYEISVTPVKPQNYTPYELSVATADLFAGVGYEVGRDQTVPVQVGERGRYEIFSQGRSEVAARLYASDNKTEIARSGGDQLDWNFFISERLDSGSYHLRLTGFESNPAKVFMRRAADTVLSQVKPDNAVVEKRRVPLSWKQIVIPIMSQSGNVLNISVNSGSRLVCELEAADKPPVANPASASIGRRRGKQVNISAVMETGAAYTLRIWSEDRLDDVAAVEIWAADAVPLSFESARSGVTGQASKEAGNTFFYKIDGMDAGPGHYEMIATENEISRVSGASGARGIFEEEEGMIIANAGRQLIVGVAFKSPEKFRFAMAPVLLSDLRDAQEKTSGKFETADKYRGSKHHIKSREREELPVVIKLGGDKVFAIDAPAQTLGVVTLTMPAGQPIVGLSSPPQTAEFVRNGIPVMGGQYISSGVSKTVVIPGDTGRVVGWNAQTGGSAATGVNATFAMNITELRKPTR

SEQ ID NO: 25695 - DNA, 843 bp, Unknown
  Obtained from environmental sample
  misc_feature (1)..(843): n is a, c, g, or t
ttgatgatgagcgcgactcccattccccgaagcctggcgctcacggtattcggagacctggacgtgtcggttattgccgatctgccgcctgggcggaagcccatagaaacccaccttgcaagagaatccaacgagggaaaagtttacgattttgtgcgccgtaagctggaggcaggccatcaggcttattttgtttacccgctaatcgaaggcggggacgaggcggcattaatgtttaacgaattaaaggacgctgtgtccatggctgacaggcttgcgaaagaagtgtttccggattttccccttgcgcttttgcactcaaaagtggacgacgaggacaagcgaaaagccatggaagctttccgtcgtggagaaataaaaatcctcgccgccacgagcgtcgtggaggtcggcgttgatgtgccaaacgcgacctgcatggtaattgagcacgcggaacgcttcggcctttccgccctgcaccagctccggggcagggtgggccggggagaagatcagtcctactgttttttggtttactcagacaacctgagcgaagacggaaaacaacggctcaaggtgatgcttgcaaattcttccggctttgttattgccgaagaagatctaaagctacgcgggcccggccaaatcactggcatagagcagtcaggctatctgaaactgagccttgccgatcccgtcagggacgcggaagatcttgtccgcgcccgctccgatgtctttgaaattctggaatccgatccggcgcttgaaaagcaaccgaataaacgaattgcggaagttctggaacgttgtccgccctttagcgaactgggactgtag

SEQ ID NO: 25696 - protein, 280 aa, Unknown
  Obtained from environmental sample
  DOMAIN (94)...(171): Helicase conserved C-terminal domain
  misc_feature (1)..(280): Xaa is any amino acid
MMMSATPIPRSLALTVFGDLDVSVIADLPPGRKPIETHLARESNEGKVYDFVRRKLEAGHQAYFVYPLIEGGDEAALMFNELKDAVSMADRLAKEVFPDFPLALLHSKVDDEDKRKAMEAFRRGEIKILAATSVVEVGVDVPNATCMVIEHAERFGLSALHQLRGRVGRGEDQSYCFLVYSDNLSEDGKQRLKVMLANSSGFVIAEEDLKLRGPGQITGIEQSGYLKLSLADPVRDAEDLVRARSDVFEILESDPALEKQPNKRIAEVLERCPPFSELGL

SEQ ID NO: 25697 - DNA, 834 bp, Unknown
  Obtained from environmental sample
  misc_feature (1)..(834): n is a, c, g, or t
ttgttcgtaggcggcgcaaacatcaacagcttgcaggggttaaatacgcccattgcagataacggcgaattgatgattgttcccgctattgctggcggcagcggcgaccatgccgacgaaagcggcgtagaacttaccaacgaagaaatcggacgttatagccgccatttgcttttgccggaaatcggcgttgaggggcaaaaaaaattaaaggcggcgaaggttctcattgtcggcacgggggggcttggcgctccccttgccttgtatcttgcggcggcaggcgttgggacaatcggactggtggattttgacgtggtagacgaatcgaatcttcaacggcaaattattcacagtacacgagatgtcggcagaccgaaagttgcttcggcaaaggacagaataaagggaataaatccgctggtgaatgtggtaacgcataacgaaatgcttaccggcaaaaacgctctggaacttttcgccgattacgacattatcgccgacggaacggataattttcaaacacgctaccttgtaaacgacgcctgcgtttttttgggcaaacttaacgcctatggttccgtgtttcagttcgacggacaggcgacagttttcggcgcaaaagacggtccgtgttaccgttgtctgtacccttcaccgccgccccccggacttgttccttcatgtgcggaaggcggagtcatgggcgtactgcccggcattatcggaaccattcaggcggcggagacaattaagctgattgtcggcggggcaaagccgcttatcgggcgactgcttttatttgacgcgtggcgtatgtcgttccgtgaataa

SEQ ID NO: 25698 - protein, 277 aa, Unknown
  Obtained from environmental sample
  DOMAIN (208)...(277): MoeZ/MoeB domain
  misc_feature (1)..(277): Xaa is any amino acid
MFVGGANINSLQGLNTPIADNGELMIVPAIAGGSGDHADESGVELTNEEIGRYSRHLLLPEIGVEGQKKLKAAKVLIVGTGGLGAPLALYLAAAGVGTIGLVDFDVVDESNLQRQIIHSTRDVGRPKVASAKDRIKGINPLVNVVTHNEMLTGKNALELFADYDIIADGTDNFQTRYLVNDACVFLGKLNAYGSVFQFDGQATVFGAKDGPCYRCLYPSPPPPGLVPSCAEGGVMGVLPGIIGTIQAAETIKLIVGGAKPLIGRLLLFDAWRMSFRE

SEQ ID NO: 25699 - DNA, 834 bp, Unknown
  Obtained from environmental sample
  misc_feature (1)..(834): n is a, c, g, or t
atgcagactctggaattggacagggacggctttaactcaatctacatgatggcgaactccggagcgcgcggaagcagaaaccagatccgccagcttgcgggtatgcgcggccttatggcgaagccgtcgggagatattattgaacttcccatccgttcaaactttaaagaaggcctttcggttatcgaattttttatttcaactaacggcgcgcgcaaaggtcttgcggataccgcccttaaaacggcggaagccggctaccttacccgccgccttgtagacatcgcgcaggatatggttgtaaacgaggaagactgcggcacgattaacggtattgcctactcggctgtaaagcagggcgaggaaattgtcgagcccttaagggatcgtatagtcggaaggtttacccttgagcgcgttaaacatccgattacaggcgagcttataatcgacgtaaacgaagaaataaacgaagaacttgccgcggctatagaagacgcgggcgttgagtctgtgcgcataaggacggttttaacttgcgaagcgaagtacggcgtatgccggaaatgctacggacgtaaccttgccacaaaccgcaccgtggaaataggagaagctgtcggaacaatcgcggcgcagtctatcggccagcccggcactcagcttacaatgcgcaccttccacatcggcggcgttgcgaccaaagccagcgaagaaagccgcatcactttaaaatatccggtatatatcagaaatgtcgccggaacgcacctgacgcttgataacggccacttgctttttacccgccgcggacattctatgtcaacaaggtaa

SEQ ID NO: 25700 - protein, 277 aa, Unknown
  Obtained from environmental sample
  DOMAIN (1)...(56): RNA polymerase Rpb1, domain 4
  misc_feature (1)..(277): Xaa is any amino acid
MQTLELDRDGFNSIYMMANSGARGSRNQIRQLAGMRGLMAKPSGDIIELPIRSNFKEGLSVIEFFISTNGARKGLADTALKTAEAGYLTRRLVDIAQDMVVNEEDCGTINGIAYSAVKQGEEIVEPLRDRIVGRFTLERVKHPITGELIIDVNEEINEELAAAIEDAGVESVRIRTVLTCEAKYGVCRKCYGRNLATNRTVEIGEAVGTIAAQSIGQPGTQLTMRTFHIGGVATKASEESRITLKYPVYIRNVAGTHLTLDNGHLLFTRRGHSMSTR

SEQ ID NO: 25701 - DNA, 516 bp, Unknown
  Obtained from environmental sample
  misc_feature (1)..(516): n is a, c, g, or t
ttgcgatgccccgttttatttgttgagataccgaataaggaactccatgagcttcgttcccaggcccgtaagctgcgtaccaaagaaaaggtgcagatcatatttattgattatatcgggcttatagtccatgagaacagcaaactgccgcgccacgagcaaatcggagaaatttccagatcgctgaaaggcctcgcgagggaactggatatacccattgtcgctctctgccagcttaacagggatacggagaagaccggccacgggcagcagcctacgctggcgaatctcagggattccggctcgatagaacaggatgccgaccttgtgatgttcctccacaggaaaccgcccgcgaaagacaagaagggcggggaagatgagccggtgacgaacattgaaggcattcccactgaattgatcattgccaaacagcggaacggcccggtaggggttattgatcttatgttgcaggcgaagtatacgcgctttgtccctgtagagaaagatcattaa

SEQ ID NO: 25702 - protein, 171 aa, Unknown
  Obtained from environmental sample
  DOMAIN (1)...(97): DnaB-like helicase C terminal domain
  misc_feature (1)..(171): Xaa is any amino acid
MRCPVLFVEIPNKELHELRSQARKLRTKEKVQIIFIDYIGLIVHENSKLPRHEQIGEISRSLKGLARELDIPIVALCQLNRDTEKTGHGQQPTLANLRDSGSIEQDADLVMFLHRKPPAKDKKGGEDEPVTNIEGIPTELIIAKQRNGPVGVIDLMLQAKYTRFVPVEKDH

SEQ ID NO: 25703 - DNA, 747 bp, Unknown
  Obtained from environmental sample
  misc_feature (1)..(747): n is a, c, g, or t
atggcaacgaccaagcttggcttccctgatacaaaagagaaactgattcattatcaggagttactgcataatcatgttgagatgaaaaggcgtatcatcgttctggacgatttccactgtattgaagagccgaccgtgattcgctttgtggaagaatgtattctgcaaaatatgccgcctgaaacttcggtattcctgatttcccgttctactccgcgcatcaatatcgcgggtctggtttaccgcgatcaaattttcaatataagcgaaaacgatctgcgcttcactgaaagcgaacttgtccagtatttccatagcacggatatttcccctaatcaggaaagtctgcgcgagattatgaaagataccgaaggatgggcatttgcgattaaccttatcgcgcgatcataccagaaagctccgggttacggcggctatgtgcgcaatgcaatgaaaacaaatatcttccggcttatggaaacggaaatctgggacggaattaccggacgattgcaaaactttctaacgcgcctttccttgattgatcatctgtccgttgattttatcgccaagttggctgaaaacgaagaagggctgctcgccgatatggaaaaacaaagcgcatacgtacgtcaggacagttatattaacgcatatctcattcaccccctgtttctggaatttcttcgccaaaagcaggaatccctttcggaagaacaaaagcgtgaaatcttggcctcgccataa

SEQ ID NO: 25704 - protein, 248 aa, Unknown
  Obtained from environmental sample
  misc_feature (1)..(248): Xaa is any amino acid
MATTKLGFPDTKEKLIHYQELLHNHVEMKRRIIVLDDFHCIEEPTVIRFVEECILQNMPPETSVFLISRSTPRINIAGLVYRDQIFNISENDLRFTESELVQYFHSTDISPNQESLREIMKDTEGWAFAINLIARSYQKAPGYGGYVRNAMKTNIFRLMETEIWDGITGRLQNFLTRLSLIDHLSVDFIAKLAENEEGLLADMEKQSAYVRQDSYINAYLIHPLFLEFLRQKQESLSEEQKREILASP

SEQ ID NO: 25705 - DNA, 1524 bp, Unknown
  Obtained from environmental sample
  misc_feature (1)..(1524): n is a, c, g, or t
ttgtttatcgcttacggagtagcgctttcaataaacgaaatgttcgccgatcatgataaaattttcagtccgcaggcggcgcttacatccctgtcaatgtaccgtgaaattgttacgggaaatacggcgacacaaaatttaaattatttcaatactgaagcggaacgcgaggagtttatagcgcggcataaaattcaatccattaacagggatttagttaacagaaaaaacggagaaacgcttcgtgtttatcttggcattgacgctggttccactacgaccaagtttgtgctgttagacgaagatgaaaatgtagttgattgtttttacagtccgaacaaaggcgagccgcttaaggttattaaaaaagccatgctggatatgtacgaaaaataccgtaatgcgggcgtaaatattgatgttatcgcccttggaaccaccggttacggagaattgctttttgacaaggcgctcggagccgattttcacacggtagaaactgtcgcccatgcggcggcggcgcaaaaatatattcccggcgtaagttttattctggacatcggcggacaggatatgaaagcgattaccatttccaacggcattgttacaaacattaccgttaacgaagcctgctcatcaggatgcggttcgtttcttgaaacattcgccgaaaccttgcacatccctgtcgataaaatagccgaagcggcgtttaacgcgaaaaatccggcgtgtttaggcagtcgctgtaccgtatttatgaacagcacgattatcaccgaacaaaaaaacggcaagcaggctgacgacattatggcgggactttgccgttcaatagtcgagaatgtatttacaaaagttgtacgtatatcaaattcggcccaacttggagaaaaaattgtagtacagggcggtactttaaaaaatgacgcggttctgcgttcattggaacagtacctcggcagatccgtcgtacgcgccccttatcctggagaaatgggcgctatcggaatcgcccttttaacaaaaagagaaatagcggaacacggttacacttcacctcacggtacaagcgaccattcgcgttttatcggatttgaagagcttaaaaaatttaattacacgcaggaagccaatataatctgccccttctgcggcaataattgcaaccgtactttggtgcgtttttacaacggtcttacatgggtcacgggcaaccgttgcgagcggggagaactcgtaggcgatcctaaggatacggcgttacgtgaagaagcggataaattgactaaaatcatgaaatcagttcccgacatggttaaaatgagggacgaactcctttttaaggattatccctttaatcaaatcttaccgtcaaaagacataactatcggcattccccgcgtattggatttctggcggaatatgcctttctggaaagtattctggggcgctttgggatttaaggttaaaatatcgcggaaaagcacgcgacaactgtcgagaagggctcggccaatctga

SEQ ID NO: 25706 - protein, 507 aa, Unknown
  Obtained from environmental sample
  DOMAIN (85)...(342): BadF/BadG/BcrA/BcrD ATPase family
  misc_feature (1)..(507): Xaa is any amino acid
MFIAYGVALSINEMFADHDKIFSPQAALTSLSMYREIVTGNTATQNLNYFNTEAEREEFIARHKIQSINRDLVNRKNGETLRVYLGIDAGSTTTKFVLLDEDENVVDCFYSPNKGEPLKVIKKAMLDMYEKYRNAGVNIDVIALGTTGYGELLFDKALGADFHTVETVAHAAAAQKYIPGVSFILDIGGQDMKAITISNGIVTNITVNEACSSGCGSFLETFAETLHIPVDKIAEAAFNAKNPACLGSRCTVFMNSTIITEQKNGKQADDIMAGLCRSIVENVFTKVVRISNSAQLGEKIVVQGGTLKNDAVLRSLEQYLGRSVVRAPYPGEMGAIGIALLTKREIAEHGYTSPHGTSDHSRFIGFEELKKFNYTQEANIICPFCGNNCNRTLVRFYNGLTWVTGNRCERGELVGDPKDTALREEADKLTKIMKSVPDMVKMRDELLFKDYPFNQILPSKDITIGIPRVLDFWRNMPFWKVFWGALGFKVKISRKSTRQLSRRARPI

SEQ ID NO: 25707 - DNA, 1284 bp, Unknown
  Obtained from environmental sample
  misc_feature (1)..(1284): n is a, c, g, or t
ttgatagattggccgagaaggagttatatgctggattttgacgcaatcaaaaacgcggccaaaggctatgaagcggacatgacaaaatttttaagggatcttatacggattcccggcgaaagctgcggtgaaaaggaaaccgcagcccgcatcgtggaagaaatgcaaaaagtcggctttgacgaggccggcattgacaagatgggcaacgtgattggctacatggggaacggcaagacacttatctgttttgacggccacatcgacaccgtgggcataggcaatagggacaactggaagttcgacccctacgagggctttgagaacgagaccgagatcggcggacggggcgcctcggatcagcttggcgggccggtggccgccgtctacgccgccaagatcatgaaagacttaggccttctcaacgacaaataccgcgtgatggtaagcggcacggtgcaggaggaagactgcgacggcctgtgctgggaatacattataaaggaagaaaatatcaaacctgagttcgtggtgatcaccgagccgaccaacggcaacatctaccgggggcagcggggccgtatggagatccgcgttgaggtgaagggcgtttcctgccacggttccgcgcccgaacgcggcgacaacgcgatttacaagatgggggaaataatcgccgaagttaaggccctgaacaagaaactgaaaaaagacaagttcctcggcaagggtaccctggcggtttcgcagatctatttcagttcgccttcccgctgcgccgtcgccgacatgtgcgccatttccattgaccgccgcctgaccatgggcgaaacctacaaaagcgctctcgcggaaatagccgccctgccgaaagtcaaagagtacaaagccaaagtcaccatgtacaagtacgatctgcccagttacaccggcgtggtttatcccatcgactgttacttccccacctgggttatcccggaagacgccaaaccggcaaaggcgatggtaaaagcctataagggaatgttcggcaagcccaaggtggacaaatggactttttcaactaacggcgtttcgatcatgggccggaacaaaatcccctgcataggcttcggccccggcaaggaagagcaggcccacgcccccaatgaaaagacctggaaagccgacctggtacgctgcgccgccgtgtacgccgccttgcccagcatatacacgggcgaagaacttgacgaaccaaagaaaaagagcaaggaaaagaaagttaagagcaaaaaaaggtaa

SEQ ID NO: 25708 - protein, 427 aa, Unknown
  Obtained from environmental sample
  DOMAIN (189)...(298): Peptidase dimerisation domain
  misc_feature (1)..(427): Xaa is any amino acid
MIDWPRRSYMLDFDAIKNAAKGYEADMTKFLRDLIRIPGESCGEKETAARIVEEMQKVGFDEAGIDKMGNVIGYMGNGKTLICFDGHIDTVGIGNRDNWKFDPYEGFENETEIGGRGASDQLGGPVAAVYAAKIMKDLGLLNDKYRVMVSGTVQEEDCDGLCWEYIIKEENIKPEFVVITEPTNGNIYRGQRGRMEIRVEVKGVSCHGSAPERGDNAIYKMGEIIAEVKALNKKLKKDKFLGKGTLAVSQIYFSSPSRCAVADMCAISIDRRLTMGETYKSALAEIAALPKVKEYKAKVTMYKYDLPSYTGVVYPIDCYFPTWVIPEDAKPAKAMVKAYKGMFGKPKVDKWTFSTNGVSIMGRNKIPCIGFGPGKEEQAHAPNEKTWKADLVRCAAVYAALPSIYTGEELDEPKKKSKEKKVKSKKR

SEQ ID NO: 25709 - DNA, 1017 bp, Unknown
  Obtained from environmental sample
  misc_feature (1)..(1017): n is a, c, g, or t
atggtccgcgggttgcgcgaggtggccgctctaagcagtcccgtaggtgaggtttacgacgagcgtacgcggcctaacgggttgaaaataagcaagatgcgcgttcccataggggttatcggcatcatctacgaggcgcggccgaacgttacggtagacgccgcggccatctgcctgaaaagccgcaacgcggtcgtcctgcgcggcgggtctgaggcgttcgcctccaacagcgccctttgcgacctcttttctaaatctttatccgaagcgggcttacccgcctcggcgctgcagttcatcccgactaccgacagggcggctgtggagctgctcctgcaaaaagacgcccacgttgacctgattattccccgcggcggggagagcctgatacggatggtcgtggagaagtcacgcattccggttatcaagcactataaaggcgtgtgccacgtcttcgtctccgcgaacgccgatatgggcaaagccgtaccgatagccgtaaacgcgaaggcgcagcgtccgtccgtatgcaacgcgatggagacgctgttgctcgacgccggacttgatccgcaaaaaaagaagagcttaatcaacgcccttatcgacaagggggtgacgctcttcggggacgaggagagccggaagctgtcggataagataggtatggttgacgaggaggcgctctacaacgagtacctcgacctgcgcctatcggtcatcacggttaacggagtcgacggcgccgtaaaccacatcaacaaatacggctcgcgccacaccgacagcattgtcacagaatcaaaagaagaagcggaggccttcgtctctcgcgtagacacggcctcagtaatgataaacgccagcacccgcttcgccgacggaggcgagtacggaatgggttgcgaaataggcatatcaaccgataaacttcattcacgcggacctatgggtgttgaggatctgactacgtacaaatgggtcgtgcgcggtaacgggcagattagggagtaa

SEQ ID NO: 25710 - protein, 338 aa, Unknown
  Obtained from environmental sample
  DOMAIN (5)...(329): Aldehyde dehydrogenase family
  misc_feature (1)..(338): Xaa is any amino acid
MVRGLREVAALSSPVGEVYDERTRPNGLKISKMRVPIGVIGIIYEARPNVTVDAAAICLKSRNAVVLRGGSEAFASNSALCDLFSKSLSEAGLPASALQFIPTTDRAAVELLLQKDAHVDLIIPRGGESLIRMVVEKSRIPVIKHYKGVCHVFVSANADMGKAVPIAVNAKAQRPSVCNAMETLLLDAGLDPQKKKSLINALIDKGVTLFGDEESRKLSDKIGMVDEEALYNEYLDLRLSVITVNGVDGAVNHINKYGSRHTDSIVTESKEEAEAFVSRVDTASVMINASTRFADGGEYGMGCEIGISTDKLHSRGPMGVEDLTTYKWVVRGNGQIRE

SEQ ID NO: 25711 - DNA, 702 bp, Unknown
  Obtained from environmental sample
  misc_feature (1)..(702): n is a, c, g, or t
atgttaataaccatagaagtcaaatgcccccactgtcatagccctaacatagtacggaacgggaaaaaaaacaaccgcacacagaattatctttgtaaagagtgcaagaaacaattcataagagattctgaaagaacctactgcggaaccctttcttacatagccgacatgataaaaatcatgttggtgcggggtaacggcattcgggacatcagtgtggtactcaaaataagtgtgtggaaagtcttaaaaatactgaaattgactaagtaccgtataaaacctgcaaaaaccaaatatgactgccttgaaatagacgagttttggacgtatgtagggcggaaaacgaataagatatggcttatatatgcgtatcatcgagaaacaggggagatagtagcgtatgtatggggcaaacgggacttaaaaacagcgaaaaagttaagaaaacggctgaaacagctggggataacctatgaccggatagcttgtgacgagtgggacagttttctcacggcgttcaatgaagacgagaaattagtaggaaagaaatacacggtagggatagaaggaaataattgccgattacggcatcggattagacgggcgtttaggaaaacgtgttgtttttcgaagaagatattcaaccattggaaagcattttcaatggctttcttttacatcaattatggtttcgtttga

SEQ ID NO: 25712 - protein, 233 aa, Unknown
  Obtained from environmental sample
  DOMAIN (2)...(90): Insertion element protein
  misc_feature (1)..(233): Xaa is any amino acid
MLITIEVKCPHCHSPNIVRNGKKNNRTQNYLCKECKKQFIRDSERTYCGTLSYIADMIKIMLVRGNGIRDISVVLKISVWKVLKILKLTKYRIKPAKTKYDCLEIDEFWTYVGRKTNKIWLIYAYHRETGEIVAYVWGKRDLKTAKKLRKRLKQLGITYDRIACDEWDSFLTAFNEDEKLVGKKYTVGIEGNNCRLRHRIRRAFRKTCCFSKKIFNHWKAFSMAFFYINYGFV

SEQ ID NO: 25713 - DNA, 627 bp, Unknown
  Obtained from environmental sample
  misc_feature (1)..(627): n is a, c, g, or t
atgaacgacatattggaatggcttgtagcagcggaagatacaaggcaacaggctaaagtaaagcatctaatgcgggacataatcgccatcgtgtttttcgcggagattgcaaacgcaagcgaatgtattgaggtatacctgtttgcggcagcccacgaggaaccgttgagggaatacctggaactgccgcatgggataccttcgcacgatactatacagcgggtatttgcaacggtatcgcctgaatgcctgcaagagtttcgcaggcggtggaacgaaatcatgtccggggacgttggcgagaaaatcaaaaggatgcttgctttggacgggaaaacgcagcgtggcaacggaaagaacggacaaaaagcgaatcacatagtaagcgccgtagacaacggctggttttgcattggcgaggtgctggtgggtgacaaatccaacgaaatcacggcaattccggagcttttgaagcaattgaatgttcaaggtactattgtcacgaccgatgcaatgggttgccagacagagatagcaaggctaatcagacagaaaaaggccgattatatgcctggcttgaagggcaatcagggtactttgcatgatggcgttgagctgactcgatga

SEQ ID NO: 25714 - protein, 208 aa, Unknown
  Obtained from environmental sample
  misc_feature (1)..(208): Xaa is any amino acid
MNDILEWLVAAEDTRQQAKVKHLMRDIIAIVFFAEIANASECIEVYLFAAAHEEPLREYLELPHGIPSHDTIQRVFATVSPECLQEFRRRWNEIMSGDVGEKIKRMLALDGKTQRGNGKNGQKANHIVSAVDNGWFCIGEVLVGDKSNEITAIPELLKQLNVQGTIVTTDAMGCQTEIARLIRQKKADYMPGLKGNQGTLHDGVELTR

SEQ ID NO: 25715 - DNA, 846 bp, Unknown
  Obtained from environmental sample
  misc_feature (1)..(846): n is a, c, g, or t
gtgttttctaccgccgatccaaaagattttaaaatagaaataaaaagaatgggcttgtgggatgatgataaagcgactgtgtttgtttcctattataaagggaatgataccgatattgttattccttcaaaaatacaaggttatcccgttgcaggtattgattatatcgtatctgatactaataaaaaaattaccggcgtaaccatccctgacagcgttaagtccattggaagttatgcgtttctatttaccgagcttaccggcgtaataattccgaacagcgttatatatattggatacaaagcgttttatgacggtaaacttacaagcgtaactcttggtaataatattaaaagtatcagcagaatggcgttttgcgctaacaaacttaccaatgtggttattcctgacagtattacgaaaattgaagagcgcgcgtttgggtggaatcagcttgccgatgtaacaatcagtaaaaaagttactgttattgatcgacaagcgtttttttccaataagcttactatgataactattcccgacagtgttattcgtattggagaagaagcatttagcgccaatcaacttaccgatgttataataggaaaaaatgttaccgaaatggaagctgcggctttttttgataatcccgttaaaagcataaccattcccggtaatgtgaatcttattgccggtcaaataattatgactgaaaacggtttagttataaccagaagcgatgaaatataccctgttttcccttttgattttgataaattttacaacgcaaacgggaaaaaagccggaacttacacacgggacggcaagaactggagaaaaaaataa

SEQ ID NO: 25716 - protein, 281 aa, Unknown
  Obtained from environmental sample
  misc_feature (1)..(281): Xaa is any amino acid
MFSTADPKDFKIEIKRMGLWDDDKATVFVSYYKGNDTDIVIPSKIQGYPVAGIDYIVSDTNKKITGVTIPDSVKSIGSYAFLFTELTGVIIPNSVIYIGYKAFYDGKLTSVTLGNNIKSISRMAFCANKLTNVVIPDSITKIEERAFGWNQLADVTISKKVTVIDRQAFFSNKLTMITIPDSVIRIGEEAFSANQLTDVIIGKNVTEMEAAAFFDNPVKSITIPGNVNLIAGQIIMTENGLVITRSDEIYPVFPFDFDKFYNANGKKAGTYTRDGKNWRKK

SEQ ID NO: 25717 - DNA, 789 bp, Unknown
  Obtained from environmental sample
  misc_feature (1)..(789): n is a, c, g, or t
atgatcagatcggccgagggccgctatattcatttcggtatccgcgaattcaccatggcggccatctccaacggaattaccattcacggcggtttccgttccttctgctctaccttcatggtcttttccgattacctgcgtccggctttgcgcctttccgccctgatgaagcagccagttatttacgtgcttacccacgattcaatttatgtgggagaggacggccctacacatcagccggttgaacaccttgccgccctcagagccatgcccaatgtaagggtgcttcgccccgctgacgcggaagaaaccgccgaagcctgggaaatggctatggaaaggacagaaggcccggttgtgcttgcccttacaaggcagaacacagttgtctttgccaaagaagattcagaatggaagaataaactccgctcaggcgcttacatcgtcaaaaagccggccgggtctgtagatgtggttcttatcgcaaccggttcggaagtaaacctcgctctggcagccgcggagctctcaggaaaaaatgtgcaggtagtttccatgatcagcagggaactctttgagtcccaaagtgaggtcgtcagaaatagtgttgttcccccgggtgtgcgaaccgttgtctgcgaggccgctgtccgccagggttgggagcgctgggcgaaaccggaagacatcttttcaatagaccgcttcggcgaatcaggcccctatgaaaaagcggcggaggctcttgggtttacggcgaaagcgctggcggagcttgtttcccgttaa

SEQ ID NO: 25718 - protein, 262 aa, Unknown
  Obtained from environmental sample
  DOMAIN (146)...(256): Transketolase, C-terminal domain
  misc_feature (1)..(262): Xaa is any amino acid
MIRSAEGRYIHFGIREFTMAAISNGITIHGGFRSFCSTFMVFSDYLRPALRLSALMKQPVIYVLTHDSIYVGEDGPTHQPVEHLAALRAMPNVRVLRPADAEETAEAWEMAMERTEGPVVLALTRQNTVVFAKEDSEWKNKLRSGAYIVKKPAGSVDVVLIATGSEVNLALAAAELSGKNVQVVSMISRELFESQSEVVRNSVVPPGVRTVVCEAAVRQGWERWAKPEDIFSIDRFGESGPYEKAAEALGFTAKALAELVSR

SEQ ID NO: 25719 - DNA, 861 bp, Unknown
  Obtained from environmental sample
  misc_feature (1)..(861): n is a, c, g, or t
gtgcatattgctgatatgaaaacgcttgaggaaacggccgatttgtccgctatggacaatgaaacgcgccgtaaactttttttattgtccgaaaatttctggccgggacctttgtcagttgtcctgcctaaaaatgaaaaaatacccggtattgctacggcaggattgtctacagcagccatacgttttccggctcataaaactgcgcaggaattaatttccctcagcggaggggcggttgcggctccgagcgcaaatcctttcggttttcttagccctacaagggcggagcatgtacgcgccatgttaggtgaaaaaattgacatcatacttgacggcggtcctgcgcaggtaggagtggaatccgcagttgtggatattacgggcccatgcgttaaaatactcaggcacggcggcgtgtccaaagaggcaatagaaagcgtcatcggttttgtgcaggatgatgtttttaaagaaaaaaaagaaacgcctgcgaacttagaaggaggcgtttttgcttctccaggacagttaaaaagccactatgctcccggaacgccgctttcggtatttgacatagatgacattaacggccttccttatgaatcaaacgccgcatatcttttttttgacgattactcccgtcttttatggatgaaacagtacagtgaaaggcaaaatgcgctgataaaaacgctttcaccttcggggcagattaatgaggctgccgcttgtttttttgaaactctgcatgagttggattcacttgatatttccggaatctatgcccaatttgccccgcagcangggataggagcggccattaacgaccgccttcgccgggcaagtgtcaatttatag

SEQ ID NO: 25720 - protein, 286 aa, Unknown
  Obtained from environmental sample
  DOMAIN (13)...(138): yrdC domain
  misc_feature (1)..(286): Xaa is any amino acid
MHIADMKTLEETADLSAMDNETRRKLFLLSENFWPGPLSVVLPKNEKIPGIATAGLSTAAIRFPAHKTAQELISLSGGAVAAPSANPFGFLSPTRAEHVRAMLGEKIDIILDGGPAQVGVESAVVDITGPCVKILRHGGVSKEAIESVIGFVQDDVFKEKKETPANLEGGVFASPGQLKSHYAPGTPLSVFDIDDINGLPYESNAAYLFFDDYSRLLWMKQYSERQNALIKTLSPSGQINEAAACFFETLHELDSLDISGIYAQFAPQXGIGAAINDRLRRASVNL

SEQ ID NO: 25721 - DNA, 642 bp, Unknown
  Obtained from environmental sample
  misc_feature (1)..(642): n is a, c, g, or t
gtgtataaacaagtagacgcaaaagtaaattttcccaaattggaagaagaaatccttaaattttgggaacaaaaccatacctttgaaaaatccgtatccaacagggaagggaagagtgaattcgtcttttacgacggtcccccctttgccacaggacttcctcattttgggcattttatcccaagtacaataaaagacattattccccgctatcagaccatgaaaggcaaaaaagtcgaacgccggttcggctgggactgccacggtctgcctatcgaaaacctgatcgagaaaaaactcggtcttaattccaaaaccgacatcgaaaaattcggcatagcgaaatttaacgaaacttgcagagccgaagtactgcgttatgttaaagaatggcggcagaccatcacccgccttggacgctgggtggattttgacaacgattataaaaccatgaactcggattacatggaatcaatctggtgggttatgaagtccctttgggaaaaagaactcctctacgaaggacactacattctcccatattgcccccgctgttccacagttctgtccaaccacgaactcaacctcggcggttataaagacgtgcatgatccggcaatcactgtacggttcaaagtttag

SEQ ID NO: 25722 - protein, 213 aa, Unknown
  Obtained from environmental sample
  DOMAIN (17)...(213): tRNA synthetases class I (I, L, M and V)
  misc_feature (1)..(213): Xaa is any amino acid
MYKQVDAKVNFPKLEEEILKFWEQNHTFEKSVSNREGKSEFVFYDGPPFATGLPHFGHFIPSTIKDIIPRYQTMKGKKVERRFGWDCHGLPIENLIEKKLGLNSKTDIEKFGIAKFNETCRAEVLRYVKEWRQTITRLGRWVDFDNDYKTMNSDYMESIWWVMKSLWEKELLYEGHYILPYCPRCSTVLSNHELNLGGYKDVHDPAITVRFKV

SEQ ID NO: 25723 - DNA, 978 bp, Unknown
  Obtained from environmental sample
  misc_feature (1)..(978): n is a, c, g, or t
atgacctgcgtaacgcacgagcacctggaattccacggtacatgggagcagtaccgcagcgacaaagcggagctgttccgcgctttggacgcttctcccacggcgcataaaaagcaggggccggaaggggtatttacagccccctccttcggcgtggtaaacaccgacgacgcaagcgcggattactttgccgccgcctgcgggcagaagacctattccttcagcgcaaaaggggcaacagcgaatctttcagtaaaaaaaatagaaagcgaatccggaggaaacaggtacgaggttcttgcttcttcaacagggaaaaccattagcgtaaaggacaatctaagcggagcctttaacgcggggaacgtcctcgcttcaattcttgtggtttcaaacctgctttcaatagatattgaagaactcgtcccgctggttcctcttttaaagccggtgcgaggccgaatgacggcggtcaaggcgggacagccttttgaggttctggttgattacgcacacaccccttcatcttttgaaacgatctttcccccgcttaaagaaaggataaaacgctcaggcggcaggcttataagtcttttcggttccgccggggagcgggacaccaaaaagagaagccggcagggggaaatcgccgcccgctattctgacctggttttcctcactgacgaagaccctcgtggagaagagccaatggctattttggaagatattgctaaaggatgcgaagcatcctctgggtgcgaagcagaccgctcaactatgatccgtaacgagacgctttttcttatccccgaccgcaaaaaggcaatcagaaaggctttctccctggcacagccgggtgatcttgttttgcttttgggtaaaggacacgaaaactcaattatttacgcgtcaggaattttaagttacgacgaaattacagaagcggaagatgccttaaaagagactggtaattcataa

SEQ ID NO: 25724 - protein, 325 aa, Unknown
  Obtained from environmental sample
  DOMAIN (151)...(240): Mur ligase family, glutamate ligase domain
  misc_feature (1)..(325): Xaa is any amino acid
MTCVTHEHLEFHGTWEQYRSDKAELFRALDASPTAHKKQGPEGVFTAPSFGVVNTDDASADYFAAACGQKTYSFSAKGATANLSVKKIESESGGNRYEVLASSTGKTISVKDNLSGAFNAGNVLASILVVSNLLSIDIEELVPLVPLLKPVRGRMTAVKAGQPFEVLVDYAHTPSSFETIFPPLKERIKRSGGRLISLFGSAGERDTKKRSRQGEIAARYSDLVFLTDEDPRGEEPMAILEDIAKGCEASSGCEADRSTMIRNETLFLIPDRKKAIRKAFSLAQPGDLVLLLGKGHENSIIYASGILSYDEITEAEDALKETGNS

SEQ ID NO: 25725 - DNA, 1011 bp, Unknown
  Obtained from environmental sample
  misc_feature (1)..(1011): n is a, c, g, or t
atgcctataaaaaagactgtaaaaaaggccgtcaaaaagaagcgccccgccgccgcgaaaccccgcgccaagaagcccgcagaacgcgagttagtctcgttcgatttcgccgtcaaatatctattgcgcggcaagcgcgatttcgtagttctaaacggttttctttccgaacttctcggtaaaaaggtagaggtcaagtctatcgacgaccccgaaaacattaagacctacaaaaacgacaaggtaaaccgcgtagatattaaggcgcggattagcggcggcgaactcgccattttcgagatacagtttcttcaagagtttgacttcttcgcgagggtacttttcggcgtctgcagcgcgatagttgaccaagttgaggcgggtgatttttacaacataaagaaagtctactcgataaacatagcctattttaacctgaacgccaagcgcgagtatttattttccggcgatataaacacttttaagggcgtccactacaaagacgaacaaatcccgtttgagcgggctgtctctccgaagtcaaagaaaatggtagacatccacccggagtattacctgattttaccgcgaatgttcgacgaaaaaatgcgtagcaggttcgacgagtgggtatatgtcctgaagaaatccgccgtccgcgacgacttcaaagccgccggaataaaggaggcgaaggcgaagttagactatatccgcatgactcccgaacaaagaaaggtatactttaggtacatggacaaccgcagaggcgcggacagcgcgatccaaacggcggagggcaaaggcgagcgcagaggcgagcgcaaaggactacggaaaggcatacagaaaggcctacagcaaggcagactggaaggcctacagaaaggtcaggaattggaacgcgccaaactcgttaaaagtctgtacgaaacgggcttaaccgttgcaaaaattgtaaagggcacaaaactctccgaaacctccgtcaagcagattttaggcttgtaa

SEQ ID NO: 25726 - protein, 336 aa, Unknown
  Obtained from environmental sample
  misc_feature (1)..(336): Xaa is any amino acid
MPIKKTVKKAVKKKRPAAAKPRAKKPAERELVSFDFAVKYLLRGKRDFVVLNGFLSELLGKKVEVKSIDDPENIKTYKNDKVNRVDIKARISGGELAIFEIQFLQEFDFFARVLFGVCSAIVDQVEAGDFYNIKKVYSINIAYFNLNAKREYLFSGDINTFKGVHYKDEQIPFERAVSPKSKKMVDIHPEYYLILPRMFDEKMRSRFDEWVYVLKKSAVRDDFKAAGIKEAKAKLDYIRMTPEQRKVYFRYMDNRRGADSAIQTAEGKGERRGERKGLRKGIQKGLQQGRLEGLQKGQELERAKLVKSLYETGLTVAKIVKGTKLSETSVKQILGL

SEQ ID NO: 25727 - DNA, 336 bp, Unknown
  Obtained from environmental sample
  misc_feature (1)..(336): n is a, c, g, or t
atgtctaatgagaaaaaaactgctatgatatctgggataaccgggcaagatggcggttatttggcaaaatttttacttgaaaaagggtacagagttttgggtttgtatcgcaggggtgctacagataccttttcaaaattgaaagagcacgggatttttgaaaaaattgaattgatggattttgatttgctggaactttcaaacatttgcagattgctgaaaaaacaccagcccgatgaattctataaccttgctgcgcagagctttgtagccgcttcgtgggaagagcctatttacaccgcttcaggcagatctcgtgccgctcggccgatctga

SEQ ID NO: 25728 - protein, 111 aa, Unknown
  Obtained from environmental sample
  misc_feature (1)..(111): Xaa is any amino acid
MSNEKKTAMISGITGQDGGYLAKFLLEKGYRVLGLYRRGATDTFSKLKEHGIFEKIELMDFDLLELSNICRLLKKHQPDEFYNLAAQSFVAASWEEPIYTASGRSRAARPI

SEQ ID NO: 25729 - DNA, 483 bp, Unknown
  Obtained from environmental sample
  misc_feature (1)..(483): n is a, c, g, or t
atgaatttgatttcgccgccgttttgcattgagtgttttgacatttcgcatttaagtggaaccgaacctgtggcgagcatggttcgttttgtgaacggttttccgagcaagagcgattacagaaaatacatgattaaggaggcagaaggcggtgatgattttgcaagtatgcgggaagtattgagccgcagattgactagactgcaaaatgaaaactcagatttcccggatttgctggttatagatggcggaaaggggcaggttgaagctgcttttgatgttcttaaagagatgaatttgacaaacattccggttattgggcttgcaaagcgtttggaggaaattgtttttgccgggaaaaagccttctattttgttaaaacgcagcaacgcggctttgcagcttttgcaaaggataagggacgaagcccatagatttgccataacttttcagagaaaacgaaggaaaaaaagtttgcgctaa

SEQ ID NO: 25730 - protein, 160 aa, Unknown
  Obtained from environmental sample
  DOMAIN (1)...(148): UvrC Helix-hairpin-helix N-terminal
  misc_feature (1)..(160): Xaa is any amino acid
MNLISPPFCIECFDISHLSGTEPVASMVRFVNGFPSKSDYRKYMIKEAEGGDDFASMREVLSRRLTRLQNENSDFPDLLVIDGGKGQVEAAFDVLKEMNLTNIPVIGLAKRLEEIVFAGKKPSILLKRSNAALQLLQRIRDEAHRFAITFQRKRRKKSLR

SEQ ID NO: 25731 - DNA, 1386 bp, Unknown
  Obtained from environmental sample
  misc_feature (1)..(1386): n is a, c, g, or t
ttggataaagccggttttatctgtgaaagaacgatagaacagttttactgctccaaatgcaaaaggtttcttgccgaccgctacatacgcggcgtatgccccgtctgcggcggcgctgaggcaaggggcgatcaatgtgaggcttgcggaaaattattggaccccaccgatttaaaagagccgaagtgctcttcctgcggaaatactccgtctttgcaaaagacaaatcacctttacattgatcttcccgctgtcagggaaaaactggaagaatggataaaaaccgcttccgtaaaaggtttttgggcgaataacgccgtgcagatgactcaggcgtggatacgcgacggccttaaagaacgcgccattacaagagatttaaaatggggaatcccggtaccgaaacccggttatgaaaacaaggtgttttacgtatggtttgacgcgccaataggttatatttccataactggaacgttaggtgaagaaaaggggaattggcgggattttgtaaattattggtggaaaaccccgaatgagaccgatctgtttcagtttataggaaaagacaatattccgtttcatactgtaatttttccgtccagccttttgggaagcggggagaactggacaatgttacaccacatgtccagcaccgagtacttaaattatgaaaacggcaaattttcaaaatcaaggggggtaggagtttttggcactgatgtaaaagagactggtatccccgccgatgtatggcgcttttatatttattacaacagacctgaaaaatccgacgccatgtttacatggagtgactttaaagagaaagtaaacggcgaacttatcggtaacctgggcaatttggtaaaccgcacgctctcctttgttacgcgctactatgacggtataattcccgaaggaaagagcgatggcgcgttttgggcggaagtggtaagatttgaaaactcaattacggaaaaacttgacagggcagagttaagggacgcttttagggaaatttttgaattatcctcgtttgcgaataaatattttcaggacaatgaaccgtggcgactgcgcaatgacgatcctgaaaaagcaaaatcagttatacgcgaccttacctacattgtccgcgatttgtcagtgttaatagagccttatatgccgaatgccgcggaaaaaatcgcctcatttttgggtcttaaacttaggagtaatcttaactggaaagacattggaaaagcggacggtatagggaatattaaaataaagagcgaaatactttttaacaaacttgaagatgaattaattgaaaccttacgcgtccgcttttcggggagccagaaagagaggcaggagagcgataatgcgcaaactgcgtaa

SEQ ID NO: 25732 - protein, 461 aa, Unknown
  Obtained from environmental sample
  misc_feature (1)..(461): Xaa is any amino acid
MDKAGFICERTIEQFYCSKCKRFLADRYIRGVCPVCGGAEARGDQCEACGKLLDPTDLKEPKCSSCGNTPSLQKTNHLYIDLPAVREKLEEWIKTASVKGFWANNAVQMTQAWIRDGLKERAITRDLKWGIPVPKPGYENKVFYVWFDAPIGYISITGTLGEEKGNWRDFVNYWWKTPNETDLFQFIGKDNIPFHTVIFPSSLLGSGENWTMLHHMSSTEYLNYENGKFSKSRGVGVFGTDVKETGIPADVWRFYIYYNRPEKSDAMFTWSDFKEKVNGELIGNLGNLVNRTLSFVTRYYDGIIPEGKSDGAFWAEVVRFENSITEKLDRAELRDAFREIFELSSFANKYFQDNEPWRLRNDDPEKAKSVIRDLTYIVRDLSVLIEPYMPNAAEKIASFLGLKLRSNLNWKDIGKADGIGNIKIKSEILFNKLEDELIETLRVRFSGSQKERQESDNAQTA

SEQ ID NO: 25733 - DNA, 450 bp, Unknown
  Obtained from environmental sample
  misc_feature (1)..(450): n is a, c, g, or t
gtgcgtcaccacatgatactcaactcgatcaggtttgtttcgcatatagacgtaccaagggtacgctcggatctgagcgccgtgtattcggccagggacagggaagcggggcgtgaggccctggaagaattcgggaaaacatggaatgacaaatacccgatgatatacgagttatggcaaaggaattgggaattattcagcggcttcttcgaatacccgtccgagatccgcaaggctatatataagaccagggcgatagaatccatggctcgccagctccgcaaggtcaccaagaaccgttggaccttttcgacagatgaggccgtatacaaggtgctgtatctggcgatcaggaacgcctcggagaaatggaccatgcctgtgaaaggctggaagcaggcgctgaatcagtttgcgattgagttcggtaaggagcgggtgtttttgtag

SEQ ID NO: 25734 - protein, 149 aa, Unknown
  Obtained from environmental sample
  misc_feature (1)..(149): Xaa is any amino acid
MRHHMILNSIRFVSHIDVPRVRSDLSAVYSARDREAGREALEEFGKTWNDKYPMIYELWQRNWELFSGFFEYPSEIRKAIYKTRAIESMARQLRKVTKNRWTFSTDEAVYKVLYLAIRNASEKWTMPVKGWKQALNQFAIEFGKERVFL

SEQ ID NO: 25735 - DNA, 525 bp, Unknown
  Obtained from environmental sample
  misc_feature (1)..(525): n is a, c, g, or t
ttgcaccggttcaggagtaatagcgatcgcgctcaaacatacaatgccagaattggaagtatgggccgcagacatttccgccgaagcgctgaaaatgccaaaacaaacgcctcccgtctattacccccaaattcaatacattttttccatggcaacctttacgacgccctcccttcctctccctcactgctcactgttcattcctcatttctaattattgtggctaaccccccctatatccccacaacagagctttcctccctctcgcctgaagtccgcatggaaccggcgcttgcgctggacggtggcgatgacggtttaaatataatcaaaaagataatatcccgcgcgccggaatttctgtgtaaaggcggctcactattactggaagccgatccccgccagatgattgtcatttctgacttgtataaagaggcgggtttttctgatattcaaactcataaggatttatccggcagggaaagggttataagcggggtaaaaaacgatgaatttgcggattga

SEQ ID NO: 25736 - protein, 174 aa, Unknown
  Obtained from environmental sample
  misc_feature (1)..(174): Xaa is any amino acid
MHRFRSNSDRAQTYNARIGSMGRRHFRRSAENAKTNASRLLPPNSIHFFHGNLYDALPSSPSLLTVHSSFLIIVANPPYIPTTELSSLSPEVRMEPALALDGGDDGLNIIKKIISRAPEFLCKGGSLLLEADPRQMIVISDLYKEAGFSDIQTHKDLSGRERVISGVKNDEFAD

SEQ ID NO: 25737 - DNA, 642 bp, Unknown
  Obtained from environmental sample
  misc_feature (1)..(642): n is a, c, g, or t
atgaccatacgcgaagctcttgccgaaggaagcgcctctcttacggcagcgggcattgaaacccccggccttgattcctccctgctccttgccgagatcctcaacaccagccgttcatcgttaatcgccgccgggaacgacgacatttcgaatgcgttagtcgcaacctttcgccaattaatcaaacggcggcagtcaggcgaatgtgccgcatacatattaggaagaaaagaattctacggccttgagtttttggtaaacccctcggtattggtaccaaggccggatacggagacgttagttgaagcggcgttgaaagtaatagggagtgagggaacaattagcaatgagcaaggagcaatgagcaaggagcacagaataacgaacaaagctgaggtgagtaagcaatctttttgcgtgcttgatctttgcaccggttcaggagtaatagcgatcgcgctcaaacatacaatgccagaattggaagtatgggccgcagacatttccgccgaagcgctgaaaatgccaaaacaaacgcctcccgtctattacccccaaattcaatacattttttccatggcaacctttacgacgccctcccttcctctccctcactgctcactgttcattcctcatttctaa

SEQ ID NO: 25738 - protein, 213 aa, Unknown
  Obtained from environmental sample
  misc_feature (1)..(213): Xaa is any amino acid
MTIREALAEGSASLTAAGIETPGLDSSLLLAEILNTSRSSLIAAGNDDISNALVATFRQLIKRRQSGECAAYILGRKEFYGLEFLVNPSVLVPRPDTETLVEAALKVIGSEGTISNEQGAMSKEHRITNKAEVSKQSFCVLDLCTGSGVIAIALKHTMPELEVWAADISAEALKMPKQTPPVYYPQIQYIFSMATFTTPSLPLPHCSLFIPHF

SEQ ID NO: 25739 - DNA, 327 bp, Unknown
  Obtained from environmental sample
  misc_feature (1)..(327): n is a, c, g, or t
atgtcgagaggacggcataccgtccattgccaggacgaaaaaagccagatcaaaaataaggccaaggccatgaggattctgagggcgcgtatctacgaaatggaagaggctaaggccgccgctgaacgcgccgaagccagaaaatcccaggttggcacaggcgaccgttccgaaaggatcaggacatacaatttccccgacaaccgcgtcacagaccaccgcataggcctgaccctttacaaacttgaccgcataatggaaggcgaagtcgccgaggtctttgacgccctaaaactctcggcgcgtgaagaaatgcttcgaaactaa

SEQ ID NO: 25740 - protein, 108 aa, Unknown
  Obtained from environmental sample
  DOMAIN (5)...(74): Peptidyl-tRNA hydrolase domain
  misc_feature (1)..(108): Xaa is any amino acid
MSRGRHTVHCQDEKSQIKNKAKAMRILRARIYEMEEAKAAAERAEARKSQVGTGDRSERIRTYNFPDNRVTDHRIGLTLYKLDRIMEGEVAEVFDALKLSAREEMLRN

SEQ ID NO: 25741 - DNA, 915 bp, Unknown
  Obtained from environmental sample
  misc_feature (1)..(915): n is a, c, g, or t
gtgtggctgaatcacaaggtcataaaggacggcgagacggtaggcattatttgttcgggaatggaattatccaaaataaccgaacaggcaatctcccgatacgataaaaaagaaacacgagttctgatgattgacgaaaaaggcgttatccaaatggacagcgcgttattgggtgatgacggctttctcatctttgaaagtaccaaattgctcggcggggaaatcaacaatcccgaattcaatgcggccgtaaaggagcatcttgacaatattaacgggtatttcaaggagatgaccatagaacccaggatagtgaggcttcattcaggccggtacaaatacgcggcaataacgcccgtcggcacgacaaactggtcggtggtaaagttcttcgattcctcatcgttattcgctcaaacaaagctgctgccgcctttcgcgattatggccgcgctttttattttatttgtattaagttcaaacaaccttatacagggtttgcttttcacgccgctcggtatgctgaccggcagtctgttccgcatgaaggaggacaatgaacaggacatttacggtctgtaccgcaaagatgagattggattactttcaaatacgatacaggatttgtttatcaaggggcattatgacgggcttaccggcatctacaacaggcgttatctggaaataaccattcggcagattatggcggcattgtcccgcgcccagtccaggatgagttttatgatgatagacgtagactttttcaaaaaattcaacgacacctacggccacggcgcgggcgacgagtgcctgaaagctatcgctgtaacactcaataatattgtaaccagaaaatccgattttgtcgcaaggtacggcgggggaagaatttgccgtcgttctgccgggtactga

SEQ ID NO: 25742 - protein, 304 aa, Unknown
  Obtained from environmental sample
  DOMAIN (209)...(302): GGDEF domain
  misc_feature (1)..(304): Xaa is any amino acid
MWLNHKVIKDGETVGIICSGMELSKITEQAISRYDKKETRVLMIDEKGVIQMDSALLGDDGFLIFESTKLLGGEINNPEFNAAVKEHLDNINGYFKEMTIEPRIVRLHSGRYKYAAITPVGTTNWSVVKFFDSSSLFAQTKLLPPFAIMAALFILFVLSSNNLIQGLLFTPLGMLTGSLFRMKEDNEQDIYGLYRKDEIGLLSNTIQDLFIKGHYDGLTGIYNRRYLEITIRQIMAALSRAQSRMSFMMIDVDFFKKFNDTYGHGAGDECLKAIAVTLNNIVTRKSDFVARYGGGRICRRSAGY

SEQ ID NO: 25743 - DNA, 885 bp, Unknown
  Obtained from environmental sample
  misc_feature (1)..(885): n is a, c, g, or t
atgtctgacaaagaaaacaataccgccgtcagcgaaaatgcatcacagcaaactgcgggcacagactttataagcgaatttatcaaggaagaccttgcggctggaaaattcaattatgtgcatacgcgcttcccgcccgaacccaacggctggctgcatatcggccactgcaaggcgttctttatcgactttagcatggcggaacgtttcggcggcaagtgcaatctgcgcttcgacgacaccaaccccgaaaaagaagacatctcctacgtcgaggcgattaagcgcgacatcaaatggatgggctacgattgggaagaccgcgaatattacgcttccgattattacgattacctgtacgatcttgcggtaaaaatcattaaaaaagggaaagcctatgttgatgatctaagcgacaccgaaatgagcgagtacagaggaacggctgtcgcggacaagaacaacattaccattactccgcccggcaaaaacagcccttacagagatcgttctgtcgaagaaaatcttgacctctttgcgcggatgcgcgcgggcgaattcgccgacggcgcgaaaaccctgcgggcaaaaatcgacatggcgcaccctaaccttctcctgcgtgatcctgtcatgtaccgcatacgccgcgaaacacattaccgcacaggcaactcgtggtgtatctatccgatgtacgatttccagcacccgctttccgatgcgaaagaaggaatcacgcattccctgtgttcgcttgaatacgaaatccaccgcccgctttacgaatggtttatcaaagaggccgaagtgtttccgtcccgccagatagaatttgcccgtcttaatttaagccataccgttatgagcaaacgctgcttttaa

SEQ ID NO: 25744 - protein, 294 aa, Unknown
  Obtained from environmental sample
  DOMAIN (39)...(294): tRNA synthetases class I (E and Q), catalytic domain
  misc_feature (1)..(294): Xaa is any amino acid
MSDKENNTAVSENASQQTAGTDFISEFIKEDLAAGKFNYVHTRFPPEPNGWLHIGHCKAFFIDFSMAERFGGKCNLRFDDTNPEKEDISYVEAIKRDIKWMGYDWEDREYYASDYYDYLYDLAVKIIKKGKAYVDDLSDTEMSEYRGTAVADKNNITITPPGKNSPYRDRSVEENLDLFARMRAGEFADGAKTLRAKIDMAHPNLLLRDPVMYRIRRETHYRTGNSWCIYPMYDFQHPLSDAKEGITHSLCSLEYEIHRPLYEWFIKEAEVFPSRQIEFARLNLSHTVMSKRCF

SEQ ID NO: 25745 - DNA, 867 bp, Unknown
  Obtained from environmental sample
  misc_feature (1)..(867): n is a, c, g, or t
gtgccagaagaattcaaaactgcggaactctgccttgaagcggttaaggagaataaccttgcgcttgaatatgtgccagaaaaactaaaaaccgctgaactttgccttgaaacggttcagcattgtggcgttgcgattaaatatgtgccaaaatcccttattactgctgaaatgtgccttgaagcggttaagcaaagtagctatgtgcttcaatatgtgccagaaaaatttaagactgccaaactttgccttgaagcggttaagcaaagtagctatgtgcttcaatatgtgccagaaaaatttaagactgccaaactttgccttgaagcggttaagcaaagtagctatgcgttttgctatgtgccagaaaaattaaagactgccaaattctgccttgaagcagttaagaaagatggctgggcacttggcaatgtgccagaaaaactaaagactattaaactctgccttgaagcggtgaagaactatggtagtgcccttaaatttgtgccagaagccttgaaaactgcggaactctgtgccgaagcggttaaaaataactacccggcaattaaatttgtgccagaaaacctaaagaccaccgaaatgtgcaatatagcgattaatcagaatggctatttgcttcaatatgtgtcagaaaacttaaaaacacctgaactatgctttgaagcggttaagaattgttgctttgcacttaaatatgtgccagaaaacctcaaaacagctgaactctgccttgaagcggttaaaaaagatggcggtaggcataaatatgaattgcttgaatatgtaccagaagaattgagaaaggaagttaaaaaagcacttaaacaaggaggtaaaaaatga

SEQ ID NO: 25746 - protein, 288 aa, Unknown
  Obtained from environmental sample
  misc_feature (1)..(288): Xaa is any amino acid
MPEEFKTAELCLEAVKENNLALEYVPEKLKTAELCLETVQHCGVAIKYVPKSLITAEMCLEAVKQSSYVLQYVPEKFKTAKLCLEAVKQSSYVLQYVPEKFKTAKLCLEAVKQSSYAFCYVPEKLKTAKFCLEAVKKDGWALGNVPEKLKTIKLCLEAVKNYGSALKFVPEALKTAELCAEAVKNNYPAIKFVPENLKTTEMCNIAINQNGYLLQYVSENLKTPELCFEAVKNCCFALKYVPENLKTAELCLEAVKKDGGRHKYELLEYVPEELRKEVKKALKQGGKK

SEQ ID NO: 25747 - DNA, 594 bp, Unknown
  Obtained from environmental sample
  misc_feature (1)..(594): n is a, c, g, or t
atgacacaattaaaggatgctttcaccgacccacgtgatggcaaagtgtacaaaaccgtgaagataggtgagcagatttggttagcggagaatttggcttatgaaatttatgatgtacctggcagaaaatgcaaatggtatggataccctcataaatatgacaatctccaaaaatatggtctgctttacgattgggaaacagccaaaatagcctgccccaccggttggcatttgccaagcgaacaagagtgggaaactcttgttgatttcgcaggtggcaaaaaaatagcaggaggaaaattgaaagcgcaaagcgggtgggaaagatctggcaacggctcagactactttggcttttccgccttgccgggcggagcaggcggcagcactcgcagtttcaccgacaaattcatcactattggcactcacggctattggtggggttctaacgaaaatgaaaacaacaacgcttattacctgcgtataatgaactggcgtgaagctgtccgctttggctttgaggataaaagctatttgctaagtgtccgttgcataaaagatatagaaaatttcttcacaaagaggggaatatga

SEQ ID NO: 25748 - protein, 197 aa, Unknown
  Obtained from environmental sample
  misc_feature (1)..(197): Xaa is any amino acid
MTQLKDAFTDPRDGKVYKTVKIGEQIWLAENLAYEIYDVPGRKCKWYGYPHKYDNLQKYGLLYDWETAKIACPTGWHLPSEQEWETLVDFAGGKKIAGGKLKAQSGWERSGNGSDYFGFSALPGGAGGSTRSFTDKFITIGTHGYWWGSNENENNNAYYLRIMNWREAVRFGFEDKSYLLSVRCIKDIENFFTKRGI

SEQ ID NO: 25749 - DNA, 672 bp, Unknown
  Obtained from environmental sample
  misc_feature (1)..(672): n is a, c, g, or t
atgacacaatttcaacagcaactcgcaaaagccaaaaacgatgccgagaaagcgcagatttgccttgaagcggttaaggaaaatggctggttacttcaacacgtgccaaaagaattcaggactgcgcagctctgcgatatagcggttaggcaagacggttctgcgcttaaatctgtgccagcgaaattcaaaacggctgaactctgccttgaagcggttaagaaggaaggcttggtacttcataatgtgccagaaaaattcaagaccgccgaactttgccttaaagcgattaaggataatggcgatgcgtttgaatatgtgcccgaagctcttatcactgacgaattttacattcaagcggtaaaacagagcggctatgtaattaaatttgtgccagaaaaactcaagacagcggaactttaccttgaagcggttaagactgctggttttgtaattgaagatgtgccagaaaaatttaagaccgctgaactttgccttctagcggttaaagattgtagttgggcacttaaatatgtaccagaaaaattcataactgcggaactttgctttgaagcggttaagcaaaatcacaatgcacttttagatgtaccagaaaaattcagaacagcggaactttatcttgaagcagtaaacaaaatggttatatgctaa

SEQ ID NO: 25750 - protein, 223 aa, Unknown
  Obtained from environmental sample
  misc_feature (1)..(223): Xaa is any amino acid
MTQFQQQLAKAKNDAEKAQICLEAVKENGWLLQHVPKEFRTAQLCDIAVRQDGSALKSVPAKFKTAELCLEAVKKEGLVLHNVPEKFKTAELCLKAIKDNGDAFEYVPEALITDEFYIQAVKQSGYVIKFVPEKLKTAELYLEAVKTAGFVIEDVPEKFKTAELCLLAVKDCSWALKYVPEKFITAELCFEAVKQNHNALLDVPEKFRTAELYLEAVNKMVIC

SEQ ID NO: 25751 - DNA, 546 bp, Unknown
  Obtained from environmental sample
  misc_feature (1)..(546): n is a, c, g, or t
atgaatggaaatggcgtnggcgttgtctttggcgttggtggtttgtttggagttataataacaccaggagagataaaaaaccttggagttgttgattcttacattaaaggaaaaaacaaacttcgtaatatagccagtggtttgttaacatataatcttggcacggtaaggaactgctatnttataggcactgtgataggcggtcaaaccggaggactagtaggccaaaactctcgtactggagacggaataatcaatagctattctgctggcacggttattggtcaagaagaaaacgaatgctgcggtgggttagtagcgtataatcacggtaatgtaagtaactgttattcttcctgcaaggttatagggaaaggattagttggcgggttgatggttaatattaaacaaggcagcgtagaaagcataaccacagagcaaatgaagcaaaaagaaactttcgttgattgggattttgaaaacgtatggggaattgacagcaaaataaacaacgggtatccatatctaaaaggaggcaaaaaatga

SEQ ID NO: 25752 - protein, 181 aa, Unknown
  Obtained from environmental sample
  misc_feature (1)..(181): Xaa is any amino acid
MNGNGVGVVFGVGGLFGVIITPGEIKNLGVVDSYIKGKNKLRNIASGLLTYNLGTVRNCYXIGTVIGGQTGGLVGQNSRTGDGIINSYSAGTVIGQEENECCGGLVAYNHGNVSNCYSSCKVIGKGLVGGLMVNIKQGSVESITTEQMKQKETFVDWDFENVWGIDSKINNGYPYLKGGKK

SEQ ID NO: 25753 - DNA, 1494 bp, Unknown
  Obtained from environmental sample
  misc_feature (1)..(1494): n is a, c, g, or t
ttggccgagcattcttccaattgcagccggataactcctaacatcacccgcccttccctgctgcctttgcccaaaaacaagccttgcccttcaacccatcctgaaacagcgcctcttaaaatattgattagtttcggaatggaagactccgccagtcttggccccgcgcttgcaaaaacgcttgcagaccatcaaaacatagaaatcaccctgttaaaaggaaaattatcaaaaaaagaaaattattcctcactcctaattcctaattcctcattaaaagaatccattcccaatctcaatgaacaactgacagattacgatctaatcataacccatttcgggcttacctcatttgaggcgttgtacgcgggcgttccggtattgctggcctcgcccaccgtataccacgaaaaactggtaaaaaaagcgggcttttggaagctcggcaaaaggaacgctaaaaaaaagttaagcgctatgttgaaaaagaacgaaacgttcttttcttactttcatgatttgaaaaatcactgcgttaaactggcaaataaattcggtcttgaccgtgagcctcaacaaagccttgcggaacttgtaaacggtttttctcccgatgtcagccgcaactgccctgtctgcggcgcggcgcttaacggtccggtattggcgcgtttccctgaacgcagttatcttcgttgtaaagggtgcggggcgataagcatgaaccggattaatcctatgcccattgaatatggcaaagaatattttttcgagcaataccaaaaacaatacggcaaaacctacattgaggattttccgaatttaactgcaatggcgaaacggaggctcgcggagataaaaaaattaggaaataggaatgaggaattaggaataaagaatacctctcactcctctaatcttctggatattggctgcgcttacggggcgtttctcgcggctgcgaaagaggagggcttttcccctcagggcatagaccccgccgaagacgcaatccgttatgtgacacaaactctcggcatccccgctacgcaaggctatttcccgactcccgactcccaactcccgactcccggctataatgtaatatccctctggtatgtcattgaacatttccgtgactgcgttcccgctttggcggaaatacggaagctgctcaaaccaggcggagtgctggctttcgctacgccttcgttcacggggatttcgggcctcagttcgctgaaacgttttcttgaaaaaagtccgcaggatcactggactgtctggtccccggcggtatgccggaaagccctgggaaaaacaggttttaaggtaaaaaaaatcgtgagctgcggtcatcatcctgaacgcttcccgttattcggaaaatttgcgcaaaacaaaaaatcgctgttgtacagtctgttgatggcggtaagcagaatttttgcgttaggcgacacaattgaggtttacgctgtaaaggattcttaa

SEQ ID NO: 25754 - protein, 497 aa, Unknown
  Obtained from environmental sample
  DOMAIN (308)...(400): Methyltransferase domain
  misc_feature (1)..(497): Xaa is any amino acid
MAEHSSNCSRITPNITRPSLLPLPKNKPCPSTHPETAPLKILISFGMEDSASLGPALAKTLADHQNIEITLLKGKLSKKENYSSLLIPNSSLKESIPNLNEQLTDYDLIITHFGLTSFEALYAGVPVLLASPTVYHEKLVKKAGFWKLGKRNAKKKLSAMLKKNETFFSYFHDLKNHCVKLANKFGLDREPQQSLAELVNGFSPDVSRNCPVCGAALNGPVLARFPERSYLRCKGCGAISMNRINPMPIEYGKEYFFEQYQKQYGKTYIEDFPNLTAMAKRRLAEIKKLGNRNEELGIKNTSHSSNLLDIGCAYGAFLAAAKEEGFSPQGIDPAEDAIRYVTQTLGIPATQGYFPTPDSQLPTPGYNVISLWYVIEHFRDCVPALAEIRKLLKPGGVLAFATPSFTGISGLSSLKRFLEKSPQDHWTVWSPAVCRKALGKTGFKVKKIVSCGHHPERFPLFGKFAQNKKSLLYSLLMAVSRIFALGDTIEVYAVKDS

SEQ ID NO: 25755 - DNA, 516 bp, Unknown
  Obtained from environmental sample
  misc_feature (1)..(516): n is a, c, g, or t
ttgcgcctgttatacggcaaaaaaaaatacaaacccgtctttctaaacccatcaagcgagggactcccaagcctgtacccgtttgacggcgtgggcatttatgacagggagcgctttatacagttgggaggttttgacggaactataacaaacagtttctggcagcttatggattttggattccgcgcatacctctggggagaggaaatatcccttagtcagacgctcaaattttcttatgaggccgctatccctgccgaggacgattcggcgggtaatgactattcccgcttttatcttaaaaaccttgctcctgtgttccgcaatgactgcgcctatctgcctatgcgccgctttcccggttttcttttcaaagcgaataacggttttttgggcgcatgggatgatttctccgagagccgcaaatgggtagataccaacagcttccggtggcgctgcaatcccaaaaccattgccagctactggaatctggaaaccctgaataaggaggcctag

SEQ ID NO: 25756 - protein, 171 aa, Unknown
  Obtained from environmental sample
  misc_feature (1)..(171): Xaa is any amino acid
MRLLYGKKKYKPVFLNPSSEGLPSLYPFDGVGIYDRERFIQLGGFDGTITNSFWQLMDFGFRAYLWGEEISLSQTLKFSYEAAIPAEDDSAGNDYSRFYLKNLAPVFRNDCAYLPMRRFPGFLFKANNGFLGAWDDFSESRKWVDTNSFRWRCNPKTIASYWNLETLNKEA

SEQ ID NO: 25757 - DNA, 762 bp, Unknown
  Obtained from environmental sample
  misc_feature (1)..(762): n is a, c, g, or t
gtgttggcaattgtcttgcaggcccgcgttgattcctcgcgtctgccggggaaggcgctgctcccgcttgggggaaggccgatcgtattacgcgtaatggaagccctgaacaaaataccggcggaactgagaatactggcatgccccgaagattcaaaatcagcttttgcggaacttgcccaagaagcgggtttttcgctgtttgccggccccaaagaagacgtgctgggccgcttctgcctttgtctgcgtaatttcggcatacgacacataataagggctacaggcgataatccttttgtttttgcggacgcggcctatgccattataaccgagggattggcccttggcgctgactacgccggatacagcggcttgcctcccggcgcgggagttgagtcggtaaacgcgaaggccctgctgctcgccagaaccgaagccgcctcccaatatgatcgtgaacacgtctgcccctacctgtatacacaccctgaaaaatttctcctccaccgcccgcttgccccgcagcattggcaaggccctgaaattcgcctaacggtagacacccaacaggactacgaacaggcgcaagttttgtacgccgcgctggatagcatggaaaaggccggtaagctggctgaaggcgaacgttataagggggaagtgattattagggcatatagggaattagggaacagggaacagggaacagggactgaagattgttattcgcagaccaatcgtgttggtaacaagcaatga

SEQ ID NO: 25758 - protein, 253 aa, Unknown
  Obtained from environmental sample
  DOMAIN (3)...(212): Cytidylyltransferase
  misc_feature (1)..(253): Xaa is any amino acid
MLAIVLQARVDSSRLPGKALLPLGGRPIVLRVMEALNKIPAELRILACPEDSKSAFAELAQEAGFSLFAGPKEDVLGRFCLCLRNFGIRHIIRATGDNPFVFADAAYAIITEGLALGADYAGYSGLPPGAGVESVNAKALLLARTEAASQYDREHVCPYLYTHPEKFLLHRPLAPQHWQGPEIRLTVDTQQDYEQAQVLYAALDSMEKAGKLAEGERYKGEVIIRAYRELGNREQGTGTEDCYSQTNRVGNKQ

SEQ ID NO: 25759 - DNA, 1032 bp, Unknown
  Obtained from environmental sample
  misc_feature (1)..(1032): n is a, c, g, or t
atgcctgataatctttatcatcctgtaaaaatcggttcacttgaactgcccggcaacctttttctggcccccgtggccggatacacggatagggcgtttcgttccatttgtgccgaatgcggcgcggatttttcttttaccgagcttgcctcttccgaggccctgacacggggaggaaaggcgacaaacaacctgattcgccggggagaaaacgaaaagcgttacgctgtccagcttttcggtcatgacccgcaaacgatgtacctcgcggctctgtccctggcaccgcttcaccctgaggcggtggacataaactgcggctgtcccgtccccaaggtagttaagacaggcgcaggctccgcgctgatgaaggatcccaccttgctgggacgcattgtagaagcgttcgtccgcgcttccggcgagtcattgggaggcgtgccggttacagtgaaaatgcgctcaggctgggattcacagcacttgaattatgccgaatgtgcccgcatagccgccgaagaaggggccgccatggtaacccttcatcccaggacaaaagcgcagggctacggcggcaaaagcgaatggcttcaccttgccgaccttgtttcccgcctaaacataccggttgcaggctccggggatcttttttcgcccgaagacgcagagcgtatgctgaaggaaactggttgtgcagccgttatgttcgcacgtggcgcggaggggaaccccttcatcttttccgaaactcgctcttttctagcaacaggctcatgggtgccagcgagctttgaagagcgcgtttctgcggccctgcgccacctaagcatgctttctgaagacatcggcgagagggcggcctgcaaagaaatgcgaaaacagttctgcgcctatactaaagcgccgccagggcaaaaaggagaagccggctccgccgccctgcgggacaggcttgtctttgcggagactatcgcggaatacagggctattttggggggagtttggaataaccgtcaaaaattgaaaatgtga

SEQ ID NO: 25760 - protein, 343 aa, Unknown
  Obtained from environmental sample
  DOMAIN (21)...(331): Dihydrouridine synthase (Dus)
  misc_feature (1)..(343): Xaa is any amino acid
MPDNLYHPVKIGSLELPGNLFLAPVAGYTDRAFRSICAECGADFSFTELASSEALTRGGKATNNLIRRGENEKRYAVQLFGHDPQTMYLAALSLAPLHPEAVDINCGCPVPKVVKTGAGSALMKDPTLLGRIVEAFVRASGESLGGVPVTVKMRSGWDSQHLNYAECARIAAEEGAAMVTLHPRTKAQGYGGKSEWLHLADLVSRLNIPVAGSGDLFSPEDAERMLKETGCAAVMFARGAEGNPFIFSETRSFLATGSWVPASFEERVSAALRHLSMLSEDIGERAACKEMRKQFCAYTKAPPGQKGEAGSAALRDRLVFAETIAEYRAILGGVWNNRQKLKM

SEQ ID NO: 25761 - DNA, 1524 bp, Unknown
  Obtained from environmental sample
  misc_feature (1)..(1524): n is a, c, g, or t
ttgtcaactgacaaaaaaacggcggacgttacagtaactacaacaattgtaagccgtaataaaaaaggcggcgttgttgtttgcatacgtctgcttgctcccgacggaaaatgcgcggtggagaattccttccttcttgtttttgacggttatgaagaggcttggataaaagagacgttgcatattcaagacgttgcgctctggtctgcggaaaacccgaatctgtaccgcgccatcgtacacttggaaaaagacggcatagcaggggagagtgcggagaccgtattcggcgtgcgtaccgttgaatttgcgtataacaaaggaatgacagtaaacggagagaaagtaaaattgaaaggagtgtgtttgcaccatgactgcggcataacgggttccgcgtactatgacgctgtttggcggagacggttgaacgtattaaaaactatcggctgtaacgcgataaggacaagccacaatccgcctgcggaagaatttttagatttatgcgacgagatgggcttttatgtaatagacgaatgttttgacaaatggaagagcggctattacgcctctcattttgacgctgacgcacagcgtgatttgacggattttattctgcgcgacagaaaccacccgtctgtaattatatggagcgtcggcaacgaagtggaaaatcagggtgcggacagtatgcttgaaatacaaaaaaaattaaccgccattgtccacagtcttgatttgcgtcccgtgacctgcgcccttgcccctcatgcgattccgcgcggtttggtgaacgagccgcctgaagagcttgccaaattaacaaaaaaagtaacaaaggatgttgatatattgggtcttaattaccatgagccgttatacgaatattacataaaggcaatcgaaaagcccattgtaggtactgaatgttatgagtattactcaagcgtagggactaattttgaagacgtttgcgataagaacacgtggcaatttgttcttgaaaatgaaaatgtgataggacaatttatctgggctggaattgattatcttggggaaagctcttggccttcaaaaggctggtctggatcaattctggacatttgcggctttatgaagcctaacgcgtttttccgcaaaagcttatggacgaatgagcctttcatctacatggctttttacgatcaaagtaaaaaaaatgactacacacggggacgatggtcatttccccaacttacatcacaccttaaccacgagcattttttgcgttttactgtaaagatggctgtttttacaacctgtgaagaggttgaattgtggattaatggtaagaaaatggggcgcagaaagagggctgattttaaaaatggaatagtagagtggactattgaatacacgcagggtaatattgaggtaaaaggaataaacgcgggcaaagaggtttgttcctatattttaaagacggcggacaaggcgcggaagataaaacttatttctgataacgctaatctaaaacgcgggtga

SEQ ID NO: 25762 - protein, 507 aa, Unknown
  Obtained from environmental sample
  DOMAIN (8)...(99): Glycosyl hydrolases family 2, immunoglobulin-like beta-sandwich domain
  misc_feature (1)..(507): Xaa is any amino acid
MSTDKKTADVTVTTTIVSRNKKGGVVVCIRLLAPDGKCAVENSFLLVFDGYEEAWIKETLHIQDVALWSAENPNLYRAIVHLEKDGIAGESAETVFGVRTVEFAYNKGMTVNGEKVKLKGVCLHHDCGITGSAYYDAVWRRRLNVLKTIGCNAIRTSHNPPAEEFLDLCDEMGFYVIDECFDKWKSGYYASHFDADAQRDLTDFILRDRNHPSVIIWSVGNEVENQGADSMLEIQKKLTAIVHSLDLRPVTCALAPHAIPRGLVNEPPEELAKLTKKVTKDVDILGLNYHEPLYEYYIKAIEKPIVGTECYEYYSSVGTNFEDVCDKNTWQFVLENENVIGQFIWAGIDYLGESSWPSKGWSGSILDICGFMKPNAFFRKSLWTNEPFIYMAFYDQSKKNDYTRGRWSFPQLTSHLNHEHFLRFTVKMAVFTTCEEVELWINGKKMGRRKRADFKNGIVEWTIEYTQGNIEVKGINAGKEVCSYILKTADKARKIKLISDNANLKRG

SEQ ID NO: 25763 - DNA, 423 bp, Unknown
  Obtained from environmental sample
  misc_feature (1)..(423): n is a, c, g, or t
atgcagttaatccgcgcccccggacaattcgatgtaatcgttacatcaaatctttttggggacatactttccgatgaggcgtccgtgcttacaggctcaatcggtatgcttgcgtccgcaagtcttggcgctccagtgccgggtggaaccagacccggaatgtacgagcctattcacggctccgcgccagacatcgcggggaaggacattgccaacccgcttgcggcaattctttcagcggcgatgatgctccgctactcattcaatcttgagaaggaagcgcagtccattgaaacagcggtaaacaatgtgctggatcagggactgaggacaagggacattgcaagcagaagcacagcatccggcgagaaaattgtaggtaccggggaaatgggcgaagcggtactcaaagctattcggtaa

SEQ ID NO: 25764 - protein, 140 aa, Unknown
  Obtained from environmental sample
  DOMAIN (1)...(135): Isocitrate/isopropylmalate dehydrogenase
  misc_feature (1)..(140): Xaa is any amino acid
MQLIRAPGQFDVIVTSNLFGDILSDEASVLTGSIGMLASASLGAPVPGGTRPGMYEPIHGSAPDIAGKDIANPLAAILSAAMMLRYSFNLEKEAQSIETAVNNVLDQGLRTRDIASRSTASGEKIVGTGEMGEAVLKAIR

SEQ ID NO: 25765 - DNA, 1005 bp, Unknown
  Obtained from environmental sample
  misc_feature (1)..(1005): n is a, c, g, or t
atgcccgccgaattcggcgagcgcgtccgctatataaaggaacatactcctcacatggaaaaggccgccctgtccgtgcattgccacaacgacctggggcttgcggtggcgaacagtatcgccgccatcgcaaacggcgcggatcaggttgagtgtacggttaacggaataggcgagcgcgccggaaacgcatctctggaagaagtggtaatgggactacgcgttcgccacgactttttttccgccgacacaagaatcgacagcacgcagatatacgcggcaagccgtcttgtgtcacaggtaaccggtgtgaaggttcagccgaacaaggcgattgtcggcgacaacgcctttgcgcatgaagcgggaattcaccagcacggagtattggcgaaaagggaaacctacgaaatcatgaccccacagtcaatcggcattcctcaaaaccgcatggttcttggaaaacactcgggccgccacgcttttgaagagcgcctaaaagatttatgtctatccgtcagcgcggaagcgttagagaaaatattcgccgacttcaaagaccttgccgataaaaagaaagtggtcagcgaccgcgacattgaggccctggtaatggacagggcggtctccgttcccgaaacatggaagctggatcattgggcggtaaacacaggctccgctttgggcgcggtgggcgttatccgcttgcagcacaaagacggcaggtttgaaaaattggtgtgcctgggcgacggtcccatcgactcaattttcaaagcgatcaatcaaattataggcaaagaacctgagcttgagctttacgagatcggcgctattaccggcggttcttcttcgcaaggcgagacaatggtaaagatcgcgatggacggacgtcgctggaacgggcgcggtgtttccaccgatgtaattgaatcttcgataatggcttacctttccgcggttaacgcgatggagtgggacttagcgcaaagtggagaagagtag

SEQ ID NO: 25766 - protein, 334 aa, Unknown
  Obtained from environmental sample
  DOMAIN (3)...(104): HMGL-like
  misc_feature (1)..(334): Xaa is any amino acid
MPAEFGERVRYIKEHTPHMEKAALSVHCHNDLGLAVANSIAAIANGADQVECTVNGIGERAGNASLEEVVMGLRVRHDFFSADTRIDSTQIYAASRLVSQVTGVKVQPNKAIVGDNAFAHEAGIHQHGVLAKRETYEIMTPQSIGIPQNRMVLGKHSGRHAFEERLKDLCLSVSAEALEKIFADFKDLADKKKVVSDRDIEALVMDRAVSVPETWKLDHWAVNTGSALGAVGVIRLQHKDGRFEKLVCLGDGPIDSIFKAINQIIGKEPELELYEIGAITGGSSSQGETMVKIAMDGRRWNGRGVSTDVIESSIMAYLSAVNAMEWDLAQSGEE

SEQ ID NO: 25767 - DNA, 1005 bp, Unknown
  Obtained from environmental sample
  misc_feature (1)..(1005): n is a, c, g, or t
atgggtattacaacggttgaaatagagaaatttctcgtttttaaggacaaattttcagcggatttttgcaatggggtaaatatttttataggcgctaacggcagtggaaaaacaacgcttatgaaggtcatgtattctgcgtgtaaattattattcaacgagccggatgagaatgaaaatcagaacagactacttcatcagtactttgattccggagaagatatagtatcagatggcagaacagtgctcgttaattttaacaattcaacacaaaacgcagaaatttcatatgttaaattttttataggtcgtttagatagatgcattgtttcagattgggtatccagttttaaacccccggcaatttatattcccccggaagatatgctttcacattcaaaagggtttcttgctcttgttaatgagcgaaaaatgccgtttgaccagacgcagattgatatactttcaaaagcctcaatacctgaaactaacagtattacgccaaacgcggaaaaagttattgacaggattaaagctatcatcagcggaaatgtactttatgagaatgatacgttttatataatcaaagagagcggagaaaaagtatctttttcatttgaggcaagcggtttccgtaaattcggtttgttgttaaaactgttacgcaatgggctgctggaaaacggcacgattctgttttgggatgagcctgnaaacagcctgaaccctgagatattacctgatctggttaatatcttgcttgaattacaaaaaaacggcattcaaatatttgtcgctacacacagttacgcattagcccgatggtttgagttgaatatgacgaatgaaaatacgcttaagtattttaatatgcgaaaaaaagaaaatggcattgaatataataccgctgacacgtactcaaaattgaatcagagtgtccttgaagatgccggcgataaattgtttaacgctgttgtgaaaaatggaatgggagtaaaaagttaa

SEQ ID NO: 25768 - protein, 334 aa, Unknown
  Obtained from environmental sample
  DOMAIN (24)...(281): ABC transporter
  misc_feature (1)..(334): Xaa is any amino acid
MGITTVEIEKFLVFKDKFSADFCNGVNIFIGANGSGKTTLMKVMYSACKLLFNEPDENENQNRLLHQYFDSGEDIVSDGRTVLVNFNNSTQNAEISYVKFFIGRLDRCIVSDWVSSFKPPAIYIPPEDMLSHSKGFLALVNERKMPFDQTQIDILSKASIPETNSITPNAEKVIDRIKAIISGNVLYENDTFYIIKESGEKVSFSFEASGFRKFGLLLKLLRNGLLENGTILFWDEPXNSLNPEILPDLVNILLELQKNGIQIFVATHSYALARWFELNMTNENTLKYFNMRKKENGIEYNTADTYSKLNQSVLEDAGDKLFNAVVKNGMGVKS

SEQ ID NO: 25769 - DNA, 843 bp, Unknown
  Obtained from environmental sample
  misc_feature (1)..(843): n is a, c, g, or t
atgaacaacgcgcgtctgggagtggccgcccagggcgtaggcatcgccgaagccgcctaccgcgaagccgatctttacgccgcaaagcgcattcaattcggcgcgcccgtgcgcgaccttccccctgtttntgaaatgctcaccgagatgaaagtcgccgtagaagccggccgcgccctgttatacgaaacagcccgctttgtcgatttaaaggaagttcttgaagaatactccgacaaacaccccgaagaaaaaggcgaaattatcgaggagaaaaagaaatacgcgaaactcgcggggcttttcacccccgtggtaaaagcctacgcgaccgaaacggcgaacaaagtttccaacgacgcgattcaaatccacggcggaaccggctacatgaaagagtttaacatcgagcgccactaccgcgacgcgaggatcaccaacatctacgaaggcacgacgcagttacaggtagtcgccgccataggtcccgtaacatcgggcgtcgctcaaatgatactggacgagtacgacggcgcaaattacacccacggcgcggagttactcgcaaaagtccgcgaagcgcgaaaagtttttgacgaggcgcttgagttcgccaagtcctgcaaagagcacgagcagtttttaacgtaccactcgcgcaggcttgtggagatggcgacagatttgattattagctacttgttcctgcgtgatggcaactttagcgaacgcaagcaaaaggtagcggagatatttatagcgaagatgacatcgcggataaaggcgaaccgtgattttatcatgagcgagaatgggacgctgttgaaaaatataaggcggtaa

SEQ ID NO: 25770 - protein, 280 aa, Unknown
  Obtained from environmental sample
  DOMAIN (6)...(154): Acyl-CoA dehydrogenase, C-terminal domain
  misc_feature (1)..(280): Xaa is any amino acid
MNNARLGVAAQGVGIAEAAYREADLYAAKRIQFGAPVRDLPPVXEMLTEMKVAVEAGRALLYETARFVDLKEVLEEYSDKHPEEKGEIIEEKKKYAKLAGLFTPVVKAYATETANKVSNDAIQIHGGTGYMKEFNIERHYRDARITNIYEGTTQLQVVAAIGPVTSGVAQMILDEYDGANYTHGAELLAKVREARKVFDEALEFAKSCKEHEQFLTYHSRRLVEMATDLIISYLFLRDGNFSERKQKVAEIFIAKMTSRIKANRDFIMSENGTLLKNIRR

SEQ ID NO: 25771 - DNA, 1302 bp, Unknown
  Obtained from environmental sample
  misc_feature (1)..(1302): n is a, c, g, or t
gtggtgaactgtgccggtactgttgtttctatcgacggcagcgcaaggcccgcgacacctgaggataagtttaccatgtcagcggcttgcaaaccggagccgggtattcctgaaaattttatgaactttattaggtgggcatctaccgggaatagaaatcttatggattggaaactaaccgcctatggggttgctttattcggaaatccaacggatcggatcgtcaacctgtacggaaccgggggcaacggaaaaggaacggaactaagaaccgtgtttaaaattgcgggatcttatgccgtgccgcttccccgcaccatagcaatcaaggagccgaattcatcaagccgctttgaccgcgaggctcttgtggggaaacgcatggccgcactgttcgatctcaagccggaaaacggcaagttaaaccttgatgatcttaagactttgtgcggaaacggcgacccgcagtccgtggagccgaagggcaaaccgaggtacaccgcggtcatttgctgtaagatttttatcgcttcaaacgacaaaattcccatagattccttcggagagtcggaaaaaaggcgtttttacctggttccctatgataaccatattgaggagaaagacgaggggattgaagagcgttttaagcctgaatacgggaaaatcctcaatttgctcatcgagtacgcagtaagatattttaaaaatgggagaaaaatgcccccatgtgccatcatagaccaggcaacagctgaatattttgacagccaagaccttgtggggcagtttatccgggataatttcgaggcagacaagatattgtgcgttggaaaaacggaactatacaacaatttttcaaaatggtgcggagaacaacatgggatttttaagcccatgaaaccgaaattctttgctttagccttagaaaagatgggaattgtcgtgaaagttaaatggattgacggaaaaacaaaaagggtttttgaaggcatttctgtagccttacaaagaaacctaaatttcaactccgagcttcgcgaaaataaagaatttcagaccgacttgaattttgagaaattgtgtaaggattgtaatgaaggctctaaaaccgatactgaaattacagatttacaaagttacaaaaattctgagtcgctaaccgataataaggttttacaacaaccagatacaatttcttgtaattctgtaagccaagaaaatgctaaccaaacggagccggagccttaccatagcgaagagcaaaaacggctttggaaggataatgaaacggtcctttattga

SEQ ID NO: 25772 - protein, 433 aa, Unknown
  Obtained from environmental sample
  DOMAIN (2)...(314): Poxvirus D5 protein-like
  misc_feature (1)..(433): Xaa is any amino acid
MVNCAGTVVSIDGSARPATPEDKFTMSAACKPEPGIPENFMNFIRWASTGNRNLMDWKLTAYGVALFGNPTDRIVNLYGTGGNGKGTELRTVFKIAGSYAVPLPRTIAIKEPNSSSRFDREALVGKRMAALFDLKPENGKLNLDDLKTLCGNGDPQSVEPKGKPRYTAVICCKIFIASNDKIPIDSFGESEKRRFYLVPYDNHIEEKDEGIEERFKPEYGKILNLLIEYAVRYFKNGRKMPPCAIIDQATAEYFDSQDLVGQFIRDNFEADKILCVGKTELYNNFSKWCGEQHGIFKPMKPKFFALALEKMGIVVKVKWIDGKTKRVFEGISVALQRNLNFNSELRENKEFQTDLNFEKLCKDCNEGSKTDTEITDLQSYKNSESLTDNKVLQQPDTISCNSVSQENANQTEPEPYHSEEQKRLWKDNETVLY

SEQ ID NO: 25773 - DNA, 609 bp, Unknown
  Obtained from environmental sample
  misc_feature (1)..(609): n is a, c, g, or t
gtggatagcggaaaacgagggcgcgaagttttggatgggcgtgttaaccgaactgaaaaaccgcggcgttcaagacatcctcatcgcctgcatgacggggctttcgggttccccgaagccgtacggtcaatatatccgaacacccgcgtccaactgtgcattgtccacatggtgcgcaattcgacaaagtttgtttcttacaaagatttgaaaaaagtatgcgccgatttgaagacgatatattcagctaacactgaagaagccggacatgaggcgttggaagatttcggaaagaaatggaatgacaaatatccgatgatatataaatcatgggaacggcgctggggggacttgagcgagttttttaaatacccgcccgaaatccgccgtgcgatttatacgactaacgccattgagtctttgaattatcagcttcgaaaagttactaaaaacagatcgacattttcaaccgatgacgctataattaagttactgtatttggctatcaggaacgcgtcggaaaagtggactatgccgataagggaatgggggcaggctctaaaccagtttgccattgagtttggaaaagaacgggttccgttcttatga

SEQ ID NO: 25774 - protein, 202 aa, Unknown
  Obtained from environmental sample
  DOMAIN (1)...(179): Transposase, Mutator family
  misc_feature (1)..(202): Xaa is any amino acid
MDSGKRGREVLDGRVNRTEKPRRSRHPHRLHDGAFGFPEAVRSIYPNTRVQLCIVHMVRNSTKFVSYKDLKKVCADLKTIYSANTEEAGHEALEDFGKKWNDKYPMIYKSWERRWGDLSEFFKYPPEIRRAIYTTNAIESLNYQLRKVTKNRSTFSTDDAIIKLLYLAIRNASEKWTMPIREWGQALNQFAIEFGKERVPFL

SEQ ID NO: 25775 - DNA, 852 bp, Unknown
  Obtained from environmental sample
  misc_feature (1)..(852): n is a, c, g, or t
atggtcatggcacgaaagaaggagaagaaagaaaaagatattatcgaccaactgcttgataatatcgacttccgagggttaacccaggacgaggttgtagggcaagacggcttaataaaacaactgacaggaagaatactccagaaagcccttgaagcggaaatgactgagcatcttgggtatgaaaagaattcaaacacgggagacaacagcgggaacaacaggaacgggcacacggaaaaaacggtcttacttgagaatcaaagcgcgaccatagaagttccacgggacaggaacggcacttttgaaccggtaataattcccaaacatgaaaaacgcgttccgcttttcaacgatcaaatcatttcgatgtactcccgtgggatgagcgaccgcgagatacagggacatcttgaagaaatctataacattgaagtgtcgcctgatttaataagccgcgtgacaaacgcggtgttggacgaagttaaagaatggcagaaccgcccgcttgaaaaatcatatccgattttgtatttggacgcgctgagggtcaaaggtaaaatggatggaaaaagctgcatgaaaagcgtttatatggctcttgcggtcaattttgaaggaaaaaaggaagttttggggctgtggatagcggaaaacgagggcgcgaagttttggatgggcgtgttaaccgaactgaaaaaccgcggcgttcaagacatcctcatcgcctgcatgacggggctttcgggttccccgaagccgtacggtcaatatatccgaacacccgcgtccaactgtgcattgtccacatggtgcgcaattcgacaaagtttgtttcttacaaagatttga

SEQ ID NO: 25776 - protein, 283 aa, Unknown
  Obtained from environmental sample
  DOMAIN (3)...(282): Transposase, Mutator family
  misc_feature (1)..(283): Xaa is any amino acid
MVMARKKEKKEKDIIDQLLDNIDFRGLTQDEVVGQDGLIKQLTGRILQKALEAEMTEHLGYEKNSNTGDNSGNNRNGHTEKTVLLENQSATIEVPRDRNGTFEPVIIPKHEKRVPLFNDQIISMYSRGMSDREIQGHLEEIYNIEVSPDLISRVTNAVLDEVKEWQNRPLEKSYPILYLDALRVKGKMDGKSCMKSVYMALAVNFEGKKEVLGLWIAENEGAKFWMGVLTELKNRGVQDILIACMTGLSGSPKPYGQYIRTPASNCALSTWCAIRQSLFLTKI

SEQ ID NO: 25777 - DNA, 1191 bp, Unknown
  Obtained from environmental sample
  misc_feature (1)..(1191): n is a, c, g, or t
atgaaagataccctgtcccaggtggatcttatccgggaagcgtttcattacaagagccgctttgagggatccactatggtgtttaaaattgactgccccgtgaccgaagacccgggttttccctggctggtgaaggatctggcgctgctggcgcagaccggtttcagggttgttatagtagtcggggcaaaggaagctatagatcaggttttacaggggcaagagataccttccgctttcaacttcgatcccgtagagcctgtgcgaatcaccgaggcgcgcgcgatgccgtttgtggagatggcggcgtttcatgtggcaacccgttttatgaccttcctctccggcagcagggtggacgctgtaataggcaactttgtaagggcaaggggcatcggcgtaattaacggcgtcgatacggagcatacgggcactgtcgataaaatctacacggactcgctaaaaagagtgttaaatttgggcatgattccgattcttccctgtatcggctggagtccgtcgggcaagccgtacaatgtgccgagcgacgaaatcgcccttgccgtctcgaaagcgcttggggcgatcaaattgttcattgtaacagccgccgacggcttgaatattacaaggcttaccccaaaagaggcggaagatttgataaaaaaaggctccaacttcatgcgggagctgaaacttgccctaaaagccagtcaggaaggcgtccacagggcgcatattatcgatggaaggcaggaaggagccgttttaaaggagatttactcgaacttaggcgtaggaacgatgatttataccgatgaatacgactcgatccgccccttacactccggggatttgcccgatattctgcggttaatggaacctttaatgcaaaaaggcgttcttgtcaggcggaatcccgaggaaatacaggaaaaaaaggacgctttctccgttttagatattgacggctctatccgcgcctgcggtgcgttggttgactggggcgaaaatcagggagaaattgccgccgtagcgacagacccgaattataccgatctaggtcttggcagaaaaattgtcggcttcctaatcgaaaaggcaaaaaaaagcaaaatgaagcgcgtttttgtgcttaccactcaaacacaggactggtttgaatcgctgggtttaaagacgcgcctgtag

SEQ ID NO: 25778 - protein, 396 aa, Unknown
  Obtained from environmental sample
  DOMAIN (24)...(249): Amino acid kinase family
  misc_feature (1)..(396): Xaa is any amino acid
MKDTLSQVDLIREAFHYKSRFEGSTMVFKIDCPVTEDPGFPWLVKDLALLAQTGFRVVIVVGAKEAIDQVLQGQEIPSAFNFDPVEPVRITEARAMPFVEMAAFHVATRFMTFLSGSRVDAVIGNFVRARGIGVINGVDTEHTGTVDKIYTDSLKRVLNLGMIPILPCIGWSPSGKPYNVPSDEIALAVSKALGAIKLFIVTAADGLNITRLTPKEAEDLIKKGSNFMRELKLALKASQEGVHRAHIIDGRQEGAVLKEIYSNLGVGTMIYTDEYDSIRPLHSGDLPDILRLMEPLMQKGVLVRRNPEEIQEKKDAFSVLDIDGSIRACGALVDWGENQGEIAAVATDPNYTDLGLGRKIVGFLIEKAKKSKMKRVFVLTTQTQDWFESLGLKTRL

SEQ ID NO: 25779 - DNA, 510 bp, Unknown
  Obtained from environmental sample
  misc_feature (1)..(510): n is a, c, g, or t
gtgatttgggcaagggcgagttttttcgcctccgtgccggaaacaaccagctttccggtaacgttggaatacagggcggcttggggatcattgaagctgacggcttcaagagccgggcggaaagcctcagccgcgtctacaagcagcggcgaatggaaggggccggcgacctgcaagcgaataacgcgctttgccccggcttccttgaaacgggtttccgcctcgctcagggcgggagcggttccgcttaccgcgacctgcttcggcgaattgatatttgccgcgtacaggtcttttacgccccattgcgctatgagcttttccacatccgcgggggcaaggccgacaacggccgccataccgggagcggcggaagcgtcgccgccggcggcttcccgcagcctgtcggcgttcgcctgcattgccgcgccgcgggccttaaccaggcgcaaacagtcctccgcgctgattacgccggcgcagacaagcgcggcgtttcgcccaagctaa

SEQ ID NO: 25780 - protein, 169 aa, Unknown
  Obtained from environmental sample
  misc_feature (1)..(169): Xaa is any amino acid
MIWARASFFASVPETTSFPVTLEYRAAWGSLKLTASRAGRKASAASTSSGEWKGPATCKRITRFAPASLKRVSASLRAGAVPLTATCFGELIFAAYRSFTPHCAMSFSTSAGARPTTAAIPGAAEASPPAASRSLSAFACIAAPRALTRRKQSSALITPAQTSAAFRPS

SEQ ID NO: 25781 - DNA, 627 bp, Unknown
  Obtained from environmental sample
  misc_feature (1)..(627): n is a, c, g, or t
ttgcgcctggttaaggcccgcggcgcggcaatgcaggcgaacgccgacaggctgcgggaagccgccggcggcgacgcttccgccgctcccggtatggcggccgttgtcggccttgcccccgcggatgtggaaaagctcatagcgcaatggggcgtaaaagacctgtacgcggcaaatatcaattcgccgaagcaggtcgcggtaagcggaaccgctcccgccctgagcgaggcggaaacccgtttcaaggaagccggggcaaagcgcgttattcgcttgcaggtcgccggccccttccattcgccgctgcttgtagacgcggctgaggctttccgcccggctcttgaagccgtcagcttcaatgatccccaagccgccctgtattccaacgttaccggaaagctggttgtttccggcacggaggcgaaaaaactcgcccttgcccaaatcaccagccccgtccgctgggttgacgaggaagcagctattataagcgccggcggttttgaggcttgtcttgaggtcggccccggaaaagtgttgcagggtttatggaaagattccggcagcgagcttccctgctatgccgccggaacggttgaagatattggaaaaataggtaactaa

SEQ ID NO: 25782 - protein, 208 aa, Unknown
  Obtained from environmental sample
  misc_feature (1)..(208): Xaa is any amino acid
MRLVKARGAAMQANADRLREAAGGDASAAPGMAAVVGLAPADVEKLIAQWGVKDLYAANINSPKQVAVSGTAPALSEAETRFKEAGAKRVIRLQVAGPFHSPLLVDAAEAFRPALEAVSFNDPQAALYSNVTGKLVVSGTEAKKLALAQITSPVRWVDEEAAIISAGGFEACLEVGPGKVLQGLWKDSGSELPCYAAGTVEDIGKIGN

SEQ ID NO: 25783 - DNA, 735 bp, Unknown
  Obtained from environmental sample
  misc_feature (1)..(735): n is a, c, g, or t
atgagactggaaaacaaaaaagcgctggtaaccggggccttgcgggggatcggaaaagcgatcgctgatttatttatcgccgaaagcgcggaggtctggggcctggattacaaaacgcctgaggatcttgaaggacgacccgcggaagcgaaaggaaagctccactgggttcaggcggatctttcacagcttgcggcggtggaaggggcaatcgaaaacgccctcaaagaatcaggcggctttgacatagtggtaaataacgccggtatcaccaaagacaacctttctttcaggatgtccctggatgaatggcagaaagtaatcgacataaacttgagcgcggcctttcttgtcgcccgcactgtaggcagagacatgatccgcaaacgctccggttccattataaacatggcgagcgttgtcggaatccacggcaacggcggacaggcaaactattcggcgagcaaggcggggctcatagccgtgacaaaaagccttgcccacgaaacggcaagccgcggcgtaagggtaaacgccatcgcgccgggttatatcgccacagacatgaccgcgggccttcccgacaaagtgaaggaaacgtttattgaaaaaatccccctcaaacggatggggacagcgcaggatatagcaaacgccgtgctttttctggcatcggacgattccacatatatcaccggacaggttcttcctgtagacggcggaatgtttacataa

SEQ ID NO: 25784 - protein, 244 aa, Unknown
  Obtained from environmental sample
  SIGNAL (1)...(22)
  DOMAIN (8)...(233): NAD dependent epimerase/dehydratase family
  misc_feature (1)..(244): Xaa is any amino acid
MRLENKKALVTGALRGIGKAIADLFIAESAEVWGLDYKTPEDLEGRPAEAKGKLHWVQADLSQLAAVEGAIENALKESGGFDIVVNNAGITKDNLSFRMSLDEWQKVIDINLSAAFLVARTVGRDMIRKRSGSIINMASVVGIHGNGGQANYSASKAGLIAVTKSLAHETASRGVRVNAIAPGYIATDMTAGLPDKVKETFIEKIPLKRMGTAQDIANAVLFLASDDSTYITGQVLPVDGGMFT

SEQ ID NO: 25785 - DNA, 324 bp, Unknown
  Obtained from environmental sample
  misc_feature (1)..(324): n is a, c, g, or t
gtggcaaaacttccgtacctgttagaccttatgattgataaccaataccgtaaaaatatccagcaaatatatctttttggttcgtatgcgtatggggaaccaaacgaaaacagtgatattgatctatttgttataattgatgattcagctttgccatatagacgagatatatgtatgaaaattaaaaaacccttatataaagaagatataatacctaatgatttattagtatataatgaaaaaatttataatgaatttaaaaacaacatcggtatagaatatgttattgcccaatatggagtattaatatatgaacggcaataa

SEQ ID NO: 25786 - protein, 107 aa, Unknown
  Obtained from environmental sample
  DOMAIN (1)...(97): Nucleotidyltransferase domain
  misc_feature (1)..(107): Xaa is any amino acid
MAKLPYLLDLMIDNQYRKNIQQIYLFGSYAYGEPNENSDIDLFVIIDDSALPYRRDICMKIKKPLYKEDIIPNDLLVYNEKIYNEFKNNIGIEYVIAQYGVLIYERQ

SEQ ID NO: 25787 - DNA, 660 bp, Unknown
  Obtained from environmental sample
  misc_feature (1)..(660): n is a, c, g, or t
atgttctcaccttctcaagacacggaaaatcagcgccacgagatgaatctaaaaactctcgtgtttgtgtgtatatgcgcaatgtcgtttactcttttaattgtaaggcttttgcaactgcaatattttgaatacgaaaacaatttgaaaagagccgaagaaaatcgcattcgcaaggttaatataaaagcaagccgcggatatattttagaccgcaatggagtggttttggttcgcaacagaccttcttaccaaatatctctattgtacaacggattaaaaaccaaagaaataagggattccgttttcaataggcttttaagaataacatatagcaatggaaagcgtttactagattccacctcacttgctttttcttttgaaagaggaaaatggcagaaattcagattccaaagacttgtagaagatgcctcgccagaaatggttgcgctttttgaggaacgttcagaagaattgccaggaattgaaattttagttgaatcacgaagagattatccttttggctcgcacggtgcgcatatatttggttacaccagcgaaatatcagaagccgaacttgatcttccagaaaatgagcattatgttatgggagaccgcattggcaaaaagggttggaactcagctacgaaaagaatttag

SEQ ID NO: 25788 - protein, 219 aa, Unknown
  Obtained from environmental sample
  DOMAIN (61)...(211): Penicillin-binding Protein dimerisation domain
  misc_feature (1)..(219): Xaa is any amino acid
MFSPSQDTENQRHEMNLKTLVFVCICAMSFTLLIVRLLQLQYFEYENNLKRAEENRIRKVNIKASRGYILDRNGVVLVRNRPSYQISLLYNGLKTKEIRDSVFNRLLRITYSNGKRLLDSTSLAFSFERGKWQKFRFQRLVEDASPEMVALFEERSEELPGIEILVESRRDYPFGSHGAHIFGYTSEISEAELDLPENEHYVMGDRIGKKGWNSATKRI

SEQ ID NO: 25789 - DNA, 579 bp, Unknown
  Obtained from environmental sample
  misc_feature (1)..(579): n is a, c, g, or t
atgcccggcaagcacaatgcggaaaatgcgcttgccgccgttgccgcttgcgtaagcacaggaatacctttaatagattgcgcaaacaccctgaaaacttggaaaggcatccaccgcagaagccaaatttacgaatgcaaaaacggagttattcttgtggacgactatgctcacaaccccgctaaaatagcgtctagcatacgttcctgccaaaattttgcaaaggggaaattgttcgcatggttccaaccgcatggttttggccccacaaaatttttaaaagacgatttggtaaaagagattgcagcaacgctacgcccaaacgatggaatatggttcagctcaatatactacgcaggcggcacagcagacaagagctttgactcggatattctctcagatgccttaaaagaaaaaggctgcaatgcaaattttatccctaacagaaccgagtgcctaaaaaaaataatcagttcggcaaaaaacggcgatgtaattttgctaatgggtgctcgcgacccaagtttagcggagttcgcaaaggaagtttttgcaagcctcaatactcctcaattctga

SEQ ID NO: 25790 - protein, 192 aa, Unknown
  Obtained from environmental sample
  misc_feature (1)..(192): Xaa is any amino acid
MPGKHNAENALAAVAACVSTGIPLIDCANTLKTWKGIHRRSQIYECKNGVILVDDYAHNPAKIASSIRSCQNFAKGKLFAWFQPHGFGPTKFLKDDLVKEIAATLRPNDGIWFSSIYYAGGTADKSFDSDILSDALKEKGCNANFIPNRTECLKKIISSAKNGDVILLMGARDPSLAEFAKEVFASLNTPQF

SEQ ID NO: 25791 - DNA, 348 bp, Unknown
  Obtained from environmental sample
  misc_feature (1)..(348): n is a, c, g, or t
ttgccgcaaaagttgaaaaagttttccctttcagcaagtttgaacaggtttttataccgagaaatccccagcgggcgggtgaaaaggcttgtggtttttacggataaaggttcgtttgaagtttttggagaccgcacaaggtggatttttcaaagagacggaagagccttgccgagtgccttgttcagcatttctagggagaaggataattttaccataaacggttcgggctttgggcatggcattggactgtgccaggttggagcaatagcaagagcgagagaggggcaaaagttcgaggaaatcttgaaagcgtattacaccgatgtcagaattgaggagtattga

SEQ ID NO: 25792 - protein, 115 aa, Unknown
  Obtained from environmental sample
  misc_feature (1)..(115): Xaa is any amino acid
MPQKLKKFSLSASLNRFLYREIPSGRVKRLVVFTDKGSFEVFGDRTRWIFQRDGRALPSALFSISREKDNFTINGSGFGHGIGLCQVGAIARAREGQKFEEILKAYYTDVRIEEY

SEQ ID NO: 25793 - DNA, 714 bp, Unknown
  Obtained from environmental sample
  misc_feature (1)..(714): n is a, c, g, or t
atgcaaacttttcaaacaatcttaaatgctttgcaggaattaaaagaattgggtattccaatagaacttaaaaatgctccgctaaaggaattggaaactgtggttctgcaaaaaaccggaatagaaatagaccagaattttccgaatatacgcaatttgcaaaactttttttacgaaaagccgacttatgcaactattagtttattgccagcaaatcaaaccgtgcattttgagaatgcggcaaatgttgtagagattcctttgccaaaagattttcctgtgcaaaaaatattttcaaatatattacaaatccagccaccaattattccgcaatcacaacccattctacaaccacagcaggttctgccagaacaaccaattccgcaatcacagcaaggaacaccgccaccaattccaccgcagcaacctattccgcaaccacagcaggttctgccagaacaaccaattccgcagcaaagtacaccgctaccaattccaccgcagcaacccattcaacaacaaccgcaagttcaaccgcagcaacctattccacagcaaggaatgccgccgtcaattctgccagaacaaccaattctacagccacaaccacaacaaccaccagctccaccgcaacaacccattacgcaaccacagcaaggaatgccgccactaccacaatcaccatcgcaaccaattattctgcaaaaaaattga

SEQ ID NO: 25794 - protein, 237 aa, Unknown
  Obtained from environmental sample
  misc_feature (1)..(237): Xaa is any amino acid
MQTFQTILNALQELKELGIPIELKNAPLKELETVVLQKTGIEIDQNFPNIRNLQNFFYEKPTYATISLLPANQTVHFENAANVVEIPLPKDFPVQKIFSNILQIQPPIIPQSQPILQPQQVLPEQPIPQSQQGTPPPIPPQQPIPQPQQVLPEQPIPQQSTPLPIPPQQPIQQQPQVQPQQPIPQQGMPPSILPEQPILQPQPQQPPAPPQQPITQPQQGMPPLPQSPSQPIILQKN

SEQ ID NO: 25795 - DNA, 630 bp, Unknown
  Obtained from environmental sample
  misc_feature (1)..(630): n is a, c, g, or t
atgcggagcaaacttgcgtttataaaatcaacattagacaaattatatcccaatccgcctattcctctcgcttatacggatgctttttcatttttaattgcggttgtgctatctgcgcaatgcaaagattccgttgtcaatacggttaccccaaaccttatggtgaaagctcctactccgcaaaaaatggcagaactctctgaacagcaaatttactctctagtaaaattgtgcggattggctaaaaacaaaagcaggtttttaaaagaactctcaaaaataatagtccaaaagcacaggggaaaggtacctgattcatttgaggaattggaagcattgccgggtgttgggcacaaaacggcaagcgttgttatgtctcatatttttgacgttcctgcttttccagtggatactcacatacacaggcttgcgcatagatggggtttaagcaatggcagctctgttttgcaaacggaaaaagatttaaaagctgcttttccaaaaaacgaatggacaaaaaggcatttgcagtttatttactacggcaggcagttttgccctgcgagagggcacgatttaaagcgatgcgttatatgcgcggctttgaacaagcctattttaaaatcttaa

SEQ ID NO: 25796 - protein, 209 aa, Unknown
  Obtained from environmental sample
  DOMAIN (98)...(127): Helix-hairpin-helix motif
  misc_feature (1)..(209): Xaa is any amino acid
MRSKLAFIKSTLDKLYPNPPIPLAYTDAFSFLIAVVLSAQCKDSVVNTVTPNLMVKAPTPQKMAELSEQQIYSLVKLCGLAKNKSRFLKELSKIIVQKHRGKVPDSFEELEALPGVGHKTASVVMSHIFDVPAFPVDTHIHRLAHRWGLSNGSSVLQTEKDLKAAFPKNEWTKRHLQFIYYGRQFCPARGHDLKRCVICAALNKPILKS

SEQ ID NO: 25797 - DNA, 1200 bp, Unknown
  Obtained from environmental sample
  misc_feature (1)..(1200): n is a, c, g, or t
atgaatttgtcggcccgggaagttttcgagctcctgggcgttaacttgtctccggatatgcttgtcggtgatatgccggtggggcacaagcagtttgttgagatagcgcgggaggtagaccgcgaaaatgtaaaagtgctgatatttgacgagccgaccgctgtccttactgagactgaagcccaaatcctgatcggcgcccttagaaagcttgcctcaaggggcgtagccattatttttatcagccacaggcttcaggaaatcattgaagtatgcgattcagtcatcgtgctgcgtgacggtgaacttgtgaaaaatatcaccaaagaagagggttattcggtcgaggacatagccaggtggatggtaggccgcgatgtaggcgccaaagtgacccggcacataaatgcggcggcagatgagggcgacattatcatgaagatagagcgcctgtgggttaatatgcccggtgaaatggtaaaagacgtaacccttaacgtaagaaaaggcgagatcctcggtataggcggtttagccggtcagggtaagctgggcatacccaacggtataatgggtttggcggaatccggcggctcgattaaatacaaagataaaaatttcgttctgaactcgcctaaaaccgctttggatttgaagctggccttcgtttctgaggacaggcgcggctttggtttgcttttggacgagcctatctactggaacgtgacgtttcccgcgatgcaagtgctaaacaaatacctgaaagactatatagtaataaagctgcgagacgagaaagcaatgcgcgatacggcgcttaaatacatagaatctctggaagtacgctgcgtaaacgaaaaacagaaagtacgcgagctgtcgggaggcaaccagcagaagatttgtctggccagggcctttgaccttgagcctgaaatgctgtttgtttccgagccgacgcgcggtatagacataggagccaaatcactggtgttacacgccctgaagcactacaacgaagaaaagggcgtaacaatagtaatggtttcctccgagcttgaagaactaaggtctatctgcggcagaatagccatcatcaatgaaggcaaggttgcggggattcttgacgcccatgaagatccagaaaaattcggattgcttatggcaagcctgactccgggaaaggagggaacacaatga

SEQ ID NO: 25798 - protein, 399 aa, Unknown
  Obtained from environmental sample
  DOMAIN (170)...(369): ABC transporter
  misc_feature (1)..(399): Xaa is any amino acid
MNLSAREVFELLGVNLSPDMLVGDMPVGHKQFVEIAREVDRENVKVLIFDEPTAVLTETEAQILIGALRKLASRGVAIIFISHRLQEIIEVCDSVIVLRDGELVKNITKEEGYSVEDIARWMVGRDVGAKVTRHINAAADEGDIIMKIERLWVNMPGEMVKDVTLNVRKGEILGIGGLAGQGKLGIPNGIMGLAESGGSIKYKDKNFVLNSPKTALDLKLAFVSEDRRGFGLLLDEPIYWNVTFPAMQVLNKYLKDYIVIKLRDEKAMRDTALKYIESLEVRCVNEKQKVRELSGGNQQKICLARAFDLEPEMLFVSEPTRGIDIGAKSLVLHALKHYNEEKGVTIVMVSSELEELRSICGRIAIINEGKVAGILDAHEDPEKFGLLMASLTPGKEGTQ

SEQ ID NO: 25799 - DNA, 966 bp, Unknown
  Obtained from environmental sample
  misc_feature (1)..(966): n is a, c, g, or t
ttgatcagatcggccgagctctatagttcggtatccgggagtgcgcagtctgtcggtgcgacagcttttcacataggaatagctactctgggttacggacagtcggaagatgaaatcaggggcgccgaggctttggtcgcccaatatggctccgttgacaggggcggcatgattaaacatgtcgtactgcctgataacttcgcggaggagcaggcaacggttatttcgaatatagcagggtttgcggatgacccgcttatgaaggctgttatcgtaaatcagggcatccccggaacagcggcaggcttccagaaaatcagagacgccggaagaaaagatataattctgttgaccagtatgccgcaggatgatccgaacgtcatctccagagtggccgacgtaatcgtaaactcgaacgactttgggcggggttactacgatatagtcagggcaagggatatgggagccaagacctttgtacatatgtccttcccgcgccacatgagtgttgagtttctttccagaagaagaaacgtgtttgaggaagtttgcaaagacttcggcatacagttcgtgtttgttacagttcccgacccggcaagtgaagttggcatatccggagcgcaacaggctacctatgatatgatgccccgcctgattaaccagtacggaaaagacgctatatattttacaacaaataccgctctgcatgagccgatcataaagcgcgtgtatgagttgggtggtatgttcctcaaccaggacgatatgtcgccgaatgtcggttatcccggagctctcgggctggaccttagcgcacaaatgggcgattggtggggcatgacacaggcaattgaaaaggttgtagtagccaatgggcagggtggaaagatgggcacctgggcgtattcattcctttactgcggaaacacgggccttttttcagctcgcgaaggacatgattga

SEQ ID NO: 25800 - protein, 321 aa, Unknown
  Obtained from environmental sample
  misc_feature (1)..(321): Xaa is any amino acid
MIRSAELYSSVSGSAQSVGATAFHIGIATLGYGQSEDEIRGAEALVAQYGSVDRGGMIKHVVLPDNFAEEQATVISNIAGFADDPLMKAVIVNQGIPGTAAGFQKIRDAGRKDIILLTSMPQDDPNVISRVADVIVNSNDFGRGYYDIVRARDMGAKTFVHMSFPRHMSVEFLSRRRNVFEEVCKDFGIQFVFVTVPDPASEVGISGAQQATYDMMPRLINQYGKDAIYFTTNTALHEPIIKRVYELGGMFLNQDDMSPNVGYPGALGLDLSAQMGDWWGMTQAIEKVVVANGQGGKMGTWAYSFLYCGNTGLFSAREGHD

SEQ ID NO: 25801 - DNA, 807 bp, Unknown
  Obtained from environmental sample
  misc_feature (1)..(807): n is a, c, g, or t
gtggccatgatgctcaacaactccggtatcgccgaatatcacataacgcaggacgatataaccggaaaccagagactgaacaatatgcaggagcttgtaaacgcggcaagcctgtacgagggaagcgttacggggcttctggaattccttgagcatatagagctggatcgctcgcttgaggaaaggaagcctcaagacagcgcgggatctcccgcgggagatgatgaaaaaaacagggtgacgctgatcacctttcacaatacaaagggccttgaattccgcagggtgataatgaccgggctggagcagggcgtctttcccagggaagataaaaaaaacgaggagcttgaagaggaacgccggttgttttatgtcggggctacgcgcgcgatggacgaactatatttaactacatgctcctggcggcgtatgttcggcaggctaacgccccttcagccgtcgttgtttttaaatgaaattgacaaaaaatctcttaaaattatcggaaacgcgccttatggttttacggcaccgtccggaacaaacgctccatccggagcatacgcggcaaggggaaacagcggctggatgacttccggtttcgctgaaaacgaagcggaaaaagcctcaggctggcgcaggggccagcggcttttccatgacgattacggctacggcaatgttgtggatgtgcgtgacagcgaggacgggccgatagtgcgagcaatgtttgaaacagggaaggaactgcggtttctaagcgagaaacaaagctcttcaattgttaagataggaaatgaggaataa

SEQ ID NO: 25802 - protein, 268 aa, Unknown
  Obtained from environmental sample
  misc_feature (1)..(268): Xaa is any amino acid
MAMMLNNSGIAEYHITQDDITGNQRLNNMQELVNAASLYEGSVTGLLEFLEHIELDRSLEERKPQDSAGSPAGDDEKNRVTLITFHNTKGLEFRRVIMTGLEQGVFPREDKKNEELEEERRLFYVGATRAMDELYLTTCSWRRMFGRLTPLQPSLFLNEIDKKSLKIIGNAPYGFTAPSGTNAPSGAYAARGNSGWMTSGFAENEAEKASGWRRGQRLFHDDYGYGNVVDVRDSEDGPIVRAMFETGKELRFLSEKQSSSIVKIGNEE

SEQ ID NO: 25803 - DNA, 849 bp, Unknown
  Obtained from environmental sample
  misc_feature (1)..(849): n is a, c, g, or t
atgaattttactcccataacttacgccaatgtcgtttggggcataattcaggcggacgcgcttgaatatttacggcggaaaatacgcccatacgaactgcaaaagggagagaccgataaacttgtagaaaacgcttttcaggaaatcgccaacggtatcgcgaagggcggcattttaggttcaattaaaccgtttaagaaggcgattaaagagttatgcaatgtacgctatgatcgctccaaattaaaagaacaggttgctatacagggggagtatcttcttaccttccacccgggatcgaatcaggaagtggaaaaatatctggagaaaaacggaatggaagtaattttcccgcgtatgcacggtatttaccgccatcttttccttgggcatactatttccgagataaaagaattcaaggtaaaacattcgttatacgacacaatgttcgcgacgctgggaaataagtttatggacttcgccgttaaacacactgataaaatcgcgaaaatgcaccctctgtacgagcccgatataactctggaagaaaaggcaaaatacagcgatcacattatgcatcattcgatattatcgggcgaatcatttttaatcgcctcggatattattcattacgcgtcaaagggtataagatcatttgtcatactccagccgttcggttgtctccccaatcatatctgcggacgcggagtaattaaaaagatcaaggaacaataccccactattcaaatcctgccccttgattatgatcccgacgtaagttttgcaaacatagaaaaccgtttgcagatgttaataatgaacgcacgcagtttaaagaaggcgtcttaa

SEQ ID NO: 25804 - protein, 282 aa, Unknown
  Obtained from environmental sample
  misc_feature (1)..(282): Xaa is any amino acid
MNFTPITYANVVWGIIQADALEYLRRKIRPYELQKGETDKLVENAFQEIANGIAKGGILGSIKPFKKAIKELCNVRYDRSKLKEQVAIQGEYLLTFHPGSNQEVEKYLEKNGMEVIFPRMHGIYRHLFLGHTISEIKEFKVKHSLYDTMFATLGNKFMDFAVKHTDKIAKMHPLYEPDITLEEKAKYSDHIMHHSILSGESFLIASDIIHYASKGIRSFVILQPFGCLPNHICGRGVIKKIKEQYPTIQILPLDYDPDVSFANIENRLQMLIMNARSLKKAS

SEQ ID NO: 25805 - DNA, 906 bp, Unknown
  Obtained from environmental sample
  misc_feature (1)..(906): n is a, c, g, or t
ttggccgagcggccgaggtttttacacggtcttacatgggttacaggcaaccgatgtgaacgcggagaacttgtaggcgacccgaaagatacggcgttacgcgaagaagcgaacaaaagaacaaaaataatgaacgcggttcccgatatgattaagctgagagatgaattgctttttaaagattatccttttaatcaactcttaccgtcaaaagatataacaatcggtatcccccgcgcgctggatttttggcgtaatatgcctttctggaaagtattctggggcgccctcggctttaaaacaaagatatcgcagaaaagcacgcggggactgtatgaaaagggcattcagtatgttacctctgatacagtctgttttccggcaaaactggtacacggacacatagaagacctaatcgaaaagaaagtggacaggattttctttccgcaaatcaacagactgccgcccgataaccttgagcgtttttgcacttttacatgccccgtattgaaaggttatccgctttccgtaagattttccgacaacccggaaggaaagcacaacattcctcttgatactcctatttttcattggttctcaaaaagagatatgtatttccagctttgccggtttatgaaggaaacatttaacataccggaaaaaaccgttatggcggcgattaaacaagcggaaaaaacgctggaaaattttaataacaatctagttgaaaacggcaaaaagataatcgaagacgttgagcgccaaggcaaattcgccgtggttattgcgggacggtattatcaatatgacgagcatattaatcataatctttcgcgctacttcacaagcctcggcatacccgtcttaacgcttgacgcccttcccgatcttggaaagtaccgctaa

SEQ ID NO: 25806 - protein, 301 aa, Unknown
  Obtained from environmental sample
  misc_feature (1)..(301): Xaa is any amino acid
MAERPRFLHGLTWVTGNRCERGELVGDPKDTALREEANKRTKIMNAVPDMIKLRDELLFKDYPFNQLLPSKDITIGIPRALDFWRNMPFWKVFWGALGFKTKISQKSTRGLYEKGIQYVTSDTVCFPAKLVHGHIEDLIEKKVDRIFFPQINRLPPDNLERFCTFTCPVLKGYPLSVRFSDNPEGKHNIPLDTPIFHWFSKRDMYFQLCRFMKETFNIPEKTVMAAIKQAEKTLENFNNNLVENGKKIIEDVERQGKFAVVIAGRYYQYDEHINHNLSRYFTSLGIPVLTLDALPDLGKYR

SEQ ID NO: 25807 - DNA, 1602 bp, Unknown
  Obtained from environmental sample
  misc_feature (1)..(1602): n is a, c, g, or t
ttggagcagcagtggtatgccgccgcggtcgccgcaaagggcaaggtaatcgcctcgcagccctacaaagacgtccacgacaatgagcggaagataactttctcgcggctgattgtcgataaaaaggggaagccgctcgccgttattgctctcgacctgttcttgagcggtctcagagattatgtggccgagatgcgcgtgtccaacaacgggtgctacggcattgtggttgacaacagtttgaatataatcatcggcaccgcggatgagaccttcggcaaaccgctgagcgtgctcaagaccccggatatctacaggataatggcggagatcaacaagggaaatgatctctccggctacaagacgttggatacccgcaacggcaacgatatagtaactctgtactcgcggcggctcgataacggttggcacataggaattgtgatgcctatcggaatgtactatagggatgtttacgacaagggcagtactgttatcgtatttgggttgcttctgcaacttacaatctgcttggtcgtcatgcgcatagcggcggctaaactgaaggcggacgagcggagcgaccgcaagagtaatttcctagccaacatgagccacgagatccgcacgccgatgaacgcgataatcggctttgccgaacttgcgctgcgcgaggatatcccgccggcggcctacgagcacgtttttaccataaagcaggccggggcgaatctgctctccatcataaacgacatcttggacttctcgaagatagagagcggaaagtttgagatcgtccccggcgattacctattctcctccctcctcaacgatgtggtcagcctgatcaaaatgcgggcgacctacgcgaagctgaggtttgtggtaaacgtggacagcaaaatcccaaacgccctgtacggcgacgaggtaagagtacgccaagtactgctgaatttgctgagcaacgccgtgaaatacacggacaagggcttcgtgtcgctctccatcaatgcgctgtatccgaagaaagatgacgacgacgaggacgacgaggaaaagacggagacgaaaactgattccatcatcctgaatatagaggttaaagacagcggcaaaggtatcaagagcgaagatgtcgacaaactgttcaaggacttcgttcaggttgacaaagagaagaataaaggcgtggagggcacgggcctcggccttgccatcataaacagcatactgaaggcgatgggcgggaaggtttccgtagcctccgagtacggcaagggcagcgcctttaccgtaactctgccgcaacggttccgcgacgcagcggcgcacgcggttgtggacgacaatgaaggcaaaaacgtgttgatctatgaacggcgggatttgtacgccaattccatcgtaagtaccataaaaaggctcggcgtcagttgcacgccggtagacggtgaggcgtcgcttgacgaaaaggtcgcgagcggctcgtacaatttcatctttacggcgtcggcgctctacgaccggacgaaaaacatactcaaaaaacacaactcagacgccaaagttggttgcttacggagttcggcgacgtcatag

SEQ ID NO: 25808 - protein, 533 aa, Unknown
  Obtained from environmental sample
  DOMAIN (196)...(261): His Kinase A (phosphoacceptor) domain
  misc_feature (1)..(533): Xaa is any amino acid
MEQQWYAAAVAAKGKVIASQPYKDVHDNERKITFSRLIVDKKGKPLAVIALDLFLSGLRDYVAEMRVSNNGCYGIVVDNSLNIIIGTADETFGKPLSVLKTPDIYRIMAEINKGNDLSGYKTLDTRNGNDIVTLYSRRLDNGWHIGIVMPIGMYYRDVYDKGSTVIVFGLLLQLTICLVVMRIAAAKLKADERSDRKSNFLANMSHEIRTPMNAIIGFAELALREDIPPAAYEHVFTIKQAGANLLSIINDILDFSKIESGKFEIVPGDYLFSSLLNDVVSLIKMRATYAKLRFVVNVDSKIPNALYGDEVRVRQVLLNLLSNAVKYTDKGFVSLSINALYPKKDDDDEDDEEKTETKTDSIILNIEVKDSGKGIKSEDVDKLFKDFVQVDKEKNKGVEGTGLGLAIINSILKAMGGKVSVASEYGKGSAFTVTLPQRFRDAAAHAVVDDNEGKNVLIYERRDLYANSIVSTIKRLGVSCTPVDGEASLDEKVASGSYNFIFTASALYDRTKNILKKHNSDAKVGCLRSSATS

SEQ ID NO: 25809 - DNA, 726 bp, Unknown
  Obtained from environmental sample
  misc_feature (1)..(726): n is a, c, g, or t
atgtgcaaaatgcttaccggcccaaatccgcacacaagcatagagttgctgcacgacgccggactgctaaaacacttcctgccagaagtggagaacctccgcggggttgagcagccggcgcagttccacccggagggcgacgtgttcgtccatacggttaaggcgctgagcttcctgccggagaacccctccttggctttggcgtgggccgtactgttgcacgacatcggcaagcccgccacaaagaccgtctccgaccgcatcagattcaacaaccacaacgtagtgggggcgaagatgtccataaacgtcttgaagcgtctgcgcgctccaaacgcgcttatcgacgcggcggcggctatggttgagaaccacatgaactttataaacgtgagtaaaatgcgcctctccacgctgaaaaaattcctgtccagagagacgatccgcgacgagcttgagctgcacagaatagattgcctgtccagccatggggatttggaaaactattattttgtcaaggagaagctatccgggttcaaagcggagcagataaagccgaagccgttcgtcacgggcagggatttaattgaattggggcttacgccggggccggtcttcgggaagatacttaacgccgtctacgacctgcaactcgaagagaaggtcgcgtcgagagaagaggcgctgaaggcgctgcacggtatggtcaataatcggggtaaatag

SEQ ID NO: 25810 - protein, 241 aa, Unknown
  Obtained from environmental sample
  DOMAIN (48)...(163): HD domain
  misc_feature (1)..(241): Xaa is any amino acid
MCKMLTGPNPHTSIELLHDAGLLKHFLPEVENLRGVEQPAQFHPEGDVFVHTVKALSFLPENPSLALAWAVLLHDIGKPATKTVSDRIRFNNHNVVGAKMSINVLKRLRAPNALIDAAAAMVENHMNFINVSKMRLSTLKKFLSRETIRDELELHRIDCLSSHGDLENYYFVKEKLSGFKAEQIKPKPFVTGRDLIELGLTPGPVFGKILNAVYDLQLEEKVASREEALKALHGMVNNRGK

SEQ ID NO: 25811 - DNA, 885 bp, Unknown
  Obtained from environmental sample
  misc_feature (1)..(885): n is a, c, g, or t
ttggcgcttattgtttcatgctccggaaccccgaagaacagggaacaattaacaatgaacaatgagcaggtaacagggagcagggagcaattagcaggtagcagtgagcagggagcaattggcaatgagcaagcacccacagaggtggcgatagctgaatcaactactgccgctgaacctgtgcttgaattggctgaaattgaccagccggaagctgttcctgaagaacctgtggtggcggaagctgccgtggaagaagaaaagcctttaacggaatatgtcacggccttgtctctgcttgacgacgatattgccggggaaacggaattacagccgacggatcaaccggttatagccatggaaaaccttcggcctgcgggaacggcatctcttgcggagtcggcgcctcctacggaatctgtatctcccgcggaatcaacggcaaaaccgacaaccccggccttgccggagcggcgaacagcgcaaattgtcccacctgttcgggaatcctggaagcagttaccgaaggaagaggaaacagtcgctgcgactcagggttccatagctgaagacccgctggaagaaagaatcctgcagccggattacccgataacattttcgcgtacagcccgtgttacggttggacagttagttgaaattccgttccacggaaaggactgggtgttcataggcgaagtcggggcgcgccggggcattgcctatgattcccgcaagacggatccccgaggcgatagttttattttcagggttgacgcggcaggcacatacgcgttgaaattctaccggcatgattttgcgcatgaccttatcataaatgatcatgtccagattatagcgggcagggctccggaaacacaggcctga

SEQ ID NO: 25812 - protein, 294 aa, Unknown
  Obtained from environmental sample
  misc_feature (1)..(294): Xaa is any amino acid
MALIVSCSGTPKNREQLTMNNEQVTGSREQLAGSSEQGAIGNEQAPTEVAIAESTTAAEPVLELAEIDQPEAVPEEPVVAEAAVEEEKPLTEYVTALSLLDDDIAGETELQPTDQPVIAMENLRPAGTASLAESAPPTESVSPAESTAKPTTPALPERRTAQIVPPVRESWKQLPKEEETVAATQGSIAEDPLEERILQPDYPITFSRTARVTVGQLVEIPFHGKDWVFIGEVGARRGIAYDSRKTDPRGDSFIFRVDAAGTYALKFYRHDFAHDLIINDHVQIIAGRAPETQA

SEQ ID NO: 25813 - DNA, 570 bp, Unknown
  Obtained from environmental sample
  misc_feature (1)..(570): n is a, c, g, or t
atgggtcacttccgtgcccatggagcaggtggaggacggcaaggtcgagcttttcggccccggcctggagagcgtcaagcccggcggttccctgcccctggccatcaaggtcgaagtggcaggccgcaagttccaggaggacttcgagcccatcctggagcggcaggtccaccatctcctgaactatgcccaaggcatgatgcacaccggccagcgcgacattggcatgatccgcatctccaacgacgccgtggccaagggcttcaagctggaacacatcggcaccatcctgcacgccaagctccaccaggacttcggcgccatcttcgacaagctccaggtcaagctctacaccgacgccaaggaagccgagaagatccgcgaccaggcccgggccgtctatacgcaccgggatgcccgcgtggagaacatgaccgacgagaccaccgatacctattacagctgcaccctgtgccagagcttcgcccccaaccatgtctgcgtggtcagcccggaacggaccggcctctgcggagcctacaactggatggactgcaaggccagctttga

SEQ ID NO: 25814 - protein, 189 aa, Unknown
  Obtained from environmental sample
  misc_feature (1)..(189): Xaa is any amino acid
MGHFRAHGAGGGRQGRAFRPRPGERQARRFPAPGHQGRSGRPQVPGGLRAHPGAAGPPSPELCPRHDAHRPARHWHDPHLQRRRGQGLQAGTHRHHPARQAPPGLRRHLRQAPGQALHRRQGSREDPRPGPGRLYAPGCPRGEHDRRDHRYLLQLHPVPELRPQPCLRGQPGTDRPLRSLQLDGLQGQL

SEQ ID NO: 25815 - DNA, 1287 bp, Unknown
  Obtained from environmental sample
  misc_feature (1)..(1287): n is a, c, g, or t
atggtaatgagtacgctgattttaataaatatagccattgaaatatcatgcagcgttatgtgcctcgcgatcatggcctgcattataatcggagacaacccgcgcgtccgtatgaaccgcgcgttcatttgggtgctgatttccaatgtcgtcctcatgctcagcgatgctctggctttttattctatcggcaggacagggccctatttttttgttctaagctttatcgggaatttttttacattccagttcagctatgtaattattatgtgtttttctaattacatcaacgtttacctggcgtcgaaaatccgaatcaaacggacaacggtacacatggtttacggcgtttgcggtttggcaattattcttacatttttttcgcttctgaataatatgtattttattattgataaaaacaacgtctatcacaggcaaaatatgtattggctttcgcaggtgatgggaatgatcggcctggcgcttaactctattgaaataatcagacatcgcaagtctttaaaccgcatagaaacattcgccctcgcgtcttacataatcctgcccattatcgcggttgccattcaggtatctgtttacggctatgtgtcggtttatatagcgtcaacgctgacaatccttttcatctatatcggtatgcaggcgcaatttcagaaaatattgaagganaaggaattgcagctaactcaaagccgcatcgccataatgctcagccagatacagccgcattttttatacaacgctcttgctgtcatatcaaggctttgcgataaggatccggcgcaggcaaaaaaagcgattatagaattttcaacgtatctgcggggaaatatggactcattggaagagacaaaaccgattccctttgagaaggaattaaaacacatagagggctttttgaatttggaaaaggccatgtacggcgaagcgttatgcgtgcgatacgatattcagaccaaagactttatgcttccggcgctgacagcgcagtctatagttgaaaacgcggtcaaacacggcatcggcaagcgggagggcggcgggacggtcacgatttgcgcaagagacgcgggcagcgaatttcttgtgacggtatctgacgacggcgcggggtttgaatatgagaaagcggcctacgacgggagcccgcgcatcggaattaacaatgtccgccaaaggctgtccggacaatgcggcggttctcttgaaataaaaagtgaaattggaaaaggaactgccgttaccatctccatcccaaagacgtaa

SEQ ID NO: 25816 - protein, 428 aa, Unknown
  Obtained from environmental sample
  DOMAIN (327)...(428): Histidine kinase-, DNA gyrase B-, and HSP90-like ATPase
  misc_feature (1)..(428): Xaa is any amino acid
MVMSTLILINIAIEISCSVMCLAIMACIIIGDNPRVRMNRAFIWVLISNVVLMLSDALAFYSIGRTGPYFFVLSFIGNFFTFQFSYVIIMCFSNYINVYLASKIRIKRTTVHMVYGVCGLAIILTFFSLLNNMYFIIDKNNVYHRQNMYWLSQVMGMIGLALNSIEIIRHRKSLNRIETFALASYIILPIIAVAIQVSVYGYVSVYIASTLTILFIYIGMQAQFQKILKXKELQLTQSRIAIMLSQIQPHFLYNALAVISRLCDKDPAQAKKAIIEFSTYLRGNMDSLEETKPIPFEKELKHIEGFLNLEKAMYGEALCVRYDIQTKDFMLPALTAQSIVENAVKHGIGKREGGGTVTICARDAGSEFLVTVSDDGAGFEYEKAAYDGSPRIGINNVRQRLSGQCGGSLEIKSEIGKGTAVTISIPKT

SEQ ID NO: 25817 - DNA, 921 bp, Unknown
  Obtained from environmental sample
  misc_feature (1)..(921): n is a, c, g, or t
gtggtaaaagaggggctgcgcaagtcgggagtgtccgtgagcgatctgtcgcatgccggcgcgggcgttcgcggaggcttcgtcggcggcgttgggggcggttttgcgggagcgggcggtttagttaatgcgggttatcaaaacgtcggctccggctttgacttttcggcgggcggtattcgcttcggcggcggaagtgtcggcgcggcggcgggcggcgccgtccagacctctttgaacataatgtcgtcgcccttcgttaatgtcgatgcgggcggcgatcccgccggcggcgccgctatggccgggattggcggcatagagggaatcggcgcagccgctcagacccacgagttgatccaatgctaccagattcacgggttattcatcctcgcgcccataaaaaacggcatactgctgatagaccagcacgccgcggatgaacgcgtgcgttacgagcaggccctcagggacatagagagcggcagccccgtttcccagcaactcctctttccgatagttcttgagatggggcccgcagaaaaaatcgtacttgattccggcagaaagtattttaataatctagggtttgagatatccgatttcggcggcgactcggtttctgtctcagccctgccggcgttcttgagggatggggaggccgagggcgcggtgcgggagatggtgcgctacctgatagacggacgggggccggagacgttcaaagagcccgtcaagcgcttcgcggcggcgttcgcctgcggggcggctataaagtctgggcagaagctgagtttggaagagatgaacgcgctgataaacgcgttgttttcggccgtcgaaccgaacacgtgtccgcacgggcgtcctacgttcgtgaggatacacttggacgagttgaagcggcgtttcctaaggtga

SEQ ID NO: 25818 - protein, 306 aa, Unknown
  Obtained from environmental sample
  misc_feature (1)..(306): Xaa is any amino acid
MVKEGLRKSGVSVSDLSHAGAGVRGGFVGGVGGGFAGAGGLVNAGYQNVGSGFDFSAGGIRFGGGSVGAAAGGAVQTSLNIMSSPFVNVDAGGDPAGGAAMAGIGGIEGIGAAAQTHELIQCYQIHGLFILAPIKNGILLIDQHAADERVRYEQALRDIESGSPVSQQLLFPIVLEMGPAEKIVLDSGRKYFNNLGFEISDFGGDSVSVSALPAFLRDGEAEGAVREMVRYLIDGRGPETFKEPVKRFAAAFACGAAIKSGQKLSLEEMNALINALFSAVEPNTCPHGRPTFVRIHLDELKRRFLR

SEQ ID NO: 25819 - DNA, 1404 bp, Unknown
  Obtained from environmental sample
  misc_feature (1)..(1404): n is a, c, g, or t
ttgcggatttgtgacggcgcggcggcggtggcgctcaggtctatagggtgccggacgaatcaggaggaagcggccgcgctgagggcggaactcttgtcttttggatattcgattgtagaagagataaaagatgccgatataataatagtcaatacatgttcggtgaccgcgtttgcggagtcgaagacgaggcgcttcatacagtcgctgttaggcgccgccccaggggcaaagatattggtgacaggctgcttcgcgcagcagcacggcgtgtcgatacggcggtatcccggcgtggagtgggtggtgggcaacgccgacaaacaccgtattccgtcaattatatcggcggagggcggaggcgggcgcctatccgatataggcgcggacagcccggttttttggggtcacagcgtgccggaggtggcggacggcgcccgtacgcgtttctcgctgaagatacaggaagggtgcgatttcaggtgcgcctactgtatagttccggcgctgcgcggcccgtcgcgatgcgccccgaaagataaactcgtagacacctttaaaagggccgtcgacaagggatacaaggagatagtgctgacaggaacgcacataggacagtatcgacaagttgttgtcagcaatagtgttagcatggttgacttgacagatggggcggtgtcggcggagatcgacgcaggtctgaacggccgttcgcagagcggtcatcaggccggcggattggaggcgttgctggaggagttcctgaaggtcggcggcgactaccgcatccgcctctcctccttagacccgcgtgatctgacggatgcgttgatagaggaggtgggcggtaacccgaggatgtgcgaccacctgcacgtaagcgtccagagcctctgcgccgaggtgctttcgttcatggacaggccgtacggcgaccttgacttgttgatggatcgtttgcgcggtttccgtgagagatatccggccgccggtttgggcgccgacctcatcgtcggccacccaggagagagcgacgcgatgtttgagacgacgctgcgcggtgtggaagcggtgggcttcacttatggccacgtgttccgttattcgcggcgtttgggcacaaaatccgcgaaaatgcgcggccagatcgccgaatcggtgaagaagttcaggagcgcggcgcttttggatgcgctgcaaaaaaaacgtgaaaaatttttatccttgatatttgcgcgcccattatatattattatagagtcggagagtcccgttcgcggggttagcgggaattatataaaggtggaggtccccggtgttacggcctccaaaaacacttggatgcgggttggccttaccggtgacagatgtggcgggtactatgcggccatgaagttgccttag

SEQ ID NO: 25820 - protein, 467 aa, Unknown
  Obtained from environmental sample
  DOMAIN (152)...(355): Radical SAM superfamily
  misc_feature (1)..(467): Xaa is any amino acid
MRICDGAAAVALRSIGCRTNQEEAAALRAELLSFGYSIVEEIKDADIIIVNTCSVTAFAESKTRRFIQSLLGAAPGAKILVTGCFAQQHGVSIRRYPGVEWVVGNADKHRIPSIISAEGGGGRLSDIGADSPVFWGHSVPEVADGARTRFSLKIQEGCDFRCAYCIVPALRGPSRCAPKDKLVDTFKRAVDKGYKEIVLTGTHIGQYRQVVVSNSVSMVDLTDGAVSAEIDAGLNGRSQSGHQAGGLEALLEEFLKVGGDYRIRLSSLDPRDLTDALIEEVGGNPRMCDHLHVSVQSLCAEVLSFMDRPYGDLDLLMDRLRGFRERYPAAGLGADLIVGHPGESDAMFETTLRGVEAVGFTYGHVFRYSRRLGTKSAKMRGQIAESVKKFRSAALLDALQKKREKFLSLIFARPLYIIIESESPVRGVSGNYIKVEVPGVTASKNTWMRVGLTGDRCGGYYAAMKLP

SEQ ID NO: 25821 - DNA, 975 bp, Unknown
  Obtained from environmental sample
  misc_feature (1)..(975): n is a, c, g, or t
ttgggagcaaactacggcaggggcttatttaagcaactgcaagagacgatagaacaagtagaaaaactgacaacggaaatccgcgaaataaaatcatctcatcaaatggaaaccgcaagcctaaaaacagagattgaaagcctgcgcaaagaaaacaccgccctaaaagccgaaaaccaaaagctgaaagccatcatcaataaagacagcggcaactcaagcaagcccccgtcttccgacgccttcaagaagatattcaacagccgcaaaaaatcaggcagaaaacccggcgggcaaacgggccacccgggcagcgccccggttctctttgagaaccctgaaaacattataaaccacaagcgggaaagatgcggctgcggcggcacagttgcatacggagaagggtatcaggcaaagcagatagtggaactggaaatcaaggcgaaggtaaccgagcaccgcagttataccggcgtttgcgggagttgcaacgcaacggtaaaaaacgatatgccgttacaagatacaatcacctacggcgaaacggtaaaggcatttgtcgccatgctcggcagtgaagggctggtctcaataaaccgcataaaggcgatgctttatgaaataaccggcggggcaattgctctgtccgagggcactattgtgaagtggaaccaggaattgagcggcaaattagcgtcatttatcgaaagaatgaaggaaaagctgcttgtgcagcctgttttacggaaagacgagacagggatcangatagccggtagcctgcaatggctgcacgtgctgagtatgagatgtatacgctgtatttttcaaataagaagcggggcaatgaagcggacaaggaaatgggcatactgcccatgtatagcggggttctggtacacgatcacctcaaagggctatacagtttcacctgcggacatgcggaatgcaatgcccatattctgcggtatttaa

SEQ ID NO: 25822 - protein, 324 aa, Unknown
  Obtained from environmental sample
  misc_feature (1)..(324): Xaa is any amino acid
MGANYGRGLFKQLQETIEQVEKLTTEIREIKSSHQMETASLKTEIESLRKENTALKAENQKLKAIINKDSGNSSKPPSSDAFKKIFNSRKKSGRKPGGQTGHPGSAPVLFENPENIINHKRERCGCGGTVAYGEGYQAKQIVELEIKAKVTEHRSYTGVCGSCNATVKNDMPLQDTITYGETVKAFVAMLGSEGLVSINRIKAMLYEITGGAIALSEGTIVKWNQELSGKLASFIERMKEKLLVQPVLRKDETGIXIAGSLQWLHVLSMRCIRCIFQIRSGAMKRTRKWAYCPCIAGFWYTITSKGYTVSPADMRNAMPIFCGI

SEQ ID NO: 25823 - DNA, 675 bp, Unknown
  Obtained from environmental sample
  misc_feature (1)..(675): n is a, c, g, or t
atggctgcacgtgctgagtatgagatgtatacgctgtatttttcaaataagaagcggggcaatgaagcggacaaggaaatgggcatactgcccatgtatagcggggttctggtacacgatcacctcaaagggctatacagtttcacctgcggacatgcggaatgcaatgcccatattctgcggtatttaaaatccgccgtggaaacaaataaatgtgggtgggcagatgccatgagagtgtgtttgacagatgcccacaataccgtcaaagcgtataaggcaaggaatatcctggcgcttgaagaagcggtagtggccgaataccacgtccgttacgataagattcttgaacagggacggcttgagttttttcaaggtgagaagaaggattacaatagcgaagacatgaagctgttgcggcgacttaaggaatataagagtgaacacttgaggtttctgtcagatttccaggtaccgtttgacaacaatctggcggagcgggatctgaggatgataaagagcaagacaaaagtgtctgggtgtttcagggggaatgagggcggaactgtttttgcaaatatcaaaagctacacctcaacattgagaaagaattccaggaatattttcaacggcttaaaagctgccttcttgggtatgcctttttcctgggcttga

SEQ ID NO: 25824 - protein, 224 aa, Unknown
  Obtained from environmental sample
  misc_feature (1)..(224): Xaa is any amino acid
MAARAEYEMYTLYFSNKKRGNEADKEMGILPMYSGVLVHDHLKGLYSFTCGHAECNAHILRYLKSAVETNKCGWADAMRVCLTDAHNTVKAYKARNILALEEAVVAEYHVRYDKILEQGRLEFFQGEKKDYNSEDMKLLRRLKEYKSEHLRFLSDFQVPFDNNLAERDLRMIKSKTKVSGCFRGNEGGTVFANIKSYTSTLRKNSRNIFNGLKAAFLGMPFSWA

SEQ ID NO: 25825 - DNA, 822 bp, Unknown
  Obtained from environmental sample
  misc_feature (1)..(822): n is a, c, g, or t
ttggcacggacaaggactgggccggggtgtgggccggccagacccatgcgatggccatcaagagggacggcagcttgtgggcctggggcgccaacaccaacggcaagctcggcgacggctccactgcccaggagcaccactccccaacccgcgtcggcacagacaacaactgggccgcggtgtccatcggcaaatggcacacgctggcgctcaggaccgacgggagtctgtgggcgtggggctacaccagcaacggcaggctcggcgtcggcaacaccaccggcaagtaccagaccacccccgtccaggttggctcggccaaggactgggtggccgtggcggccggtgaagagcactcggccgccatcaagagcgacgggagcctgtgggcctggggggacaaccgcctcggcacagtcggcgacggcaccaacacgaacaggactgcgcccgtccaaatcggcaaggacaaggattgggcggccgtgtcctccaggcaccagcacacggtggcccgcaaggctgacggcagcctctgggcctggggcaacaacacatccggccagttggggcaggagggcaacgtggaccggcggaacgccccggtgcaggtcggcacggccaaggactggaccgccatgtcggtctgcggcggcttcaccgtggccatcaagccgaacggcgaaatatgggcgtggggcaccaacgacttcggccagatcggcgacggcaccagcggctacgagaaccgcagaaccgccccggtcaaagtgggagccggcttccgtgtccccacgaagtaagccgaaaagccttttttga

SEQ ID NO: 25826 - protein, 273 aa, Unknown
  Obtained from environmental sample
  misc_feature (1)..(273): Xaa is any amino acid
MARTRTGPGCGPARPMRWPSRGTAACGPGAPTPTASSATAPLPRSTTPQPASAQTTTGPRCPSANGTRWRSGPTGVCGRGATPATAGSASATPPASTRPPPSRLARPRTGWPWRPVKSTRPPSRATGACGPGGTTASAQSATAPTRTGLRPSKSARTRIGRPCPPGTSTRWPARLTAASGPGATTHPASWGRRATWTGGTPRCRSARPRTGPPCRSAAASPWPSSRTAKYGRGAPTTSARSATAPAATRTAEPPRSKWEPASVSPRSKPKSLF

SEQ ID NO: 25827 - DNA, 777 bp, Unknown
  Obtained from environmental sample
  misc_feature (1)..(777): n is a, c, g, or t
gtgtgggccggccagacccatgcgatggccatcaagagggacggcagcttgtgggcctggggcgccaacaccaacggcaagctcggcgacggctccactgcccaggagcaccactccccaacccgcgtcggcacagacaacaactgggccgcggtgtccatcggcaaatggcacacgctggcgctcaggaccgacgggagtctgtgggcgtggggctacaccagcaacggcaggctcggcgtcggcaacaccaccggcaagtaccagaccacccccgtccaggttggctcggccaaggactgggtggccgtggcggccggtgaagagcactcggccgccatcaagagcgacgggagcctgtgggcctggggggacaaccgcctcggcacagtcggcgacggcaccaacacgaacaggactgcgcccgtccaaatcggcaaggacaaggattgggcggccgtgtcctccaggcaccagcacacggtggcccgcaaggctgacggcagcctctgggcctggggcaacaacacatccggccagttggggcaggagggcaacgtggaccggcggaacgccccggtgcaggtcggcacggccaaggactggaccgccatgtcggtctgcggcggcttcaccgtggccatcaagccgaacggcgaaatatgggcgtggggcaccaacgacttcggccagatcggcgacggcaccagcggctacgagaaccgcagaaccgccccggtcaaagtgggagccggcttccgtgtccccacgaagtaa

SEQ ID NO: 25828 - protein, 258 aa, Unknown
  Obtained from environmental sample
  DOMAIN (167)...(215): Regulator of chromosome condensation (RCC1)
  misc_feature (1)..(258): Xaa is any amino acid
MWAGQTHAMAIKRDGSLWAWGANTNGKLGDGSTAQEHHSPTRVGTDNNWAAVSIGKWHTLALRTDGSLWAWGYTSNGRLGVGNTTGKYQTTPVQVGSAKDWVAVAAGEEHSAAIKSDGSLWAWGDNRLGTVGDGTNTNRTAPVQIGKDKDWAAVSSRHQHTVARKADGSLWAWGNNTSGQLGQEGNVDRRNAPVQVGTAKDWTAMSVCGGFTVAIKPNGEIWAWGTNDFGQIGDGTSGYENRRTAPVKVGAGFRVPTK

SEQ ID NO: 25829 - DNA, 819 bp, Unknown
  Obtained from environmental sample
  misc_feature (1)..(819): n is a, c, g, or t
atggccgagcggacaaatagcgattttctttatccctgggaatttggcgaaaaagaggcgatgttccgtttctttgaaagcacggcaagcaccatggacaacgcgcgggatttcgcgtctcagggccaggcctcagggactgtcgcggtcgccgatacccaaagcgcgggcaggggacgcaacggcagaacatgggcctcgcggcagggcggcctgtattgcagtttcctcgaccggcccagtatagcgcttgccgattattgtatgccggctatgctgtaccagatagcggcggccagggctataagcgctgtttgcgggaagccggcgaagctgcgctggccgaatgacatctatattgacggccggaaaatagccggcatcatcacggagcttgaagcggaaggagatatgataaagtgggttgttaccggcattggcgtaaacgttaacaacctaagcccttccgcaaaggccgtcagctgcagtgagatagtccgccatacggtttcacggcggtctctgttaaccgccatcatcaaagaagcggatcagctaaagaaaagctccggttctacaatggcctacacccagggaagccgttatctggcggcggaatggaattcgctggcggattgtacaaacgcaaaggtcgcaatcgtggattcggtaaatatttcgcgcgatgaaaagagcagaatgttaaccaggggagtttttaccgggattgatcccgccgggcgctgtatcatcaagtcgcaaaataccggcgctgctatgtattttaaccccgggcccgtgtcggtgatgcttctgtaa

SEQ ID NO: 25830 - protein, 272 aa, Unknown
  Obtained from environmental sample
  DOMAIN (24)...(121): Biotin/lipoate A/B protein ligase family
  misc_feature (1)..(272): Xaa is any amino acid
MAERTNSDFLYPWEFGEKEAMFRFFESTASTMDNARDFASQGQASGTVAVADTQSAGRGRNGRTWASRQGGLYCSFLDRPSIALADYCMPAMLYQIAAARAISAVCGKPAKLRWPNDIYIDGRKIAGIITELEAEGDMIKWVVTGIGVNVNNLSPSAKAVSCSEIVRHTVSRRSLLTAIIKEADQLKKSSGSTMAYTQGSRYLAAEWNSLADCTNAKVAIVDSVNISRDEKSRMLTRGVFTGIDPAGRCIIKSQNTGAAMYFNPGPVSVMLL

SEQ ID NO: 25831 - DNA, 474 bp, Unknown
  Obtained from environmental sample
  misc_feature (1)..(474): n is a, c, g, or t
atgtcgtttatcgccaatcatgtcaattcctttatagatattctggatggccttgatcaattctactttgggcttgcccgtgtgagggaaggcaaaagctttatttcaccgtcggtacaggaacggatagatatacgggatgcgctaccggatgaggcgacccctgttactggcagggaactggatgtattgaggtttgcccatgacggattacaaggaaatgaaatagcccaggaattgtgcgttagcttaaggacggtaaattatcataaaaggcaaatgtttaacaagttttgcgtaaggaatgaaggcgagctggtcagggttgcggaacatttaaagctgattagcccggacgatccaatttgtcttgggcgtaattttgaattaagcccattgccgatggaagcgaaaagaggaaagaaaaaaggcagaaaaggaaaggagaagaaaacttatgattatcaggactaa

SEQ ID NO: 25832 - protein, 157 aa, Unknown
  Obtained from environmental sample
  DOMAIN (53)...(110): Bacterial regulatory proteins, luxR family
  misc_feature (1)..(157): Xaa is any amino acid
MSFIANHVNSFIDILDGLDQFYFGLARVREGKSFISPSVQERIDIRDALPDEATPVTGRELDVLRFAHDGLQGNEIAQELCVSLRTVNYHKRQMFNKFCVRNEGELVRVAEHLKLISPDDPICLGRNFELSPLPMEAKRGKKKGRKGKEKKTYDYQD

SEQ ID NO: 25833 - DNA, 1032 bp, Unknown
  Obtained from environmental sample
  misc_feature (1)..(1032): n is a, c, g, or t
gtgaacgttaaaagcgaccaactggacgccaacccctggctcctgaacgtgcacaacggaacgctcaatgttttgaccggggaatttaccgcccacaggcaggaggacatgattaccaaggttgccaatgtggattatgacccgaatgccgactgcccgctgtggaagcaatttatccgcgaaatcatggactataaagccgacgtgatcggcttccttcaggcggcttgcggatgggcgattaccggaaacacgcaagagcagacaatgtttattttatacggcagtggggcgaacggcaagacgactttccttaatacggtgctgtccattctgggggattatgggacggctacgccgaccgaaacgtttatgaggaaaacgggcgaccagattaccaacgacattgcgcggcttcggggcactcggtttgtaaccactacggaggcggagcaggggcggcggctttcggagcctctcataaaaaagattaccggcaacgaccagatgacggcgcggtttttgtacggggagtttttcaacttcgtgccgactttcaagattttcatggcgactaaccacaagccagtgataaagggtactgattacgggatatggcggcgcataaagcttataccgttcaccacgaggatactggaagaaaggcaggacaggcggcttgaggaaaagctgaaggctgaggcgagcggcatacttaactggcttctggaaggcactggccgatggaaacgggaagggcttgtagctccggcgacaattttgaacgccacgaacgaataccggggggaaatggacgtgattggtaatttccttaaagaatgctgcactgccaaagaaggcgggacaatccggattagggaactgtttaaggcttatgccgactggtgcgacgacaacaacgaacacgctgtaagcgagcggtttttctccctgcgacttaaagagatgggctacgagcaaagcaggactgcggaagcccggttctggtcggggctggccttgcaggtatag

SEQ ID NO: 25834 - protein, 343 aa, Unknown
  Obtained from environmental sample
  DOMAIN (15)...(326): Poxvirus D5 protein-like
  misc_feature (1)..(343): Xaa is any amino acid
MNVKSDQLDANPWLLNVHNGTLNVLTGEFTAHRQEDMITKVANVDYDPNADCPLWKQFIREIMDYKADVIGFLQAACGWAITGNTQEQTMFILYGSGANGKTTFLNTVLSILGDYGTATPTETFMRKTGDQITNDIARLRGTRFVTTTEAEQGRRLSEPLIKKITGNDQMTARFLYGEFFNFVPTFKIFMATNHKPVIKGTDYGIWRRIKLIPFTTRILEERQDRRLEEKLKAEASGILNWLLEGTGRWKREGLVAPATILNATNEYRGEMDVIGNFLKECCTAKEGGTIRIRELFKAYADWCDDNNEHAVSERFFSLRLKEMGYEQSRTAEARFWSGLALQV

SEQ ID NO: 25835 - DNA, 588 bp, Unknown
  Obtained from environmental sample
  misc_feature (1)..(588): n is a, c, g, or t
atggaaaatgtactgaccctgctcagggactccggagctatgcttgaagggcattttctcctgagttcggggcgacattcagacaaatactttcaatgcgcgaaattactgcaataccctgacaaggccgcggcggcgcttgccgatgtggcggaaaaaatcaagtcggacatacaagccggaaaactggaaattgacgctgttgtcggtcccgccatgggggggatngtcgtcgcttacgaattgggcaggcagttggggcttcccgctttttttaccgagcgtgacgatacggggaccatggttctgcgccggggctttgaagtgcagcccggacacaaaatcctgattaccgaagatgtagtcaccaccggaaaatctttcggcgaatgcgccgccgctctggagagcctgggggcaaaaattaccgcccttgcctgcgtagtggatagacggcaagcaggtattgaggttccttggccgttttatcccgcctgtaaagtaaatgcgacaaactgggaagctgattcttgtgaattatgtaaaaaaggaatacccgcagtaaagccaggttcaagaaaaatatag

SEQ ID NO: 25836 - protein, 195 aa, Unknown
  Obtained from environmental sample
  DOMAIN (32)...(159): Phosphoribosyl transferase domain
  misc_feature (1)..(195): Xaa is any amino acid
MENVLTLLRDSGAMLEGHFLLSSGRHSDKYFQCAKLLQYPDKAAAALADVAEKIKSDIQAGKLEIDAVVGPAMGGXVVAYELGRQLGLPAFFTERDDTGTMVLRRGFEVQPGHKILITEDVVTTGKSFGECAAALESLGAKITALACVVDRRQAGIEVPWPFYPACKVNATNWEADSCELCKKGIPAVKPGSRKI

SEQ ID NO: 25837 - DNA, 618 bp, Unknown
  Obtained from environmental sample
  misc_feature (1)..(618): n is a, c, g, or t
gtggcaggaagttgtaacttcaaccngcttttgaaactgccagcaccgagattttgggcgttaatatcgcaatgtgaccacggtaaaaggggagggattatgccggtagcattaacagaaacaaagattgaaataagcgagagcgaacttgcgcagcgcgtggctgtgattaagcggtttaaggaacttcttgttcagcaacgcgagcgttttcgcagttatcttaccgtgctggacaagcagcagcttctcataggttatggcagcgcggaagaaataacagcccacgtcgaactggaagagcagatagtcgcggatattttttccatacagaaagtaattgctccgctggaaattatgtataataccataggcactgacgccgatggattaggcacttttattacaatcaaagatgttcctgagttacaagcaacgctggaagacttaaaaacccaggccgtggtcagatcggtgcgaaaccgggacctgctttccagccgcatggaagaaatcaactcaagccttcagacgataaaaaataacccatttttatcaaaggcccgtttttcaatgtatcaaaacgcagctcccgcgacaatcgatataatgggctga

SEQ ID NO: 25838 - protein, 205 aa, Unknown
  Obtained from environmental sample
  misc_feature (1)..(205): Xaa is any amino acid
MAGSCNFNXLLKLPAPRFWALISQCDHGKRGGIMPVALTETKIEISESELAQRVAVIKRFKELLVQQRERFRSYLTVLDKQQLLIGYGSAEEITAHVELEEQIVADIFSIQKVIAPLEIMYNTIGTDADGLGTFITIKDVPELQATLEDLKTQAVVRSVRNRDLLSSRMEEINSSLQTIKNNPFLSKARFSMYQNAAPATIDIMG

SEQ ID NO: 25839 - DNA, 1182 bp, Unknown
  Obtained from environmental sample
  misc_feature (1)..(1182): n is a, c, g, or t
atgaagatggggacgaggaaaagggcaaagatgaaggcgaagccggccgctgtggccgctatcgttatcgcggtcgctatcgttgtgataattatggtagcggtgatcttcaccagttgcggcggcgacaataacaaaggcggcgccgagagccagccgaccgcctctcccaactacgatgagatccaagagcgcgccttggcctataaatacgctataggcaaatccggcggcgagatcgtcctctcaaccttctccgaccccaagtccttcaacccgataacctccacggagaccagcacctccgaatacaccgtcgtaatgtacgagggactactgcgacgcaacggcatgaccttagagatggagccgaacatcgccgagcgttgggaggtaagcgcagacggtctgatttggactttcttcatcaggcccggcgtgcaatggtccgacggcgcgccgctctccgcctacgacgtggagttcacatttaacgatctcatctataatacggagatagtccccaactcctcgcgcgacacattctcacccgagggcaagcagttcatcgtgaaagcgcttgacagtacgcgagtggagttcactctcccgttcccgttcgcgccgttcctgcactctatgggtacggagatactgccaaagcataaactcgcggacgtcgtggcgcaaaaggcctttaccaccgcgctctccataaagacgccgcccaaggatatggtcgtgaacgggccttttttgctcgactcctacatctcctcgcagaaggtcgtcttcaagaagaacccgtactattggaagaaagacgccgagggaaagagcctcccgtatttggatagagttgtgtacatgattgtgtccgacatgaacgcggagcttttgacatttttgcgcggagagacagattacctgacggccaagggggaggacttcccggagttgaagaaggcggaggcggctaaaggcaatttcacggtccaccgcctcggccccagcgccggcgcgagtttcgcggtcttcaatcaaaacttgacggttgacgagaagacaaagaaaacgtatgtcgatccggttaaactctcttggttccgtaatgacaacttccgcagggcgatagcgcatattatagacaaggataacatgataagctctcggccgatctga

SEQ ID NO: 25840 - protein, 393 aa, Unknown
  Obtained from environmental sample
  SIGNAL (1)...(26)
  DOMAIN (121)...(390): Bacterial extracellular solute-binding proteins, family 5 Middle
  misc_feature (1)..(393): Xaa is any amino acid
MKMGTRKRAKMKAKPAAVAAIVIAVAIVVIIMVAVIFTSCGGDNNKGGAESQPTASPNYDEIQERALAYKYAIGKSGGEIVLSTFSDPKSFNPITSTETSTSEYTVVMYEGLLRRNGMTLEMEPNIAERWEVSADGLIWTFFIRPGVQWSDGAPLSAYDVEFTFNDLIYNTEIVPNSSRDTFSPEGKQFIVKALDSTRVEFTLPFPFAPFLHSMGTEILPKHKLADVVAQKAFTTALSIKTPPKDMVVNGPFLLDSYISSQKVVFKKNPYYWKKDAEGKSLPYLDRVVYMIVSDMNAELLTFLRGETDYLTAKGEDFPELKKAEAAKGNFTVHRLGPSAGASFAVFNQNLTVDEKTKKTYVDPVKLSWFRNDNFRRAIAHIIDKDNMISSRPI

SEQ ID NO: 25841 - DNA, 456 bp, Unknown
  Obtained from environmental sample
  misc_feature (1)..(456): n is a, c, g, or t
atggacaagcacctatataggatgccgaacataaagttcgtttggggctcaaactcaaacttcgccaacatgggcgtcgggatgatttacgcgcacattatatccggcgatgacaagtatctcttaggcgcgtccgagattgccgattacctattggggaaaaacgccgtggggatctcgttcgtcagcgccttcggaaccaaatcaatgtcgaacccgcaccataggcaaagcgtggcgggaaaagtaggcgctattcccggcttcttggccggaggtccgaacgccggtcagcaggataacgcccacggggtaacatattcgtcaaaattaccggcaaagagttacgaggatgtctataagagttacgcatcaaacgaggtagcgataaattggaacgctccgacagtgtttttattcggggcgatagacgcgttaatgcagggtaagaagtag

SEQ ID NO: 25842 - protein, 151 aa, Unknown
  Obtained from environmental sample
  misc_feature (1)..(151): Xaa is any amino acid
MDKHLYRMPNIKFVWGSNSNFANMGVGMIYAHIISGDDKYLLGASEIADYLLGKNAVGISFVSAFGTKSMSNPHHRQSVAGKVGAIPGFLAGGPNAGQQDNAHGVTYSSKLPAKSYEDVYKSYASNEVAINWNAPTVFLFGAIDALMQGKK

SEQ ID NO: 25843 - DNA, 621 bp, Unknown
  Obtained from environmental sample
  misc_feature (1)..(621): n is a, c, g, or t
ttgatccattccggctcaaggatatttggggccaataccgccgagtattatgagattcttgcgttaagggagaccggcgcggccagccccattaaatacctctcaggctcatctatggcggattatctacacgatgtaaggttgtgccagcattacgcctctgtaaaccgttcccttatagcccacaccatcgccaaaggtttttttgatgccggccttcgggagacggattattttgactgcgcccataactacatagacccggttgagaagatcgtccgtaaaggcgcaatctcggcaaagcgggatgaacggctcattatccccttttcgatgtccgagggcgcggtgttggcgacaggcaaaggaaacgccgagtggaacaattccgcgccccacggctccgggaggaagaaagcccgaaccgacgcgcgaagcctctcccttgacgaataccgaaaagagatgcgcggcatctggtccagcgttataggtaaagacaccctggaggaaagcccgatggcctataagaaaccccgggacgtgcttgattacgtctcggattcggtagaggtaacccatcggcttaaaccgctttatattttacangcgatattgtag

SEQ ID NO: 25844 - protein, 206 aa, Unknown
  Obtained from environmental sample
  DOMAIN (1)...(204): Uncharacterized protein family UPF0027
  misc_feature (1)..(206): Xaa is any amino acid
MIHSGSRIFGANTAEYYEILALRETGAASPIKYLSGSSMADYLHDVRLCQHYASVNRSLIAHTIAKGFFDAGLRETDYFDCAHNYIDPVEKIVRKGAISAKRDERLIIPFSMSEGAVLATGKGNAEWNNSAPHGSGRKKARTDARSLSLDEYRKEMRGIWSSVIGKDTLEESPMAYKKPRDVLDYVSDSVEVTHRLKPLYILXAIL

SEQ ID NO: 25845 - DNA, 375 bp, Unknown
  Obtained from environmental sample
  misc_feature (1)..(375): n is a, c, g, or t
atggaaaccacagattcgacttgccaattttataaagacataataggggtgcaggccccatggatgattaccgctgtaacaatggacgacatatccaggaaagtgacaatacggatagagcacgatcctgagaaggcattggcctgcccaatatgcgcacaaagcacgaagcgatatgaccatcgcgtacggaagctaagatatttagacacatgccagtacgaaacttttcttgaggtgcacgtgccgaggatagaatgcaaaaaagacggtgtgcagcagatacagataccgttcgcggaaaaacattcccggtttaccagccggttgagatggccgtcctgtatggctaaaagcagcctcggccgattctga

SEQ ID NO: 25846 - protein, 124 aa, Unknown
  Obtained from environmental sample
  misc_feature (1)..(124): Xaa is any amino acid
METTDSTCQFYKDIIGVQAPWMITAVTMDDISRKVTIRIEHDPEKALACPICAQSTKRYDHRVRKLRYLDTCQYETFLEVHVPRIECKKDGVQQIQIPFAEKHSRFTSRLRWPSCMAKSSLGRF

SEQ ID NO: 25847 - DNA, 627 bp, Unknown
  Obtained from environmental sample
  misc_feature (1)..(627): n is a, c, g, or t
ttgccggaaatgcgaaaacaactgcctcctgacggtcaaccgtttttccgacggccgctccttcatctccggcaaccgctgcgaacgcggcgcggccttgaagagttcggccgccgacaagctggacgccctggcccacaaggcccacctgggcgacatttccccgcgcctggcccggctaccggccatcggggccctcatgaaaagcccgccggcccagttctcggaactgcccaacctgttccagtggaaccgttaccgccttttcgaggtttaccggcccctggcccccggggaggcccgggccacggtgggcctgccccgggctttggggctctacgacaattatcccttctggttcgccttcttccatcacttagggctcagggtggagctttccccgccctcttccaaggacctcttcaactccgccctggacaccataccctcccagacggtctgctacccggccaagctggtccacggccacatgaaggccctggcggaactgcggccggatttcatcttctttccctgcctgcccctggatctgccggccgactacgccacggacgcccgctacaactgccccctggtggggacctacggggaactgatccggcttaa

SEQ ID NO: 25848 - protein, 208 aa, Unknown
  Obtained from environmental sample
  misc_feature (1)..(208): Xaa is any amino acid
MPEMRKQLPPDGQPFFRRPLLHLRQPLRTRRGLEEFGRRQAGRPGPQGPPGRHFPAPGPATGHRGPHEKPAGPVLGTAQPVPVEPLPPFRGLPAPGPRGGPGHGGPAPGFGALRQLSLLVRLLPSLRAQGGAFPALFQGPLQLRPGHHTLPDGLLPGQAGPRPHEGPGGTAAGFHLLSLPAPGSAGRLRHGRPLQLPPGGDLRGTDPA

SEQ ID NO: 25849 - DNA, 738 bp, Unknown
  Obtained from environmental sample
  misc_feature (1)..(738): n is a, c, g, or t
ttggtggaacgctggtccgagcgggcctcggagaccgtacgccaaggcgaccgccgggccttcaaacgggacatggccgccctggtggaggatttcgcggccctggacctggccccgcccgaccgccccaaggtggccctggtgggggagattcttttgaacttccatccagaggccaacaaccgggccgtggaagtggtggaggccgaaggcggccaggccgtgctgccggaattgaccgatttcgtcctctactgcctttacgacgacgtcttccgggccgaaaaaatggccggcagccgcctccggaaatggctgtccctgtggctcatccgcgtggtggaaagctaccggcgacccttgagagaagccctggcccgcctgccccgtctcggctcccccctgcccttccagcgcctcattgaggccggggaaaagatagtctccctgggcaaccaatccggggagggctggtatctgaccgccgacatggccctcatgatcgaaaagggcgtgcccaacataatctgcctccagcctttcggctgcctgcccaaccacgtcaccggcaagggggtggtcaaggaattgaagcgccgctaccccgaagccaacctggtggccgtggactacgaccccggggccagcgaagtcaaccagctcaaccgcatcaaactcatgatggccgtggccaaaggccgggcccccggccagaacgccgaacggctgtggaattga

SEQ ID NO: 25850 - protein, 245 aa, Unknown
  Obtained from environmental sample
  misc_feature (1)..(245): Xaa is any amino acid
MVERWSERASETVRQGDRRAFKRDMAALVEDFAALDLAPPDRPKVALVGEILLNFHPEANNRAVEVVEAEGGQAVLPELTDFVLYCLYDDVFRAEKMAGSRLRKWLSLWLIRVVESYRRPLREALARLPRLGSPLPFQRLIEAGEKIVSLGNQSGEGWYLTADMALMIEKGVPNIICLQPFGCLPNHVTGKGVVKELKRRYPEANLVAVDYDPGASEVNQLNRIKLMMAVAKGRAPGQNAERLWN

SEQ ID NO: 25851 - DNA, 780 bp, Unknown
  Obtained from environmental sample
  misc_feature (1)..(780): n is a, c, g, or t
atgcttccgctttcttttgaggaatacagtgaagcggtaaaaatccccgacaaacgggaacgttttaaccaatatatgaacagaggcgcattcccttacgcagtccgttttacggacaattctttggcgcacagccagtatttagaaggggtttataacactgttcttgttaaagatgttatgacaaataaaaatttgaaagatataaccctgattaaatcaataacaagttttttggccggcaatgtgggaagtccggtttccgcaaagaaaattgccaatactctaagttccgtcggccgccctacaggttccgctacggtcgatacttatttggaagcgctttgtgacgcataccttttctataaagtcaaccggtatgacattaaagggaagatgcaccttaaatcagaaagcaaatattatatatgcgacacgggcttacgaaatatgatactgggaacaacaaataaagatatcggacatcagatagaaaatatcgtttttttggaactattaaggcgcgggtataccattaatatcggtaaatcaggacggggtacggaggttgattttgtcgctgtccgtaacaataaacctgagtattatcaggtttccgcatcggtgttagacgaaaacacattgaaacgggaacttgcgccgtttaagcaaattaatgacaactacccgaaataccttatcacaatggacgattttacaggcgataatgaaggtatacagcagatcaatttgattgactggctgtattcgtcaaattaa

SEQ ID NO: 25852 - protein, 259 aa, Unknown
  Obtained from environmental sample
  misc_feature (1)..(259): Xaa is any amino acid
MLPLSFEEYSEAVKIPDKRERFNQYMNRGAFPYAVRFTDNSLAHSQYLEGVYNTVLVKDVMTNKNLKDITLIKSITSFLAGNVGSPVSAKKIANTLSSVGRPTGSATVDTYLEALCDAYLFYKVNRYDIKGKMHLKSESKYYICDTGLRNMILGTTNKDIGHQIENIVFLELLRRGYTINIGKSGRGTEVDFVAVRNNKPEYYQVSASVLDENTLKRELAPFKQINDNYPKYLITMDDFTGDNEGIQQINLIDWLYSSN

SEQ ID NO: 25853 - DNA, 402 bp, Unknown
  Obtained from environmental sample
  misc_feature (1)..(402): n is a, c, g, or t
ttgagtgtttttgtccttgattccaatatcgtatcattctatttgcgtcaaaatgagaaaattattcaaaaagtaaaggatgtacttcttgacgggcatgaagtcttgataagtcctattgcatattatgaagtaaaacgagggctattggccattaaagctgaaaaaaaattaagggaatttgccgctctttgtaaaattttaggcgtaggacaactggataattctttattggattgggctgcggatatataccatgaattgagggataataaaaagactgtggaagatgcggatatacttacagcggctttttgtaagaagcatgattttatcttggtaactaataatctgaaacattttgaaattatttccggtttgcgttactgtgattgggtataa

SEQ ID NO: 25854 - protein, 133 aa, Unknown
  Obtained from environmental sample
  DOMAIN (4)...(129): PIN domain
  misc_feature (1)..(133): Xaa is any amino acid
MSVFVLDSNIVSFYLRQNEKIIQKVKDVLLDGHEVLISPIAYYEVKRGLLAIKAEKKLREFAALCKILGVGQLDNSLLDWAADIYHELRDNKKTVEDADILTAAFCKKHDFILVTNNLKHFEIISGLRYCDWV

SEQ ID NO: 25855 - DNA, 633 bp, Unknown
  Obtained from environmental sample
  misc_feature (1)..(633): n is a, c, g, or t
atggctattattgatgatatttcaacagccctgcaaaaaggaaaagtaaaagacgttgtcgctcttatacagcaagccctcagcgaaggcgtatccgctcaggacatactcgacaaaggccttttatacggcatgagcctcttgggcgcgcgtttcaaaaacaacgaagtattcgtccccgaagttcttgtagcggcaagggcgttaaacaaaggaaccgaaacattaaaacccaagcttattgaagcgggcgtaaaaccaataggcaaagtggttctttgcaccgtaaagggcgacttgcacgacataggcaaaaacttggttcgcatgatgcttgagggcgccggtttcgaagtcatagacttaggcgttgatatagatgaaaacaaaattgtagaagctgttaaagcgcaccagccccagatactgtgtctgtccgcgctgttaacgacgacgatgagccagcaaggcgtggtaattgaagcgctaaaaaccgccgggttacgcgacaatgtaaaagtgatggtaggcggcgcgcccgtcactcaaagcttctgcgaagcaatccaagcggacgcctacagccccgacgccgcaagcgcggcggagaaggcaaagacgttcgtggtttga

SEQ ID NO: 25856 - protein, 210 aa, Unknown
  Obtained from environmental sample
  DOMAIN (3)...(86): B12 binding domain
  misc_feature (1)..(210): Xaa is any amino acid
MAIIDDISTALQKGKVKDVVALIQQALSEGVSAQDILDKGLLYGMSLLGARFKNNEVFVPEVLVAARALNKGTETLKPKLIEAGVKPIGKVVLCTVKGDLHDIGKNLVRMMLEGAGFEVIDLGVDIDENKIVEAVKAHQPQILCLSALLTTTMSQQGVVIEALKTAGLRDNVKVMVGGAPVTQSFCEAIQADAYSPDAASAAEKAKTFVV

SEQ ID NO: 25857 - DNA, 324 bp, Unknown
  Obtained from environmental sample
  misc_feature (1)..(324): n is a, c, g, or t
atgaaaggcagtgaaaacaatgacatcccttgccatgacggtaatggtaaattcgcgaccaataactgcggcggcatattaggaggcatttcttcaggacaggacattttttttaaagcggcattcaaaccaacgccttcaatcagcaagccgcaaaaagttttagacagggatggcggcgtaaaggaaatagcgattaaaggcagacatgatgtttgcattgttccaagagccgttgtagttgtggaagccatgaccgctctcgtactcgccgactttttacttttatcgcgttgcgccaagatttcacacaaagaacactaa

SEQ ID NO: 25858 - protein, 107 aa, Unknown
  Obtained from environmental sample
  DOMAIN (1)...(98): Chorismate synthase
  misc_feature (1)..(107): Xaa is any amino acid
MKGSENNDIPCHDGNGKFATNNCGGILGGISSGQDIFFKAAFKPTPSISKPQKVLDRDGGVKEIAIKGRHDVCIVPRAVVVVEAMTALVLADFLLLSRCAKISHKEH

SEQ ID NO: 25859 - DNA, 705 bp, Unknown
  Obtained from environmental sample
  misc_feature (1)..(705): n is a, c, g, or t
ttgtgtgaaatcttggcgcaacgcgataaaagtaaaaagtcggcgagtacgagagcggtcatggcttccacaactacaacggctcttggaacaatgcaaacatcatgtctgcctttaatcgctatttcctttacgccgccatccctgtctaaaactttttgcggcttgctgattgaaggcgttggtttgaatgccgctttaaaaaaaatgtcctgtcctgaagaaatgcctcctaatatgccgccgcagttattggtcgcgaatttaccattaccgtcatggcaagggatgtcattgttttcactgcctttcatattggcggcggcgaaacctgcgccaaactcaacgcctttacacgctccaatagaaattacggcgcaggcaaggcgggcgtcaagtttgtcaaagattggctctcctagaccgggttttactcctgtcgcaaggcaggtaataacgccgccagcgctttcgccttcggcgcgaagggcttctattttggcggttgttttttcagcgccgagcttgcangggacgcggaagggattgcgttctatttcttcaagtcaaagccgtcctcgccggggggaggttggtctattccggcgatggatgacgacccagctaggattgagattccgtttagggcgagaaattttttggctaccgcacctgcggctacacgcaaaaagtttcccgacctga

SEQ ID NO: 25860 - protein, 234 aa, Unknown
  Obtained from environmental sample
  misc_feature (1)..(234): Xaa is any amino acid
MCEILAQRDKSKKSASTRAVMASTTTTALGTMQTSCLPLIAISFTPPSLSKTFCGLLIEGVGLNAALKKMSCPEEMPPNMPPQLLVANLPLPSWQGMSLFSLPFILAAAKPAPNSTPLHAPIEITAQARRASSLSKIGSPRPGFTPVARQVITPPALSPSARRASILAVVFSAPSLXGTRKGLRSISSSQSRPRRGEVGLFRRWMTTQLGLRFRLGREIFWLPHLRLHAKSFPT

SEQ ID NO: 25861 - DNA, 303 bp, Unknown
  Obtained from environmental sample
  misc_feature (1)..(303): n is a, c, g, or t
atgagcgtttacgaaagcataatgcaaggcttaaccgaagccgtagactatcaacagggcaaaatccccgccagaaaagtaaaactgatcataaagcctgttgataccttcaataacgatgacatcaagcttatacgcaaaagaaccggcctaagccaagtcatgtttgccggatcattgggcgtctcccccaaaacagtagaagcctgggaaaacggccgtaacaaaccggaaggagcctcccgccgcctacttgaacttgtccgtgacgaccccggttttttgaagcggtttcatgtatga

SEQ ID NO: 25862 - protein, 100 aa, Unknown
  Obtained from environmental sample
  DOMAIN (42)...(95): Helix-turn-helix
  misc_feature (1)..(100): Xaa is any amino acid
MSVYESIMQGLTEAVDYQQGKIPARKVKLIIKPVDTFNNDDIKLIRKRTGLSQVMFAGSLGVSPKTVEAWENGRNKPEGASRRLLELVRDDPGFLKRFHV

SEQ ID NO: 25863 - DNA, 621 bp, Unknown
  Obtained from environmental sample
  misc_feature (1)..(621): n is a, c, g, or t
atgccaaaaaactattcgagggaactgtccgaagcgtacgcccatctgcgaaaggacaaggcactgaggccgcttctgaacgcagcggggcgcatttccatcgccccggcgccagagccgtcgccccttcattcgctggcccagtccataaccagccagcagctcaacggcaaggcagctgcggcgatattctctcggctgctggcactgtatgatggctgtttggatgcggagcgcatatcaaagacggcggaagacaaactgcgctccgtcggcctctctggggcgaagactgccgcaataaaggacttggctgaaaaggcaagggcgggcgccatccccgaatggaaggcgatgcgaaagatgggcgacgaagagatagtcgaaaggctgacccaggtgcgcggggtggggcgctggaccgtagaaatgctgctcatcttttctctgggccgcccggacgtatggcctgtagatgactttgcaatcaaaagggcctttgggctatattttggggctgcggagccccccaagcgggccgaattgatcgcaagggccgaaaactggcggccttggaggtcggtcgtggcaaggtgcctgtggaggcatctggacgagtga

SEQ ID NO: 25864 - protein, 206 aa, Unknown
  Obtained from environmental sample
  DOMAIN (47)...(191): HhH-GPD superfamily base excision DNA repair protein
  misc_feature (1)..(206): Xaa is any amino acid
MPKNYSRELSEAYAHLRKDKALRPLLNAAGRISIAPAPEPSPLHSLAQSITSQQLNGKAAAAIFSRLLALYDGCLDAERISKTAEDKLRSVGLSGAKTAAIKDLAEKARAGAIPEWKAMRKMGDEEIVERLTQVRGVGRWTVEMLLIFSLGRPDVWPVDDFAIKRAFGLYFGAAEPPKRAELIARAENWRPWRSVVARCLWRHLDE

SEQ ID NO: 25865 - DNA, 795 bp, Unknown
  Obtained from environmental sample
  misc_feature (1)..(795): n is a, c, g, or t
atgccacacatgcccaaaaacgttgtgggcctgctggatctgcgcggggtcgtgttgcccgtcatcacgcttaggatgaggatgggcttgcctctaaaggaatcgcacgctggcgacatgatattgctgttggcccaccaaaattcccgaatcggggtcttagttgaccaagtggaatcggtcatcaccgccaccccagagcaacacggccaaataagccctctgcttgaaggcaacgacggaaattggatcaatgccatcctgcttctcgatggaagggtgatattggtgctggagccttccgcgctgctccaaatgtctccagaaaaagacccgcgcgacgatggctcggggactgaacacggcggtggggtggacaccagcgaaatcgaaagaaagatggacgaaggcctccgcgagctgatagctatggccggtgctagggaagacggcaagatcgtgccaattttggacgcagttatcggacacaacgaaacagaagtggccaaggtgcttgagcgcgttgaaaaaatgctgaccttcacagactctgccgccgttggggtttcaaagtttaagcaggaagttgcaatgtgcggcatcaacaattttgacggtgtcatcgccgaattagagaaaaccgtgcagggcgtgcagagcactatctttgaagtcttcgaccaactgcagttccaagacatagtaaggcaaaaactggaaaaagtgctccaccacatccttggcatgcagggcgtcatttcagatgggttcacgtctggccaagcggcctcctag

SEQ ID NO: 25866 - protein, 264 aa, Unknown
  Obtained from environmental sample
  misc_feature (1)..(264): Xaa is any amino acid
MPHMPKNVVGLLDLRGVVLPVITLRMRMGLPLKESHAGDMILLLAHQNSRIGVLVDQVESVITATPEQHGQISPLLEGNDGNWINAILLLDGRVILVLEPSALLQMSPEKDPRDDGSGTEHGGGVDTSEIERKMDEGLRELIAMAGAREDGKIVPILDAVIGHNETEVAKVLERVEKMLTFTDSAAVGVSKFKQEVAMCGINNFDGVIAELEKTVQGVQSTIFEVFDQLQFQDIVRQKLEKVLHHILGMQGVISDGFTSGQAAS

SEQ ID NO: 25867 - DNA, 654 bp, Unknown
  Obtained from environmental sample
  misc_feature (1)..(654): n is a, c, g, or t
atgccgctcattttcgccaaacctttgccgggcaagccggctcaacttgaaatggcttcggaaagccgcgccgccagcctgcgggaagaatcgtctcagccgccgggcgccgtggacgcggccgtgctcgtgctgctcacgccggtcaacgctggtcaaagcccggaagaactgcttgagtggaatgtgctcctcattcgccgcaacagctacccgggcgcgcattcggggcagattgcctttcccggcggcaggcgcgaagcctcggacaacagcctgtgcgatgccgcctgccgcgaggcccgcgaagaagccggcatcaaccgggagcgcctcacggtgatcggcccgctcaccagcctctatgtgccgcccagcaattttatcatgcatccctttctggcggtcaacaaggaatttcagcccgtgcgcctggattccagggaagccgtggattacagaaacattcccgtgcgggaattcgacccgggccgcgccgtgcggctggaattcgactatccggacgggcagcggcgccctgccccggcctggcggatccaggggtttaccatctggggcgccacggccatgatcctggccgaactgcgccgcatggtcaaagacgaggccctggcggcaggaaatcgcccatga

SEQ ID NO: 25868 - protein, 217 aa, Unknown
  Obtained from environmental sample
  DOMAIN (37)...(179): NUDIX domain
  misc_feature (1)..(217): Xaa is any amino acid
MPLIFAKPLPGKPAQLEMASESRAASLREESSQPPGAVDAAVLVLLTPVNAGQSPEELLEWNVLLIRRNSYPGAHSGQIAFPGGRREASDNSLCDAACREAREEAGINRERLTVIGPLTSLYVPPSNFIMHPFLAVNKEFQPVRLDSREAVDYRNIPVREFDPGRAVRLEFDYPDGQRRPAPAWRIQGFTIWGATAMILAELRRMVKDEALAAGNRP

SEQ ID NO: 25869 - DNA, 492 bp, Unknown
  Obtained from environmental sample
  misc_feature (1)..(492): n is a, c, g, or t
gtgtaccgctttcagggcgtgggcattgacgacaagcacattgaagtcatcgtgcgccagatgctgcgcaaggtcacggtcacggaaccgggcggcaccagcttcttggtgggcgagcaggtggacaaggcggaattccgccaggaaaaccagaaaatcatggccgaaggtctggccccggccacggccgaaccgctggttctgggcatcactcaggcctcgctgacgacgtcctccttcatctcggccgcttccttccaggaaacgaccaaggtgttgaccgaagccgcgctcaaaggcaaaaccgactacctgcgcggtctcaaggaaaacgtcatcgtcgggcgcctgatccccgccggcacaggctaccgcgaatatgtggatcaggaaatcgtcgtgccggaacagcgcgagattcctgaccgttttctggaagaaccagaagagcatcccgtgccgcttgagatggatggcggcataagcgattga

SEQ ID NO: 25870 - protein, 163 aa, Unknown
  Obtained from environmental sample
  misc_feature (1)..(163): Xaa is any amino acid
MYRFQGVGIDDKHIEVIVRQMLRKVTVTEPGGTSFLVGEQVDKAEFRQENQKIMAEGLAPATAEPLVLGITQASLTTSSFISAASFQETTKVLTEAALKGKTDYLRGLKENVIVGRLIPAGTGYREYVDQEIVVPEQREIPDRFLEEPEEHPVPLEMDGGISD

SEQ ID NO: 25871 - DNA, 882 bp, Unknown
  Obtained from environmental sample
  misc_feature (1)..(882): n is a, c, g, or t
gtgaacggcaaaaaagccggttttcacgcttacggttataccagctttgagctttgcgtcacttccttagtcaagccaggcaaaaacctccttgccatcaggctggatcacggttcttcggtgcctgaccgctggtactctggtgccgggctttttcgggatatctaccttagagtaacgccaaagcttcacttcaccgcttggggccttggggtaaaggccaccattgaaagcgaaggggaagccgaaggcaatgcctttgtaaaagttaccgcagaaatagccaataccgcatcggtagccggggattctttcctgcgcctggcggtaaaagacccacagggaaacgatgttttgtccgcggaaatacctttcaaattttcgcccaaatccaaaacgcttgttgagcacagcttccaaatcaagaaccaccggctttggagcgacaggaatccagagctttacaaaattagtgcgtccataggcagagagaatgtcggaaccagggaaataagctttggaatccgcagtatcaagatgattgcgaaaaaaggccttttcgtgaacggggaaaacgtcaagttgaaaggcgtctgccttcaccatgactgcggtattttgggcgcggctttttaccgcgaagcatggcgcaggcggctccttattctgaaagggcttggctgtaacgctattagaactagccacaatccgcaggcggaagaattcctggatctttgcgacgagctgggtttttatgtaattaacgagtgttttgataaatggaaatccctgtcctacggggaaatattcgaagcgaactggcggcaggatttaactgattttatcatgagggacagaaaccatccgtcggtcttttgctga

SEQ ID NO: 25872 - protein, 293 aa, Unknown
  Obtained from environmental sample
  misc_feature (1)..(293): Xaa is any amino acid
MNGKKAGFHAYGYTSFELCVTSLVKPGKNLLAIRLDHGSSVPDRWYSGAGLFRDIYLRVTPKLHFTAWGLGVKATIESEGEAEGNAFVKVTAEIANTASVAGDSFLRLAVKDPQGNDVLSAEIPFKFSPKSKTLVEHSFQIKNHRLWSDRNPELYKISASIGRENVGTREISFGIRSIKMIAKKGLFVNGENVKLKGVCLHHDCGILGAAFYREAWRRRLLILKGLGCNAIRTSHNPQAEEFLDLCDELGFYVINECFDKWKSLSYGEIFEANWRQDLTDFIMRDRNHPSVFC

SEQ ID NO: 25873 - DNA, 927 bp, Unknown
  Obtained from environmental sample
  misc_feature (1)..(927): n is a, c, g, or t
gtgcgaggactttctctcaccataaacaaaggcgagtgtttaggaattgtaggggaaagcggttccgggaaaagcgtaagcacccaggcgatacctgggctgctgccgaaaaacgccgccgcttcaggttcgattctttactatgggaatgaactgctcgggctggatataacggccctgcgcgagtaccgggggaaaaaaatcggcatgatcttccaggagccggggcgttcatacgatcccctgcaaaatatgggaagcgtgtttttcgagactttcaaaaacagcgaaccttggatatccaaggaaaaagcttttgaaaaagcggccgccctgcttgcggaaacagggcttgaaaacggcagagaaaggctcggcaatttcccgcaccagttctcaggcgggcaattacagaggatcggcatcgcgctggcgctggctcagggatgcgagcttctcattgccgatgaaccgaccacggcattggatgtcaccatacagaaacaaattgttgaactgcttaaaacgcttcgccgtacccgcggcatttctatcctgttcataagccacgacattgaccttgttgcggaaatttcggaccggataatggtcatgtacggaggaatggagatggaattgggcccatcggacgacattatcaacaatccgaagcacccatacacaagggccctgctcgcctcctcgccccgtttcggcagccattactctaaagaaaggctctccgccattccaggcaaggtaagcgttttgggcgaggacgccgttggctgtccctttgccccccgctgttcgcaggcaacggaaaaatgccatgaaacaacgccgccgattaccatgattgaggggcatgaggtggggtgctggctaacagtgagcaatgagcaattaagaaattcctcacgctga

SEQ ID NO: 25874 - protein, 308 aa, Unknown
  Obtained from environmental sample
  DOMAIN (211)...(277): Oligopeptide/dipeptide transporter, C-terminal region
  misc_feature (1)..(308): Xaa is any amino acid
MRGLSLTINKGECLGIVGESGSGKSVSTQAIPGLLPKNAAASGSILYYGNELLGLDITALREYRGKKIGMIFQEPGRSYDPLQNMGSVFFETFKNSEPWISKEKAFEKAAALLAETGLENGRERLGNFPHQFSGGQLQRIGIALALAQGCELLIADEPTTALDVTIQKQIVELLKTLRRTRGISILFISHDIDLVAEISDRIMVMYGGMEMELGPSDDIINNPKHPYTRALLASSPRFGSHYSKERLSAIPGKVSVLGEDAVGCPFAPRCSQATEKCHETTPPITMIEGHEVGCWLTVSNEQLRNSSR

SEQ ID NO: 25875 - DNA, 978 bp, Unknown
  Obtained from environmental sample
  misc_feature (1)..(978): n is a, c, g, or t
atggggcaattctctccgcaattggtacaagtattgttgagttattactcaaaaaaagcagatgtagtatacgatccgtttttaggtagcggaacaacgttactggaagccggagaactaaacagacaggcttatgggacagagattaattacgcggctgtttgtttatcaaaaatttacgagttgattaattatgatatttcatatagaaatacactaattaatgaatttgaaaatatcttaattaaatacggaatattatactccggtacgttattttcagaagatgttgatattgtttctcaaataaaaaagttgatagatgattattatagtacaaaatataaaatattattggattgttttattattttaatcgatttatataaaaaagacttttctcaaaaatggttggtaacaaagtggtttaaaatgaaagaattagttaagtcgctaccggtgtctgcgcagagtgtaacggtaatgcaggaagacgcgagatatacgcctttctttggttctgtggtagattttgtaataacatcgccgccgtatataaatgtatttaattatcatcaacagtatagaagctcatccgaatacttaaatggcagtgtgttacctgcggcgcaagcggagataggctctaacagaaaaaatagagggaatcgtttttttacggttgtacaatattgtatagatatggcgttagtatttaccgaattaaatcgtatatgtaaaaaagattctagaattatttttattgtgggaagagaatcatcagtcaaaaagacaacgtttagaaacggtgaaattatagccgaaatcgcttgtggttgttgcggaataaagatagtaactaaacaagaaagagtgtttattaatagatatggtgttaatatatatgaagatattttacattttgtctcctcaaaaaatgatgaaaatcctatacaaaaggcactcggccgaatctga

SEQ ID NO: 25876 - protein, 325 aa, Unknown
  Obtained from environmental sample
  misc_feature (1)..(325): Xaa is any amino acid
MGQFSPQLVQVLLSYYSKKADVVYDPFLGSGTTLLEAGELNRQAYGTEINYAAVCLSKIYELINYDISYRNTLINEFENILIKYGILYSGTLFSEDVDIVSQIKKLIDDYYSTKYKILLDCFIILIDLYKKDFSQKWLVTKWFKMKELVKSLPVSAQSVTVMQEDARYTPFFGSVVDFVITSPPYINVFNYHQQYRSSSEYLNGSVLPAAQAEIGSNRKNRGNRFFTVVQYCIDMALVFTELNRICKKDSRIIFIVGRESSVKKTTFRNGEIIAEIACGCCGIKIVTKQERVFINRYGVNIYEDILHFVSSKNDENPIQKALGRI

SEQ ID NO: 25877 - DNA, 774 bp, Unknown
  Obtained from environmental sample
  misc_feature (1)..(774): n is a, c, g, or t
ttgctatggcggatcgtacttacaggccgtcaatggatgtcgactgggcttgatgtaaaaataatgaaaccgcagaacgtagccgagcttttggaattgggcagccatgatgcgggttttaccggcattgactggattgaagaaagtggctcctctgtaaaagaaatactggatcttggttttgacaaggtaaagatagtggccgcaattccggaagggcttgacgaggcggccctcagatcgaaaaagcttgtagttgcaaccgagtatgtaaacctggcggagcgttggcttaaagcttccggttacaagtaccggattctgcgcacatacggcgctacggaagttttcccgcccgacgacgctgacatgatcattgacaatacttcgaccggacagactctgaaggacaacggcttaaaaataatcggcacggtccttgaatcgtccacccgttttgtcgcttcgcacactgctcttgaaaacgcaacgaagcgcaatcggattgaagaacttgcgatgctgtttcgcgctgtccttgatggccgtgagcgcgttatgctggaaatgaacatacccaaagattgctttgacgccgcggtgaacgggcttccggcaatgcgcagtccgacagttgcacctttgtttggcgatgagggttacgccgttaaaatcgcggtgaaaaaaaacgaggtttcagaaataattccccgtctaaaaaaattgggtgctcttgatattctggaatacgatctgcgaaaagtggtaccttaa

SEQ ID NO: 25878 - protein, 257 aa, Unknown
  Obtained from environmental sample
  DOMAIN (181)...(255): HisG, C-terminal domain
  misc_feature (1)..(257): Xaa is any amino acid
MLWRIVLTGRQWMSTGLDVKIMKPQNVAELLELGSHDAGFTGIDWIEESGSSVKEILDLGFDKVKIVAAIPEGLDEAALRSKKLVVATEYVNLAERWLKASGYKYRILRTYGATEVFPPDDADMIIDNTSTGQTLKDNGLKIIGTVLESSTRFVASHTALENATKRNRIEELAMLFRAVLDGRERVMLEMNIPKDCFDAAVNGLPAMRSPTVAPLFGDEGYAVKIAVKKNEVSEIIPRLKKLGALDILEYDLRKVVP

SEQ ID NO: 25879 - DNA, 855 bp, Unknown
  Obtained from environmental sample
  misc_feature (1)..(855): n is a, c, g, or t
gtgcaggtcgcgtcggggcgttttggcgttcatcccgaatacctgaactcgggcgcggcgattgagataaaaatggggcagggggcgaagcccggcatcggaggacatctgcccggaacaaaaatcgtaggcgacatttcccgcaccagaatgatccccgaaggctccgacgcgatctcgcccgcgccgcatcacgacatttattctattgaagatctgcgccagcttgtcttttccctgaaagaggcgacgaattatcaaaagcccgttattgtcaaaatagccgcggtgcataacgtcaccgccattgccagcggcattgccagaagcggcgcggatattatagccattgacggcttccggggcggaacgggcgccgcgcccacgcgcatacgcgaccatgtgggcattcctatagaactcgctcttgccggcgttgacaaacgcctgcgcgacgagggcatccgcgacaacgtatccatcgttgtcggcggcagtatccgttccagcgccgatattatcaaagccgtcgccctgggcgcggactgcgtgtacatcgcgtcggcggcgctgatcgcgcttggctgccacctgtgcagaagctgccacgccggcagatgtaactggggcatcgccacgcaggttcccgaactggtcaagcggctgaatcccgacattggatacaaacgccttatcaatctgatgaccgcgtggcagcatgaaataaaagaaatgatgggcggcatgggcatcaactccattgacggcctgaaaggaaaccggctcatgctgcgcggcgttggattaaacgaaaaagaacttgatattctgggtattaaacacgccggagagtag

SEQ ID NO: 25880 - protein, 284 aa, Unknown
  Obtained from environmental sample
  DOMAIN (1)...(252): Conserved region in glutamate synthase
  misc_feature (1)..(284): Xaa is any amino acid
MQVASGRFGVHPEYLNSGAAIEIKMGQGAKPGIGGHLPGTKIVGDISRTRMIPEGSDAISPAPHHDIYSIEDLRQLVFSLKEATNYQKPVIVKIAAVHNVTAIASGIARSGADIIAIDGFRGGTGAAPTRIRDHVGIPIELALAGVDKRLRDEGIRDNVSIVVGGSIRSSADIIKAVALGADCVYIASAALIALGCHLCRSCHAGRCNWGIATQVPELVKRLNPDIGYKRLINLMTAWQHEIKEMMGGMGINSIDGLKGNRLMLRGVGLNEKELDILGIKHAGE

SEQ ID NO: 25881 - DNA, 564 bp, Unknown
  Obtained from environmental sample
  misc_feature (1)..(564): n is a, c, g, or t
ttgttgtgtttgagtgttgctatttccctcaccaccgctgccattagagttctctccactatcaccagtagggtcgctgtcgtctgtaggattgctgccacttgcagggttgctgccacctgtaggattgccgccgtctgtaggattgctaccacttgcagggttgctgccgtctgtaggattgctaccacttgcagggttgtcaccacctataggattgctgccactgccagagctgctgccactgccagcttcagagctggcgccaccaccgcttccagtcccgttgccgctcccggtcccaccaccacttccagtcccgttgccgctcccggtcccaccaccgcttccagtcccaccaccgcttccagtcccgctgccgcttccagtcccgctgccgcttccagtcccgctgccgcttccagtcccgctgccgctcccggtcccaccgccgtttccagccccgccgccgcttccagagccactactaccaccagagccgctgacgctaccgttaccttcaactatgtctccatttgcttccgccgctatctttgttggtaa

SEQ ID NO: 25882 - protein, 187 aa, Unknown
  Obtained from environmental sample
  misc_feature (1)..(187): Xaa is any amino acid
MLCLSVAISLTTAAIRVLSTITSRVAVVCRIAATCRVAATCRIAAVCRIATTCRVAAVCRIATTCRVVTTYRIAATARAAATASFRAGATTASSPVAAPGPTTTSSPVAAPGPTTASSPTTASSPAAASSPAAASSPAAASSPAAAPGPTAVSSPAAASRATTTTRAADATVTFNYVSICFRRYLCW

SEQ ID NO: 25883 - DNA, 672 bp, Unknown
  Obtained from environmental sample
  misc_feature (1)..(672): n is a, c, g, or t
gtgttgctatttccctcaccaccgctgccattagagttctctccactatcaccagtagggtcgctgtcgtctgtaggattgctgccacttgcagggttgctgccacctgtaggattgccgccgtctgtaggattgctaccacttgcagggttgctgccgtctgtaggattgctaccacttgcagggttgtcaccacctataggattgctgccactgccagagctgctgccactgccagcttcagagctggcgccaccaccgcttccagtcccgttgccgctcccggtcccaccaccacttccagtcccgttgccgctcccggtcccaccaccgcttccagtcccaccaccgcttccagtcccgctgccgcttccagtcccgctgccgcttccagtcccgctgccgcttccagtcccgctgccgctcccggtcccaccgccgtttccagccccgccgccgcttccagagccactactaccaccagagccgctgacgctaccgttaccttcaactatgtctccatttgcttccgccgctatctttgttggtaagataagcgatattaacaataacactgcaaaaaaaacccacttatttttattttttcccctcaccttttcctcctgccttgaatcgcaaaaacccaatgccaaggtttttcgcgtggcgtaa

SEQ ID NO: 25884 - protein, 223 aa, Unknown
  Obtained from environmental sample
  misc_feature (1)..(223): Xaa is any amino acid
MLLFPSPPLPLEFSPLSPVGSLSSVGLLPLAGLLPPVGLPPSVGLLPLAGLLPSVGLLPLAGLSPPIGLLPLPELLPLPASELAPPPLPVPLPLPVPPPLPVPLPLPVPPPLPVPPPLPVPLPLPVPLPLPVPLPLPVPLPLPVPPPFPAPPPLPEPLLPPEPLTLPLPSTMSPFASAAIFVGKISDINNNTAKKTHLFLFFPLTFSSCLESQKPNAKVFRVA

SEQ ID NO: 25885 - DNA, 315 bp, Unknown
  Obtained from environmental sample
  misc_feature (1)..(315): n is a, c, g, or t
ttgaaggtaacggtagcgtcagcggctctggtggtagtagtggctctggaagcggcggcggggctggaaacggcggtgggaccgggagcggcagcgggactggaagcggcagcgggactggaagcggcagcgggactggaagcggcagcgggactggaagcggtggtgggactggaagcggtggtgggaccgggagcggcaacgggactggaagtggtggtgggaccgggagcggcaacgggactggaagcggtggtggcgccagctctgaagctggcagtggcagcagctctggcagtggcagcaatcctatag

SEQ ID NO: 25886 - protein, 104 aa, Unknown
  Obtained from environmental sample
  SIGNAL (1)...(20)
  misc_feature (1)..(104): Xaa is any amino acid
MKVTVASAALVVVVALEAAAGLETAVGPGAAAGLEAAAGLEAAAGLEAAAGLEAVVGLEAVVGPGAATGLEVVVGPGAATGLEAVVAPALKLAVAAALAVAAIL

SEQ ID NO: 25887 - DNA, 1479 bp, Unknown
  Obtained from environmental sample
  misc_feature (1)..(1479): n is a, c, g, or t
atgacccacgatgtctggaacggtaaatatccgtccaaggcaaattgcagaaatgccgccaacgggctgatgcgtagaaaagacggtgaaggctgtgaagatttacaagtcgttgtttatgacgcggcggcttcggatgacgaccgattttttaaggacgaacttcaaaaactaaaatggttgaaggaatgcggatttaaaaccacggaaacaaagtcctttaccaccgcgaaggagattatcgcttaccgtgaaaaaatagccgccgaaaggtataaacttccctatgacatagacggccttgtggtaaaggacatagagactgatatgtcggatcttcgcaaggctcgtcctgaaaagcagattgcctttaagtttgagttagagacggcgttcagtgttttacgagaagttatatggagcgagtcgggagcgacatacacgccaatcggagttgtcgatccggtgcgcctcgccggaaccaccgtaaaacgagcgaaccttaacaacccggacatgattcgttccatggggctaaaaataggctcgactgtttcagtcgtaaaacgaggggaaataatcccgaagatcgaaggtcttgcgcccgttcaaacgaaagaaaagactttggagattgactttccaaaaatctgcggcgtgtgtaatacggagcttgttgacgcgggaacacggctgtattgcccgaaccccgcctgcccaaagcgacttttgcacagacttgaaaaatgggtgtcggtactggatatccgggaattgggagaaaaactgcttcgtcaattatttgaaaaaaacagggttacgcatattcatgaattttacacattgacgacaggagaacttgccgaattcgacagaatgggagaactttccgccgcgaaagtaatccgccacatacagacaaaacgggaactttccctcgccgtttttacagcgggttttgacttggaaggagtcgccgaaaccacaatggaaaaaatcgccgccgccggttttaacacattggaaaaactccgcgcggcatccgtggcagactttgcctccgtttacggtcttggagaaataaccgcctctgtaattgtagacggtcttaaagaatgcgccgcagaaatggacgcagtcttaaagactaaaatcataacgatagcgccgccaccttcggaagagtcccagcccatgcgcggattgtctttttgttttacgggagaattaaagtccatgaaaaggggagaggcggaggagaaaataaaatcgttgggagcgcagtcaaagtcatcggtagtgaaggggctttcttaccttgttacaaacgacccatcttcaggctcttcaaagaacaagaaagcgagggaactggggataaaaataattgatgaagatgaatttttggcgctgttgaattcagagcctaaaaaacagccgatttcaaaaccagggcgaattgttttaaaaatattttaa

SEQ ID NO: 25888 - protein, 492 aa, Unknown
  Obtained from environmental sample
  DOMAIN (216)...(241): NAD-dependent DNA ligase C4 zinc finger domain
  misc_feature (1)..(492): Xaa is any amino acid
MTHDVWNGKYPSKANCRNAANGLMRRKDGEGCEDLQVVVYDAAASDDDRFFKDELQKLKWLKECGFKTTETKSFTTAKEIIAYREKIAAERYKLPYDIDGLVVKDIETDMSDLRKARPEKQIAFKFELETAFSVLREVIWSESGATYTPIGVVDPVRLAGTTVKRANLNNPDMIRSMGLKIGSTVSVVKRGEIIPKIEGLAPVQTKEKTLEIDFPKICGVCNTELVDAGTRLYCPNPACPKRLLHRLEKWVSVLDIRELGEKLLRQLFEKNRVTHIHEFYTLTTGELAEFDRMGELSAAKVIRHIQTKRELSLAVFTAGFDLEGVAETTMEKIAAAGFNTLEKLRAASVADFASVYGLGEITASVIVDGLKECAAEMDAVLKTKIITIAPPPSEESQPMRGLSFCFTGELKSMKRGEAEEKIKSLGAQSKSSVVKGLSYLVTNDPSSGSSKNKKARELGIKIIDEDEFLALLNSEPKKQPISKPGRIVLKIF

SEQ ID NO: 25889 - DNA, 876 bp, Unknown
  Obtained from environmental sample
  misc_feature (1)..(876): n is a, c, g, or t
gtgccacacggcatagagggaacaataattgacattcagcggcttaaacggacagagcatgacagcctcagccccggagttgacgaagtggttaaggtgttgatcgccgcgaagagaaaactccgcgaaggcgataaaatggcgggacgccacggaaacaagggcgtcgtcgcccgcatcctgccggaagaggacatgccttttatggaagacggaaccccgctggatatttgccttacacccttgggcgttccttcgcgcatgaacataggccagcttttggaaaccgaacttggctgggcgggctccactcttaacgaatggtattcagctcccgtattccaatctccctcgacggatcaaatagaagaaaaacttaaagaagccggattgcccataacaagcaaaaccattttgcgcgacggcagaaccggagaaccgtttataaatccgattttctgcggagtaatttacttccttaaattgcaccatcttgtagacgacaaaatgcacgcgcgttcgacaggtccttactcgcttgttacccagcaaccgctgggcggcaaggcgcagttcggcggacagcgtctgggcgaaatggaagtttgggcgctggaagcgtacggcgcggcaaatacattgcaggaacttttgacaatcaaatctgacgatatgaccgggcgcggaaagatttacgaggcaatcgtaaagggcgagccttccacgaccgcgggtattcccgaatcgttcaacgtgcttgttcaggaactgcgcggtcttgcgctggatctttcgatctttgacaatagaggaaaacagataccgctcaccgaaaaagatgaggaattaataaccaagtcaggaagtaatttttaa

SEQ ID NO: 25890 - protein, 291 aa, Unknown
  Obtained from environmental sample
  DOMAIN (1)...(191): RNA polymerase Rpb2, domain 6
  misc_feature (1)..(291): Xaa is any amino acid
MPHGIEGTIIDIQRLKRTEHDSLSPGVDEVVKVLIAAKRKLREGDKMAGRHGNKGVVARILPEEDMPFMEDGTPLDICLTPLGVPSRMNIGQLLETELGWAGSTLNEWYSAPVFQSPSTDQIEEKLKEAGLPITSKTILRDGRTGEPFINPIFCGVIYFLKLHHLVDDKMHARSTGPYSLVTQQPLGGKAQFGGQRLGEMEVWALEAYGAANTLQELLTIKSDDMTGRGKIYEAIVKGEPSTTAGIPESFNVLVQELRGLALDLSIFDNRGKQIPLTEKDEELITKSGSNF

SEQ ID NO: 25891 - DNA, 366 bp, Unknown
  Obtained from environmental sample
  misc_feature (1)..(366): n is a, c, g, or t
gtgatctgctccttgatcttcgcggcatcttctttggaaacgccttctttcaggggctttggagcgccttctacaaggtctttggcttctttgagccccagtccggtaacaacccgaacttcctttatgaccgcaatcttttttgattcgtcaaaagccttgagaatgacgttaaattcagtttgttcctccgcagcggcggccggggcagccccagcagcgacagcggctaccgctaccggagcagcggcggaaacgccaaatttttcttccatcatttttaccagttctgaaacctccaaaaccgtcatggaagcgattgcttctaaaatttcttcttttgggctgccatactcggccatctga

SEQ ID NO: 25892 - protein, 121 aa, Unknown
  Obtained from environmental sample
  SIGNAL (1)...(21)
  misc_feature (1)..(121): Xaa is any amino acid
MICSLIFAASSLETPSFRGFGAPSTRSLASLSPSPVTTRTSFMTAIFFDSSKALRMTLNSVCSSAAAAGAAPAATAATATGAAAETPNFSSIIFTSSETSKTVMEAIASKISSFGLPYSAI

SEQ ID NO: 25893 - DNA, 393 bp, Unknown
  Obtained from environmental sample
  misc_feature (1)..(393): n is a, c, g, or t
atggccgagtatggcagcccaaaagaagaaattttagaagcaatcgcttccatgacggttttggaggtttcagaactggtaaaaatgatggaagaaaaatttggcgtttccgccgctgctccggtagcggtagccgctgtcgctgctggggctgccccggccgccgctgcggaggaacaaactgaatttaacgtcattctcaaggcttttgacgaatcaaaaaagattgcggtcataaaggaagttcgggttgttaccggactggggctcaaagaagccaaagaccttgtagaaggcgctccaaagcccctgaaagaaggcgtttccaaagaagatgccgcgaagatcaaggagcagatcactgcagtcggcggtacggttgaagttcagtaa

SEQ ID NO: 25894 - protein, 130 aa, Unknown
  Obtained from environmental sample
  DOMAIN (62)...(130): Ribosomal protein L7/L12 C-terminal domain
  misc_feature (1)..(130): Xaa is any amino acid
MAEYGSPKEEILEAIASMTVLEVSELVKMMEEKFGVSAAAPVAVAAVAAGAAPAAAAEEQTEFNVILKAFDESKKIAVIKEVRVVTGLGLKEAKDLVEGAPKPLKEGVSKEDAAKIKEQITAVGGTVEVQ

SEQ ID NO: 25895 - DNA, 876 bp, Unknown
  Obtained from environmental sample
  misc_feature (1)..(876): n is a, c, g, or t
atgggggaaggaatggttaaatctaagcccagcagcggaaaaagaatatatatcggaaaagatatccaggacgtgatggaacttccggatcttgtcgatatccagctcaattcttacgagcggtttcttcagcgtgaaaaaataaaaaaaggtgaaaaaccggaactgcagggattggaagaagtttttagatcaaccttccccatcgaaagtccgaacaaagatatggtactcgaatacgagtactataccctggacgaagataacataaaattcggcgagcaggactgcaagcagaaagggcttagctatgctgtatccctaaaggcgcgtgtaaatcttgtcttccagcagaccggtgagattcggcagaaagatatttacatgggagatatcccgatcatgaccgagcggggaacctttattatcaacggcgcggagcgggttgtcgtttcgcagattcaccgctcgccgggggtaatattcagccatgaaaagggagtttattcttcccgtatcattccgtacaggggctcctggctggaatttgaaattgacaacaaaaaagaacttatttacgcgaagattgacagaaaaaaaagaattttgggaaccatcttcctgagggccctgggttacgaaaaccgggaagaaattattcgtgccttttacaagactcagaccctgaaggtaaaagacgacaacgaaaccagggaaaaattctttggccgcgttctggcccaggcggtgtgggtcaacgacgcaaacaaggcagacgatagcggcaatgaaggcaaaaaaaagctttacagggcgggggataagctccatccgcatgacgtggacgagcttctggcaaacggggtaaaacggtag

SEQ ID NO: 25896 - protein, 291 aa, Unknown
  Obtained from environmental sample
  DOMAIN (30)...(245): RNA polymerase beta subunit
  misc_feature (1)..(291): Xaa is any amino acid
MGEGMVKSKPSSGKRIYIGKDIQDVMELPDLVDIQLNSYERFLQREKIKKGEKPELQGLEEVFRSTFPIESPNKDMVLEYEYYTLDEDNIKFGEQDCKQKGLSYAVSLKARVNLVFQQTGEIRQKDIYMGDIPIMTERGTFIINGAERVVVSQIHRSPGVIFSHEKGVYSSRIIPYRGSWLEFEIDNKKELIYAKIDRKKRILGTIFLRALGYENREEIIRAFYKTQTLKVKDDNETREKFFGRVLAQAVWVNDANKADDSGNEGKKKLYRAGDKLHPHDVDELLANGVKR

SEQ ID NO: 25897 - DNA, 774 bp, Unknown
  Obtained from environmental sample
  misc_feature (1)..(774): n is a, c, g, or t
gtgccgaacatgcttgatttaacgccaaaggaagtaaaagaaagaagcgcgctgcgggtaaacccctgcaaaatatgccagcctgtcggcgcgatgtacgcggctttgggagtaaaaaactgtatgccccattcccacggttctcaggggtgctgttcctatcacaggacggtgctttcccgccattttaaggaaccggcgatcgcttcaagctcgtcgttcacggaaggagcgagtgtgttcggcggaaagagcaacctgaataccgcggcaaagaacattttcgatatgtacaacccggatattatcgcggtgcataccacttgtctgtctgaaaccatcggcgacgatttaggctcgtttatacaggatttggaaattcccgaagggaaattcgtggtacataccaacacgcccagttatgtcggctcacacattaacggctttttcaatatgatgatggggttcatgaactacctgaccaaaaagacgggaacatccaacggcaaaacggcgatttttcccggttgggtgaaccccggcgatattcgggagttaaagcgcatcgcggggctttttggcctgccgaccacctttttcccggatcaaagcggggttctggacgctcccatgacgggaaagtacctgatgtatcccgacggcggcacgactattgatgaaattcgcggcctgggcgacagcgacgccctgattgcgttaggcgaaattataggtattgagcctgccgaactgctgaagaaaagtggaaggtga

SEQ ID NO: 25898 - protein, 257 aa, Unknown
  Obtained from environmental sample
  DOMAIN (18)...(257): Nitrogenase component 1 type Oxidoreductase
  misc_feature (1)..(257): Xaa is any amino acid
MPNMLDLTPKEVKERSALRVNPCKICQPVGAMYAALGVKNCMPHSHGSQGCCSYHRTVLSRHFKEPAIASSSSFTEGASVFGGKSNLNTAAKNIFDMYNPDIIAVHTTCLSETIGDDLGSFIQDLEIPEGKFVVHTNTPSYVGSHINGFFNMMMGFMNYLTKKTGTSNGKTAIFPGWVNPGDIRELKRIAGLFGLPTTFFPDQSGVLDAPMTGKYLMYPDGGTTIDEIRGLGDSDALIALGEIIGIEPAELLKKSGR

SEQ ID NO: 25899 - DNA, 480 bp, Unknown
  Obtained from environmental sample
  misc_feature (1)..(480): n is a, c, g, or t
atgaaagccgcaatacttttcggttcaaaatctgacgcccagacaatgaagaaggcggcggatgtctttaaggaattcggcgtttcttatgtttcatatacagtttcggcgcatcgaagcccggaactgctcgccgagattcttggcgctctggaatcagggggtactgaagtgataatcgccggtgcggggcttgcagcccaccttcccggcgtcattgccagccagacgcttatcccggttatcggcgttccaatcggctccggcgggcttggcgggctggacgcgctgttttccatcgtacagatgcccaaacagattcctgtcgcgaccgtcggtattgacaacgcggcaaacgcggcttatcttgcctgcgaaattctcgcggtaaaatatcctgaattgaaaaaatcattaacagaattcaggaaaaaaatgaaagaagacctcgctaaagaaagtgggaaaacggaattatga

SEQ ID NO: 25900 - protein, 159 aa, Unknown
  Obtained from environmental sample
  DOMAIN (1)...(157): AIR carboxylase
  misc_feature (1)..(159): Xaa is any amino acid
MKAAILFGSKSDAQTMKKAADVFKEFGVSYVSYTVSAHRSPELLAEILGALESGGTEVIIAGAGLAAHLPGVIASQTLIPVIGVPIGSGGLGGLDALFSIVQMPKQIPVATVGIDNAANAAYLACEILAVKYPELKKSLTEFRKKMKEDLAKESGKTEL

SEQ ID NO: 25901 - DNA, 558 bp, Unknown
  Obtained from environmental sample
  misc_feature (1)..(558): n is a, c, g, or t
gtgggaaaacggaattatgacagggcggtttgcatgaaccttgatgacgacaagctgtgtgaggagtgcggggttttcggggtgttcctgaatgatccccagcacgacgcggcccctttaatttatcaagggcttttttcactgcagcatcgcggacaggaaggcgccggtattgcggttgtccatgacaatgtgattgaaccctcaccgatcggcgagaacagcgtcgaaccggaggttcgcagttcccgtcttgacatccacaaaggacaagggcttgtcggtgaagttttcggtcctgacgtattggcgaaactcaaaggccatgccgccattggccatgttcgttattcgacatgcggagcgaatatcatggaaaacgtacagccttttataagccatttcaaacttggttccattgctgttgcccataacgggaatcttaccaacgcggatgtcgtgcgggaattactggaagacgccggcattgggtttgcttcttccagcgacagtgaagtcattatcaaccctgattgcaaanctcgtgccgaatnctga

SEQ ID NO: 25902 - protein, 185 aa, Unknown
  Obtained from environmental sample
  DOMAIN (23)...(185): Glutamine amidotransferases class-II
  misc_feature (1)..(185): Xaa is any amino acid
MGKRNYDRAVCMNLDDDKLCEECGVFGVFLNDPQHDAAPLIYQGLFSLQHRGQEGAGIAVVHDNVIEPSPIGENSVEPEVRSSRLDIHKGQGLVGEVFGPDVLAKLKGHAAIGHVRYSTCGANIMENVQPFISHFKLGSIAVAHNGNLTNADVVRELLEDAGIGFASSSDSEVIINPDCKXRAEX

SEQ ID NO: 25903 - DNA, 1068 bp, Unknown
  Obtained from environmental sample
  misc_feature (1)..(1068): n is a, c, g, or t
atgcaggttttattttttattgcgggaatagtaatcgcgggggccgttatggttcctatgctgctgtcccggggaaagcgaatccgcgagttggaggcccggacggaacagtccgccgggagcgcgtcagatttcaggaataaaaccataaaactcgccgccgccgtaagggaatccgccgggcttatttccctttccggcaatccggcgtcaggaggcgatcagaccggcagcagtatagaaaaaattgaaaaaacaattgacgaaaacgccaggatcgccgcggaaatcgtcgagaaaacgcgcagcgtcgccgttatttcctcaaaaatggaagaggacgtgctgaacgggttcgcggtgctggaaaaaaacgtcaggaaaatgggggatataaaagaaaaaaattcgggggttatcagcggcattatatccctgggcaataaagtaaacaaaatacgcgatattgtgagggtcattaacactattacggaccagaccaaggtaattgcgtttaacgccgcgctggaagcggcgggcgcgggggaaaccggcaagcgttttgcggtggtcgccgccgaggtaaacaggctggcggacgacatagccgttcttacgcgccagattcgggaacaggttgaggaaattcaaagctcctccgcttcgctgatcgtatacagcgaggaaggttccgacagaatcgccgaaggttataaacttatcaaggatctggaggacgtttttaaggaaatcaaggccggcgcggaaataacctccaatcaggcgcaggctatcaccgtttccacgcagcagcagttgaagtccagcgaaaaagtcagtttcgccatctccgaagtttcccaggaagtaaaactttttataaactcggtggaaacggcggctttgaccgccggaaccctggcggaacgcactcgcgagcttgaacgcttcctgactgtacaaacagcggcgcaaacagcggcgcaaacagcggcgcaaacagcggcgcanattacggcgcaatttgcggggaaagaagcgatcggacagggcgactatggcggttga

SEQ ID NO: 25904 - protein, 355 aa, Unknown
  Obtained from environmental sample
  DOMAIN (67)...(324): Methyl-accepting chemotaxis protein (MCP) signaling domain
  misc_feature (1)..(355): Xaa is any amino acid
MQVLFFIAGIVIAGAVMVPMLLSRGKRIRELEARTEQSAGSASDFRNKTIKLAAAVRESAGLISLSGNPASGGDQTGSSIEKIEKTIDENARIAAEIVEKTRSVAVISSKMEEDVLNGFAVLEKNVRKMGDIKEKNSGVISGIISLGNKVNKIRDIVRVINTITDQTKVIAFNAALEAAGAGETGKRFAVVAAEVNRLADDIAVLTRQIREQVEEIQSSSASLIVYSEEGSDRIAEGYKLIKDLEDVFKEIKAGAEITSNQAQAITVSTQQQLKSSEKVSFAISEVSQEVKLFINSVETAALTAGTLAERTRELERFLTVQTAAQTAAQTAAQTAAXITAQFAGKEAIGQGDYGG

SEQ ID NO: 25905 - DNA, 630 bp, Unknown
  Obtained from environmental sample
  misc_feature (1)..(630): n is a, c, g, or t
atgaattccaacgagacagaactcggcggccttaaggaaattattttttcggtaagcgggaaaaacgtatacgaaaatctccgctttgaatccggagttcatcgggttcaaagggtacccgccaccgaagcttccggcaggattcacacttctgccgttaccgttgcggtccttcccgaagccgacgaaactgaagtagacattcgccaggaagatcttcgcattgacgttatgcgtgcgggaggcccgggcggccaatgcgtcaacaccacagactcggcggtgaggataacccacattccaagcgggctaagcgttcattgccaggacgaaaaaagccagattaaaaacaaagccaaagccatgcgcatattacgggccagaatttacgagatggaagaggccaaggctgcgtccgaacgcgccgaagcccgcaagaaccaggttggctcaggggatcgatccgaaaggatcagaacttacaactttccccagaaccgcatgacagatcacagaataaacctgacgctctacaaacttgatcttattatgcagggggatgtggaagagcttttcgacgcattaaaactttcagcgagggaagaactccttcgtgccactgcctcgtaa

SEQ ID NO: 25906 - protein, 209 aa, Unknown
  Obtained from environmental sample
  DOMAIN (59)...(172): Peptidyl-tRNA hydrolase domain
  misc_feature (1)..(209): Xaa is any amino acid
MNSNETELGGLKEIIFSVSGKNVYENLRFESGVHRVQRVPATEASGRIHTSAVTVAVLPEADETEVDIRQEDLRIDVMRAGGPGGQCVNTTDSAVRITHIPSGLSVHCQDEKSQIKNKAKAMRILRARIYEMEEAKAASERAEARKNQVGSGDRSERIRTYNFPQNRMTDHRINLTLYKLDLIMQGDVEELFDALKLSAREELLRATAS

SEQ ID NO: 25907 - DNA, 768 bp, Unknown
  Obtained from environmental sample
  misc_feature (1)..(768): n is a, c, g, or t
atgatcagatcggccgagtgtccccgcgatctgggggtgagccttatatcgcgcgcgcctgtttcatttttgatctcctcgcgcctgttaaactcgcttatattaaacctgatctcgcttgtgctgatcaccgttatttcattcgccctgggggtgtacttttccacaaaggcgggaaccaaaacggatctcgcggtcacgttcatcgcgcttgccctgcacgcctttcccggccttttgcttctgatactcctgcagttgttcgcctcggtaacggggctttttccggtaacggcctatccgcccttccctttctccgaatcgccggttaaatttgtcttttcctacgcgcaccatatttttctgccccttctttccgctttccttggcggcataggcggcactttgcgcatgatacgcgccacgatgctcgaccagctcggccagccctacatcacggccctcaggtcgcggggcatttccgaattcagggtttatttctcccatgcccttcgcaatacccttaacccctatatcaccggcagcgcgaacctgcttgccggccttttttcaggctcgctgatactggaaataattttcgcgtatcccggaattggcaggctcatgtacgaggccgtcatacagcaggacattaacctggtgcttgccaatatcatgtttatttcatttttggttctggtgggcatggcgttagccgacatactgcttgcctttgtcgatcccagaatccggtatggcaaggaataa

SEQ ID NO: 25908 - protein, 255 aa, Unknown
  Obtained from environmental sample
  DOMAIN (29)...(252): Binding-protein-dependent transport system inner membrane component
  misc_feature (1)..(255): Xaa is any amino acid
MIRSAECPRDLGVSLISRAPVSFLISSRLLNSLILNLISLVLITVISFALGVYFSTKAGTKTDLAVTFIALALHAFPGLLLLILLQLFASVTGLFPVTAYPPFPFSESPVKFVFSYAHHIFLPLLSAFLGGIGGTLRMIRATMLDQLGQPYITALRSRGISEFRVYFSHALRNTLNPYITGSANLLAGLFSGSLILEIIFAYPGIGRLMYEAVIQQDINLVLANIMFISFLVLVGMALADILLAFVDPRIRYGKE

SEQ ID NO: 25909 - DNA, 525 bp, Unknown
  Obtained from environmental sample
  misc_feature (1)..(525): n is a, c, g, or t
atggaagaaaacaaacaagccattgaagaaaccccatacagaatcgctcaaaatttagttatgttggtaagagacgtaaatcttacggaagaaacggaggcaaaatataaaatcggcgcaatcgtaagggaaccagatttttgcgacgcaacttatgaaatgggcggaatggtaacaacgcaccgatacgctataatatcgaaccattatctggacacaagcgcattggttgaaaaaggcaaaatgtggggtttatgcatctgtcagaggaattcacaatatagagtccttgatatatataaccataaaaacaaaacccagataatgttattgcataatgatgaagtcgggaacttattccaacatatagaaaacttcagcgaagaaattttgattaatgagtgcaggaatcaatttgaaaagaaatgtgaattgcctccgattcccgaagtaacctctcccgaatggctggaacgctgcgcgcagcccctcggcataaatgacaataacgaattattcccttaa

SEQ ID NO: 25910 - protein, 174 aa, Unknown
  Obtained from environmental sample
  misc_feature (1)..(174): Xaa is any amino acid
MEENKQAIEETPYRIAQNLVMLVRDVNLTEETEAKYKIGAIVREPDFCDATYEMGGMVTTHRYAIISNHYLDTSALVEKGKMWGLCICQRNSQYRVLDIYNHKNKTQIMLLHNDEVGNLFQHIENFSEEILINECRNQFEKKCELPPIPEVTSPEWLERCAQPLGINDNNELFP

SEQ ID NO: 25911 - DNA, 528 bp, Unknown
  Obtained from environmental sample
  misc_feature (1)..(528): n is a, c, g, or t
ttgtcgcttgaagggttctgcaagaaaataaacgactacatttcttcgattaagaaaggctccgggacaagcacggagaaagtcaatgcccttgtcgctcgtctgccgcgattttgcatcaagctcgttgtctggggcatcaagttccttgactaccacaacgcgcttcccagggcggccattgactccctgccgttttacagtaccgtcttttttaccaatgtcggcagtgtgggaattgacgcgccgctccaccacaactttgatataggcaactgcggcattttctgtgccgtaggaaagatccgcaaggaaaactcagtcaaagccgacggcacggtggaaacgcgggacaaggtaaaaatcacctttacctatgacgacaggattaccgacggcatttactgcgcccgcgcaattgacatgttaaaagaccttgtcgaaaatcctgaaaaactcgaaggcccactggaattgacgcaggaagctttgtctaaacttggcctggcgaagactgagctgctatag

SEQ ID NO: 25912 - protein, 175 aa, Unknown
  Obtained from environmental sample
  misc_feature (1)..(175): Xaa is any amino acid
MSLEGFCKKINDYISSIKKGSGTSTEKVNALVARLPRFCIKLVVWGIKFLDYHNALPRAAIDSLPFYSTVFFTNVGSVGIDAPLHHNFDIGNCGIFCAVGKIRKENSVKADGTVETRDKVKITFTYDDRITDGIYCARAIDMLKDLVENPEKLEGPLELTQEALSKLGLAKTELL

SEQ ID NO: 25913 - DNA, 375 bp, Unknown
  Obtained from environmental sample
  misc_feature (1)..(375): n is a, c, g, or t
atgtatgagaagcagccctggctaaaacattttggcgaaactcccgccaacctgaattatcctgatctttctatgtacgccagtattagggaaaaaagcgaacagtaccccgatgtggacagcttcgtctttttcggtagaagaacgcgaagggcggatctcgacaagcggattgtgttcatgagccgcaggttcgcccaaatcggcataaagaaaggcgatgtcgtgattgtttgcctgccgaatattcctcaggaggtggtgtcgttttacgcgcttaacaggcttggcgcgatcaccgcccccatacacccgctttcggcggcaccggaaatagaatccttcgcaagctcgtttccgcaaaagcggccataa

SEQ ID NO: 25914 - protein, 124 aa, Unknown
  Obtained from environmental sample
  misc_feature (1)..(124): Xaa is any amino acid
MYEKQPWLKHFGETPANLNYPDLSMYASIREKSEQYPDVDSFVFFGRRTRRADLDKRIVFMSRRFAQIGIKKGDVVIVCLPNIPQEVVSFYALNRLGAITAPIHPLSAAPEIESFASSFPQKRP

SEQ ID NO: 25915 - DNA, 456 bp, Unknown
  Obtained from environmental sample
  misc_feature (1)..(456): n is a, c, g, or t
ttgaattcgaatagtgtaaaatttcacttacgaacggaaaaaaagggaggggatgtatttatggaaaccattatagctttgatattttcaatatcagttgaaatgggattgccacccaattttgttctcgccatcgctctgactgaaaacgacactttaaatcccacggcgattcactataacgccaatggcacggcggacaaaggcattatgcagcttaattcatcgtggttccgccataatgaatggtatgacccggaaataaatatcagggcggggtgttcccacattaaaacgctgctgggcagacgtgaaattaagacatactggatggcggcggtggcttacaatgccggtgtcgggagaatacacaatcccccgaaaagctcagttaattacgctcacaaagtgatgaaaaaatacagggaattgagcgccgtggccgcgctaaggtga

SEQ ID NO: 25916 - protein, 151 aa, Unknown
  Obtained from environmental sample
  DOMAIN (26)...(139): Transglycosylase SLT domain
  misc_feature (1)..(151): Xaa is any amino acid
MNSNSVKFHLRTEKKGGDVFMETIIALIFSISVEMGLPPNFVLAIALTENDTLNPTAIHYNANGTADKGIMQLNSSWFRHNEWYDPEINIRAGCSHIKTLLGRREIKTYWMAAVAYNAGVGRIHNPPKSSVNYAHKVMKKYRELSAVAALR

SEQ ID NO: 25917 - DNA, 534 bp, Unknown
  Obtained from environmental sample
  misc_feature (1)..(534): n is a, c, g, or t
atgaaaaaatttattactgtggtaatcgtcttatttgtatgcgccggcgccgggttcgccgccgatccggtggaagggttttggatgagcgtagacgataaaacaggggaaattaaatccggttgggaaatatacgaaaataacggtcacatgtatggaaaaatgctttccgctgttggcttctcatcaactaccaaagcgacaagatgccgtgacagctatgccggttttcccatagccggaaaagtaaaccagcttccccttctgggcaccccctggatgttcggccttcgcagggaaagccccggaaaatggactaacggcaatatcgtcaaccctgaagacggcaatatgtataaattatcacttttcatcatccggcggacggcagaaagttccggcaagaaacgctggaagtacgcgggcagcttctttttttctcaggcagccaatactggcggcgggcaacccgcgaggaagcgagttcgctgtagtaattactctgcgcaaaaaatcttaaaatacttttattaa

SEQ ID NO: 25918 - protein, 177 aa, Unknown
  Obtained from environmental sample
  SIGNAL (1)...(20)
  misc_feature (1)..(177): Xaa is any amino acid
MKKFITVVIVLFVCAGAGFAADPVEGFWMSVDDKTGEIKSGWEIYENNGHMYGKMLSAVGFSSTTKATRCRDSYAGFPIAGKVNQLPLLGTPWMFGLRRESPGKWTNGNIVNPEDGNMYKLSLFIIRRTAESSGKKRWKYAGSFFFSQAANTGGGQPARKRVRCSNYSAQKILKYFY

SEQ ID NO: 25919 - DNA, 576 bp, Unknown
  Obtained from environmental sample
  misc_feature (1)..(576): n is a, c, g, or t
atggcggtaaactttcccaaaaatataaaggtgatattcggcggcggcgtactctatgaaatggcaattaccgatctgatttttagctctcagctcatatcgatttttatttcagtgcttatcgtattcctaatcatggcgttgtccaacaaatcgctgattgccggagtcataggcgccgttccgctggcgctggcgatcttgtgcaatttcgctgtaatgggttttcttggaattaaactcggtcttggaaccgctcttatttcaagcctcgcagtcggcatcggcattgactataccattcattttattgaattttttaagcatgaatatcaatcaggaaagcaaaattatcttcacctgacattcatcggctgcggaaaagccattatgattaacgccctggccgtgggcgcgggattcggggtgcttgcgttttcccagttcaaaattatcgcggaccttggcttgctcatcgctttaagtatgctgataaccgcctttgtaagccttaccgtgataccggccctgcttatggtgattaagccaaaatttatttatggggtgaataaatga

SEQ ID NO: 25920 - protein, 191 aa, Unknown
  Obtained from environmental sample
  misc_feature (1)..(191): Xaa is any amino acid
MAVNFPKNIKVIFGGGVLYEMAITDLIFSSQLISIFISVLIVFLIMALSNKSLIAGVIGAVPLALAILCNFAVMGFLGIKLGLGTALISSLAVGIGIDYTIHFIEFFKHEYQSGKQNYLHLTFIGCGKAIMINALAVGAGFGVLAFSQFKIIADLGLLIALSMLITAFVSLTVIPALLMVIKPKFIYGVNK

SEQ ID NO: 25921 - DNA, 900 bp, Unknown
  Obtained from environmental sample
  misc_feature (1)..(900): n is a, c, g, or t
atgcgttcagcgggcaataacgggcgtggcgcggttctcgccacgggtacgcctattactaattctgttaccgatatatttgtcatgcaaagttatctgcaatatggcgaattgaaatttttagacttacatcattttgacaactgggcggcgacatttggcgaaaagcaaaccgaatttgagattgatgtggacaccagcgcctaccgtatggcgacgcgtttttctaaatttcacaatctgccggaaatgacgaaccttttagcgcaaattgcggattttcataatgttgacgaaagcaatgaaataccggcatttgaaggctacagcgataagctgatttctaaaaccgctgcattggcggattacttggcggaaatatccgagcgcgcagaaaccatacgcgccggactagtgagcagaaccgacgataacatgttgaaattaaccactgatggccgtaaagccgctctggatatgcgtctggttgagccgaaaacggcattttctcttgacagtaaagtgttccgctgcatggaaagcgtattaaaaatctaccaggacaccgccgaacaacggctgacgcaacttatattctgcgatatttcaaccccaaaggcgggatttaacatatatgacgaaatgaagaatctgttgatatcttacggagcgccagcagatgaaattgcctttgttcatgattatgacacggaaaaacgccgctcgcagttgttcgcacagatgcaacgcggagatatacgggtgctgttgggatcaacatttaaactgggaataggcgtaaatgtacaaaaaaaactcgttgctgttcatcatttggatgtgccgtggcgaccggctgacatggttcaacgcgaggcagaatattgcgtcaaggcatga

SEQ ID NO: 25922 - protein, 299 aa, Unknown
  Obtained from environmental sample
  misc_feature (1)..(299): Xaa is any amino acid
MRSAGNNGRGAVLATGTPITNSVTDIFVMQSYLQYGELKFLDLHHFDNWAATFGEKQTEFEIDVDTSAYRMATRFSKFHNLPEMTNLLAQIADFHNVDESNEIPAFEGYSDKLISKTAALADYLAEISERAETIRAGLVSRTDDNMLKLTTDGRKAALDMRLVEPKTAFSLDSKVFRCMESVLKIYQDTAEQRLTQLIFCDISTPKAGFNIYDEMKNLLISYGAPADEIAFVHDYDTEKRRSQLFAQMQRGDIRVLLGSTFKLGIGVNVQKKLVAVHHLDVPWRPADMVQREAEYCVKA

SEQ ID NO: 25923 - DNA, 810 bp, Unknown
  Obtained from environmental sample
  misc_feature (1)..(810): n is a, c, g, or t
atgttgaatgatctacaaaaggaactggccgagatcgggcagtccctcgaatccatcaatgaagccgccctccggtgcggtcaaaaggccgccgatgcgccgccgcctcgtaccgccgagcagtgcgtccgtgccgccatagatgacgtcatggacaaacaggcggcggccacagaaaagttggtaatcgacctcgccctaaagggcgggatgggctactacacggcagaggagctgtcagccgtgctgcgggatcagacggactgggagctgttaggccccggagcaggagatgactaccccacgaactactataccaccaccgagacgcggcgagctgaacaggcggtcgtcgattacgcccggcacgatcgtggacagtacggcagggcgatcacccccgacaagatggacgaacacatggcgcggatcgccgccgaggggacgcaactctcgaccgggcaatataagaccgtcaagatggtatgtaccgcccgcgaccgtatgtctatcgttcaaggcgacgccgggacaggaaagacctttgccatgacgaccgccaagacgatactggccgccgaggggataaccgttagagggttcgccccgaccggcaaggccgccgaggagctgaacgccgtcggcgtcaagtccatgacgatccacagttacctcgaaagccccaacgcccaagccgaagccggtacgggcgaagtatggcttgtggacgaggccgggatgatcggaagccggaggcttgacgaatttctcaaaaaagccgacgaaaaacaggcgcgagtatcctcatag

SEQ ID NO: 25924 - protein, 269 aa, Unknown
  Obtained from environmental sample
  misc_feature (1)..(269): Xaa is any amino acid
MLNDLQKELAEIGQSLESINEAALRCGQKAADAPPPRTAEQCVRAAIDDVMDKQAAATEKLVIDLALKGGMGYYTAEELSAVLRDQTDWELLGPGAGDDYPTNYYTTTETRRAEQAVVDYARHDRGQYGRAITPDKMDEHMARIAAEGTQLSTGQYKTVKMVCTARDRMSIVQGDAGTGKTFAMTTAKTILAAEGITVRGFAPTGKAAEELNAVGVKSMTIHSYLESPNAQAEAGTGEVWLVDEAGMIGSRRLDEFLKKADEKQARVSS

SEQ ID NO: 25925 - DNA, 501 bp, Unknown
  Obtained from environmental sample
  misc_feature (1)..(501): n is a, c, g, or t
gtggaaagagagccgaataatttttacgctcttttcgggcttgccgactgttaccgaggaatgaatcaggtaaaaaattccctatcttactggctgcgtattcttgatcaagacccgagaaataaaatgatcattacccgcgcgggagacgcataccgtaatttagatgattttgacagagcaaaagaattttatgaaagagcgttaaatattgaatttgacacatacgctgttatggggcttgcccttctcgctaaagaacaaggaaaattcgacgaatccattatatcattcaaacggttaattcagcaggacaataaaaattaccgtctttattcggagcttgcggattgttaccttaaaacaggcgataaacgaaacgctgttgaaacgctggaaagttttcaaagactcggaattaaaaatcaaaaaattacagatatgctggaatcaatcaatgaacaacatagaggagatagaccgtacacggcaaatacataa

SEQ ID NO: 25926 - protein, 166 aa, Unknown
  Obtained from environmental sample
  DOMAIN (8)...(41): Tetratricopeptide repeat
  misc_feature (1)..(166): Xaa is any amino acid
MEREPNNFYALFGLADCYRGMNQVKNSLSYWLRILDQDPRNKMIITRAGDAYRNLDDFDRAKEFYERALNIEFDTYAVMGLALLAKEQGKFDESIISFKRLIQQDNKNYRLYSELADCYLKTGDKRNAVETLESFQRLGIKNQKITDMLESINEQHRGDRPYTANT

SEQ ID NO: 25927 - DNA, 1035 bp, Unknown
  Obtained from environmental sample
  misc_feature (1)..(1035): n is a, c, g, or t
atgatttctctatcagctcttaccctttctgaaatagaagaattgttccctaccctgccccgtttccgcgccgctcaaatattcaaatggatagccaaaggagttaattcctttgaggagatgacaaatattcccgtacctcttcgcaatgaattaagcgcgggattcagtctttactcagccaaagttgacagcgtacatgaagacggagagacaaaaaaatttgtcttctctttggaagacggggcaaaaatagaatcggtgctgttaaacgacgggaaaaaacgccttacagcgtgcctttccacgcaagccggatgcccggcgggctgtgtcttttgcaaaacaggctctctcggctttaaacggaacttgagctgcgcggaaattatcgagcagtttttacatctgcggctaagttcgcagggtaaagattcggggcatatcatagacaacatcgtcgtgatgggcatgggcgagccttttttgaaccttccaaatttaagaaaggcaatagaaattttaaacgataaaaaaggaatcaatttttccttgcgaagaattacaatttccacctgcggtatttgcgagggtctttatgatttcgcccaaaacggaccttatgtcaggctcgccctttcgcttacaactgcggacgaagctttgcgccgaaaactgatgcctataacaaaggcgaacccccttgaaaaagtaaaggaacatcttctgctgttacagaaaaaaggcggcggcagaatcactcttgaagcgccgctgttagggcggataaatacccgcgacatagacgctaaatccatagcagagttcgccaaggggttggattgtatcgtaaatatcataccttggaaccctgttgacgggtttgagtttgaggggaaaccgctccaagagcctgaaaaaaaagaaacggaggactatgcgcgactgttggaaagttacggtttaaaagttaccatgcgccttcataaaggccgttcggttatgggcgcgtgcggacagttgggcgttatttag

SEQ ID NO: 25928 - protein, 344 aa, Unknown
  Obtained from environmental sample
  DOMAIN (101)...(274): Radical SAM superfamily
  misc_feature (1)..(344): Xaa is any amino acid
MISLSALTLSEIEELFPTLPRFRAAQIFKWIAKGVNSFEEMTNIPVPLRNELSAGFSLYSAKVDSVHEDGETKKFVFSLEDGAKIESVLLNDGKKRLTACLSTQAGCPAGCVFCKTGSLGFKRNLSCAEIIEQFLHLRLSSQGKDSGHIIDNIVVMGMGEPFLNLPNLRKAIEILNDKKGINFSLRRITISTCGICEGLYDFAQNGPYVRLALSLTTADEALRRKLMPITKANPLEKVKEHLLLLQKKGGGRITLEAPLLGRINTRDIDAKSIAEFAKGLDCIVNIIPWNPVDGFEFEGKPLQEPEKKETEDYARLLESYGLKVTMRLHKGRSVMGACGQLGVI

SEQ ID NO: 25929 - DNA, 381 bp, Unknown
  Obtained from environmental sample
  misc_feature (1)..(381): n is a, c, g, or t
atgaacgcagagagggtttgctttgcttcggtaagatttgccgcgacaaccactcccttgccggccgcaaggccgtcggctttaaccaccagcggcggcggggttgttttttttgccttgctaaaatatttctccgcgtatttcagtgcgtccgcatggcttgtaaaatttctgctcgccgcagcacgaatgccgtacttgcccataaaggactttgagtataccttactggtttcaagccttgcggctttctgccccggccccacaatcgcaagcccggcaccgcggaagcggtcgacgatgcccgcagccagcggcgcttcaggtcccaccaccgtaagacccacgccttctttttggcgaaggccaaaccggcgataa

SEQ ID NO: 25930 - protein, 126 aa, Unknown
  Obtained from environmental sample
  misc_feature (1)..(126): Xaa is any amino acid
MNAERVCFASVRFAATTTPLPAARPSALTTSGGGVVFFALLKYFSAYFSASAWLVKFLLAAARMPYLPIKDFEYTLLVSSLAAFCPGPTIASPAPRKRSTMPAASGASGPTTVRPTPSFWRRPNRR

SEQ ID NO: 25931 - DNA, 666 bp, Unknown
  Obtained from environmental sample
  misc_feature (1)..(666): n is a, c, g, or t
gtgatgacccaccgtcgggatacggtactgcttaaactgagggacagcgacgaagaatgggaaaaaacgatcatcgaattccggcacaattttttcccggtgtgcggaaaaaaccaggacgatatcgcaggggttttggtgttcagagattacctctgcctaagcgatcgccgccgcgaaacggtcatgtcccgggctgtcaggcccgcccagtttgtacctatcacagtcagaacccacacgctttttgcaagaatgaaaaaaagccggaatcatttcgcggttgtcgtggatgaacacggcggcctcatgggaatcgttaccatgaaagatctattggaagaactggtgggtaaccttgacgatgacagcacgaccctgccggaacaacccatgattgtaaaaacaggccccggaaaatggactttaaacggcgcaatttccctggacaaagccgcccgagagctggacgttactcttccggttgaacaccatgacacctttgcgggctttgtgttcagcctcctggggcaaatccccgaagacggcagccaggcggttatcgaaaccgatggccttaaaatagagcttcaggaaattcgcgagcacaggctggaaaaagttctggttaccaaagtagagactattgagactaaggagaaataa

SEQ ID NO: 25932 - protein, 221 aa, Unknown
  Obtained from environmental sample
  DOMAIN (134)...(214): Transporter associated domain
  misc_feature (1)..(221): Xaa is any amino acid
MMTHRRDTVLLKLRDSDEEWEKTIIEFRHNFFPVCGKNQDDIAGVLVFRDYLCLSDRRRETVMSRAVRPAQFVPITVRTHTLFARMKKSRNHFAVVVDEHGGLMGIVTMKDLLEELVGNLDDDSTTLPEQPMIVKTGPGKWTLNGAISLDKAARELDVTLPVEHHDTFAGFVFSLLGQIPEDGSQAVIETDGLKIELQEIREHRLEKVLVTKVETIETKEK

SEQ ID NO: 25933 - DNA, 786 bp, Unknown
  Obtained from environmental sample
  misc_feature (1)..(786): n is a, c, g, or t
gtggatgcacttgaaaattacataagcggagtccaaggcaaaaagcacaaagacggcactcctttttggcccgcagatttccacataataggtaaagacattctaacaacgcattgtatttattggcccacaataataatggcaatgggctgggaacttcccaaacatattctagcgcacggctggtggatgatagacggctctaaaatgagcaaaacaagcggcacgggcgttaaccctatggactacgttgaaacatatggcgttgacgtttttcgctatttcctgatacgggaaatggtggttgggcttgatgcgacattcgggtacgattcctttgtccgcagaataaattcggacttggcaaacgatttgggtaatgggttgaacagaatttacaaattgatattaactaattttaacggaaaaattcccacgccggttaaaaatggtgaacaagaagcggaattatttcgccactgcgaaaaagccactcaatttgcaaaggaaaatataggggaggcaaaactgagtttggtggtggaagaaattttgaattcagttaaagcgttaaacaaatatttagaaataaccgctccatggaaactcgcaaaaagcacagcgcaagaagataaagataaattagcaactgttttatacacaggtgcagaagttttgcgaattgcccttactttgctttctccggttatgccgcaaaaaacggagcaaggacgattaatgccgggtgctgccgatggccctctaaaaggcggagaagctgggtga

SEQ ID NO: 25934 - protein, 261 aa, Unknown
  Obtained from environmental sample
  misc_feature (1)..(261): Xaa is any amino acid
MDALENYISGVQGKKHKDGTPFWPADFHIIGKDILTTHCIYWPTIIMAMGWELPKHILAHGWWMIDGSKMSKTSGTGVNPMDYVETYGVDVFRYFLIREMVVGLDATFGYDSFVRRINSDLANDLGNGLNRIYKLILTNFNGKIPTPVKNGEQEAELFRHCEKATQFAKENIGEAKLSLVVEEILNSVKALNKYLEITAPWKLAKSTAQEDKDKLATVLYTGAEVLRIALTLLSPVMPQKTEQGRLMPGAADGPLKGGEAG

SEQ ID NO: 25935 - DNA, 438 bp, Unknown
  Obtained from environmental sample
  misc_feature (1)..(438): n is a, c, g, or t
gtgcggaaaaaaagcgtgacaattgcaattcatacggaggacgcggaatacctgggaccggatgcctttcccgtccataaccgtagccttacagcggtgtttgggaatccggtaaatattggaatgttattggaaccgcagcccagtccggacaaactccttcaggaaggggatactttaggcccgcttaccgtcctgcacctgcccggccacagccccggaagcatagcgttatgggatgaaaaagcgggggttatgttcaccggggacacgcttttttgcggtggttatgggcgcaccgatctccccggcggaagcgacaaactgcttcttgccagcctgaagcgcctttttgccatgaacggcgacatacaaatctatcccggtcatgacgggatttccacgattgggcaggaagccggtgactttcaaatataa

SEQ ID NO: 25936 - protein, 145 aa, Unknown
  Obtained from environmental sample
  misc_feature (1)..(145): Xaa is any amino acid
MRKKSVTIAIHTEDAEYLGPDAFPVHNRSLTAVFGNPVNIGMLLEPQPSPDKLLQEGDTLGPLTVLHLPGHSPGSIALWDEKAGVMFTGDTLFCGGYGRTDLPGGSDKLLLASLKRLFAMNGDIQIYPGHDGISTIGQEAGDFQI

SEQ ID NO: 25937 - DNA, 882 bp, Unknown
  Obtained from environmental sample
  misc_feature (1)..(882): n is a, c, g, or t
atgctcaccaatctgttggtaaaggccggggtaacggacggcgctattcagattctgacaggcaggggcagccatgtaggcagctggctttgcaggcacccggacgttcacgccatcaccctgacaggctcgaccgaagtgggcatcgaaacctacaagaacgcggcgaaccacttggcgcatatcgctttggaacttggcggcaacgacgcgttcatcgtatggaaggacggcaacgtggaccttgcggtagaggaaacgatctggggaaggatgtacaacacgggccaggtttgctgcgcctccaaacgcttcctgatccataacagcctcaaggaagaattcgcaaaaaagcttgttgagcggatcaggaagatcaagctgggagacccggcggacgatgccacgcagctcggctgtcttatcagtgaaaaagccgcgatacaggtcgagaagcaggtgaacctcaccgtttcccagggcggcaggatcatcctgggcggcaagcgcaacggcgcgttctatgaacccactgtaatcgttgacgtgcccaggtccgcggcggtcgccaaagacatggagatcttcggcccggtggttccgatcacaggttttgacaccatggaagaagcggtggagatcgccaactcttccaaattcggactttgcggctgtatctttacctcggacatgaagaccgcctggaaaaccgccgccgagcttgaatgcggcggcgtgatcatcaacggcgccagttttttccgcagcttcgagatgccctttggcggctacaagtactcgggtcttggaacggagggcgtcatgtcaacctttaacgaggtaacggtgacgaagactattgttctgaaaaatataatttga

SEQ ID NO: 25938 - protein, 293 aa, Unknown
  Obtained from environmental sample
  DOMAIN (1)...(287): Aldehyde dehydrogenase family
  misc_feature (1)..(293): Xaa is any amino acid
MLTNLLVKAGVTDGAIQILTGRGSHVGSWLCRHPDVHAITLTGSTEVGIETYKNAANHLAHIALELGGNDAFIVWKDGNVDLAVEETIWGRMYNTGQVCCASKRFLIHNSLKEEFAKKLVERIRKIKLGDPADDATQLGCLISEKAAIQVEKQVNLTVSQGGRIILGGKRNGAFYEPTVIVDVPRSAAVAKDMEIFGPVVPITGFDTMEEAVEIANSSKFGLCGCIFTSDMKTAWKTAAELECGGVIINGASFFRSFEMPFGGYKYSGLGTEGVMSTFNEVTVTKTIVLKNII

SEQ ID NO: 25939 - DNA, 597 bp, Unknown
  Obtained from environmental sample
  misc_feature (1)..(597): n is a, c, g, or t
atgtatcagatcggccgagatagccnggaattcggcggaacaggccttggacttgccatttgcaaaagaattgttgaattgatgcacggtgatattacattggaatccgaaacaggcaagggagctacctttacttttacattccgcgccgaactcggaacatcgggcgccgccggggatattccgtccgaagcggacggcgcggacaatattgatttccacggtaaacggatactgcttgtagaagatgtggaaataaaccgcgagatagttattaccgtattgcagcccatgggactcgaaataaccgaagccgaagacggacaaaaagcttatgatttgttccgcgccaatcccgacgcttatgatcttatttttatggatatccacatgccgggcgttgacggctatgaatcgacaaagcttatccgcgcctttaaccaccctaaagcaaaaaccgtcccgataattgccatgacagctaacgttttccgcgaagacatagatcgctgccatgccgccggtatgaacagccatatcggaaaaccgcttgacttcaactcggtaaaagcgacattgaagcggtatttggtgtag

SEQ ID NO: 25940 - protein, 198 aa, Unknown
  Obtained from environmental sample
  DOMAIN (76)...(194): Response regulator receiver domain
  misc_feature (1)..(198): Xaa is any amino acid
MYQIGRDSXEFGGTGLGLAICKRIVELMHGDITLESETGKGATFTFTFRAELGTSGAAGDIPSEADGADNIDFHGKRILLVEDVEINREIVITVLQPMGLEITEAEDGQKAYDLFRANPDAYDLIFMDIHMPGVDGYESTKLIRAFNHPKAKTVPIIAMTANVFREDIDRCHAAGMNSHIGKPLDFNSVKATLKRYLV

SEQ ID NO: 25941 - DNA, 1005 bp, Unknown
  Obtained from environmental sample
  misc_feature (1)..(1005): n is a, c, g, or t
atgatcagatcggccgagagggggcaaaccgctgcttggataacccttgaaggcgatgttgaccccggcatgaacgactacgcacgccgtgccattgcagaagcggtcaagagaaaaccagatttaatagtttttgaagtaaatacctttggcggtcgcttagatgccgcctttgacattgttgatacaataacagccttgaaaattccaaccattgctctggtgcaaaaaaaagccataagcgccggagccttaattgccctttccagcgacaagctctatatgcttccaagcacaaccataggcgattgcgctcccatagtgcaaagctccgatgggcagcctcaaattgtgggcgaaaaaatacaatccccgctaagggcaaaattccgcaatttggcggagcgaaacgggcatccgcgcctgctctcagaagcctttgttagccccgacctcggcgttatggaactttccaacaaagacacaaccatctatatgaacgttgccgaatacagcgatatgtccgaagatgagcaaaaaaaatggacaagcaaaaaaactcttgtgagggcaggcgagcttttgacaatgacaaatgaagaagcgcatcgtttgaaattttcaaaaggaacgccggaaaacatagaggcttttaaaaaagaagtaggcataacaaaaaccgagattattgaaatatcctgggcagaaaaactcacgagattcataggcacaatatctggcgttttaatgatactaggctttggcgcgctttacatggaatttaaaacaccgggttttggcatttttggagtaataggcattgtgcttttggcaaccgtatttttgggacaatatgcgagcaacctgcacgataaattgcccctagttctgctttgcctaggcgttgtatttatgcttttggaaatttttgttttgcctggagcaatgattatgcggtgctcttggcataatatgctttgtggcggctctagctttgtcttttga

SEQ ID NO: 25942 - protein, 334 aa, Unknown
  Obtained from environmental sample
  misc_feature (1)..(334): Xaa is any amino acid
MIRSAERGQTAAWITLEGDVDPGMNDYARRAIAEAVKRKPDLIVFEVNTFGGRLDAAFDIVDTITALKIPTIALVQKKAISAGALIALSSDKLYMLPSTTIGDCAPIVQSSDGQPQIVGEKIQSPLRAKFRNLAERNGHPRLLSEAFVSPDLGVMELSNKDTTIYMNVAEYSDMSEDEQKKWTSKKTLVRAGELLTMTNEEAHRLKFSKGTPENIEAFKKEVGITKTEIIEISWAEKLTRFIGTISGVLMILGFGALYMEFKTPGFGIFGVIGIVLLATVFLGQYASNLHDKLPLVLLCLGVVFMLLEIFVLPGAMIMRCSWHNMLCGGSSFVF

SEQ ID NO: 25943 - DNA, 354 bp, Unknown
  Obtained from environmental sample
  misc_feature (1)..(354): n is a, c, g, or t
atggtgttacaaagggggattattatgcggtatttagggtttgaagtttatgaaaaatcaataaacaaaagcgactgtgataaaccgattgaggtttttatggcgaaaaaaaaattgctggaaaattcgggagattttatagttgttaattttaaagaagggaaaaatcccgggtttattggagaagtaattgcggatggcttattaaaagcgccactttcacatgaaaacgccagagttctgcgaaaaatattcccttttacggctccttcgcgcgttcttggcaaagagcggagttttggacttggagacaggctgggaattgccacacccgcgtcatatcaaactttttga

SEQ ID NO: 25944 - protein, 117 aa, Unknown
  Obtained from environmental sample
  misc_feature (1)..(117): Xaa is any amino acid
MVLQRGIIMRYLGFEVYEKSINKSDCDKPIEVFMAKKKLLENSGDFIVVNFKEGKNPGFIGEVIADGLLKAPLSHENARVLRKIFPFTAPSRVLGKERSFGLGDRLGIATPASYQTF

SEQ ID NO: 25945 - DNA, 963 bp, Unknown
  Obtained from environmental sample
  misc_feature (1)..(963): n is a, c, g, or t
atgaaaacgccagagttctgcgaaaaatattcccttttacggctccttcgcgcgttcttggcaaagagcggagttttggacttggagacaggctgggaattgccacacccgcgtcatatcaaactttttgaaaaatatgacgcataccccgtattcgcgcaacagtccattcgcgagcttactctgaccaaccgcagttatgaagacgtgttggacgcagccacctttgcggtgtttagggaaggttttaaaaaagagtggggtgcggatggggatcatttaaaaaccgaaaaagacgtaaagtacgccctttccttgggctttaccatgatcacccttgactgctctgatcatatcagaaacgatataaacgcggcaaacgcacctttacccccacggaaaattttacaaaaatatttagggaaacagtttgatatcggcgagggaataatattaacttttactgaagaagaccttaaaataatttatggtatttacggaaaggctgttttctttgccgttgatatgtaccggcgtttttttaagcatggcaagtacaatgcggattttgaaatttcaatagatgaaacttccactcccaccaccccgcttcagcattattttgtcgcaagggaattaattgacagtggggtttcttttgccacaatagcgccgaggttttgcggggagttccaaaagggcgtggattattcaggcgacattgatcagtttaacaaagaaattaaagtccacgctataatcgcaaggcatttcaagtacaagctaagcattcactcaggttcggacaagttcagcgtttttcctagtatcggaacggagaccagccatatattccatgtaaaaacagcggggactaactggcttggagcgatgcgcgttgtcgcccagatagaccccaccctgtacaaagatatccaccaagtacgctttatccgtatttga

SEQ ID NO: 25946 - protein, 320 aa, Unknown
  Obtained from environmental sample
  misc_feature (1)..(320): Xaa is any amino acid
MKTPEFCEKYSLLRLLRAFLAKSGVLDLETGWELPHPRHIKLFEKYDAYPVFAQQSIRELTLTNRSYEDVLDAATFAVFREGFKKEWGADGDHLKTEKDVKYALSLGFTMITLDCSDHIRNDINAANAPLPPRKILQKYLGKQFDIGEGIILTFTEEDLKIIYGIYGKAVFFAVDMYRRFFKHGKYNADFEISIDETSTPTTPLQHYFVARELIDSGVSFATIAPRFCGEFQKGVDYSGDIDQFNKEIKVHAIIARHFKYKLSIHSGSDKFSVFPSIGTETSHIFHVKTAGTNWLGAMRVVAQIDPTLYKDIHQVRFIRI

SEQ ID NO: 25947 - DNA, 978 bp, Unknown
  Obtained from environmental sample
  misc_feature (1)..(978): n is a, c, g, or t
atggctttaccaaaaccactgagcagctattttgaaaagaaaaaagcgaatacactttttgctgtcttgcgtaattattacaccgagaacagtccctatctcattattgataccgccaggggaagaaaaataaacgaaacatccaggaaaattttacatggattcatcatcaatagttttattccgtttttgcaaaaaaacaaaataaggcgattcggcaatataaagcctgttgttatacgtaactttcaaaactacctgctcattgaaaaaaagatgctcccgcaatccattaaccggcagatgggcggaatcaaggcaatattcagccatttatttatggcaggcataatcaagcacaatatcgtaagagacatatcgcctttgagacctgccaatagcaggatcagagggtgctattcgattgacgagctaaaaggaatattcagagatacatggaaagataaaaaatcctatttgctgtgttcgattatttattccaccggaatcagaaacagcgaattgcagaatcttaaagtcaaagatcttattgtcagggaaaacgtagattttcttaacattgtaaaaagcaaaaccacaagcggcatacgaaccataccgcttcatcctaaagtacgaaaaacaattgaggaatggatagatgaaaacaagctttcgggcgaggactatctttttgtaagaaactgtaatgtacggatatttaaaaacgctaaaaaagccggcatattcatgggttcacttttggggaaagggcaagacgaactggaaaatgaaaatatcactttttattcagggcgccattttacaaaactatgcttaacctgtacaacatgggggatgttgaggaagtgttcatgggccacaaggtcagtaaaaatgtcagcgagcgatataacctcaaagacaagagaggagaaaaagaactccttgcggcggcaaaaaaagcaattgaaataa

SEQ ID NO: 25948 - protein, 325 aa, Unknown
  Obtained from environmental sample
  DOMAIN (129)...(277): Phage integrase family
  misc_feature (1)..(325): Xaa is any amino acid
MALPKPLSSYFEKKKANTLFAVLRNYYTENSPYLIIDTARGRKINETSRKILHGFIINSFIPFLQKNKIRRFGNIKPVVIRNFQNYLLIEKKMLPQSINRQMGGIKAIFSHLFMAGIIKHNIVRDISPLRPANSRIRGCYSIDELKGIFRDTWKDKKSYLLCSIIYSTGIRNSELQNLKVKDLIVRENVDFLNIVKSKTTSGIRTIPLHPKVRKTIEEWIDENKLSGEDYLFVRNCNVRIFKNAKKAGIFMGSLLGKGQDELENENITFYSGRHFTKLCLTCTTWGMLRKCSWATRSVKMSASDITSKTREEKKNSLRRQKKQLK

SEQ ID NO: 25949 - DNA, 1647 bp, Unknown
  Obtained from environmental sample
  misc_feature (1)..(1647): n is a, c, g, or t
atgataccgcgtgaatcccgacgcgtttttcaggcgctctatgcaattgatatcatggcggttattgccgcgccgctttatgttgacggccgcttttggggagtgatgtgcgtggaacagggccatacgccgcgcaagtggacgcaaaatgaaaagggatttgtcgccatgacggcaagtaccatcgcgggcgtaatcatgcgcgacatctataccattaaacttgaagaagccctgaataaggcgatggaagcaagcaaggcgaaaagcgatttcctctccagtatgagccacgaaatgcgcacgccgcttaacgcgataacgggcatgacgacaatcggcaaaaaagcaaaagatatggaacgcaaagactacgcgcttggcaaaatagaaaacgcgtcaacgcatctgcttggtgttattaacgacgtactcgatatgtcaaaaatcgaagcgaagatgctggagctttcgcccggtgaatttaatttcgagaagatgctgcaaaaagttgtcgcggtagtcaatttccgcgtggacgaaaagcggcaaaaacttgtagtacacattgacaataaaattcccaaaaccctgatagccgatgaccagcgtcttgctcaggttgttaccaatctcctgagcaatgcggttaaattcacgccggaagaaggttctatcatcctgaacgcagactttatgggggaagaaaaaggcctttgtaccatacaggtttcagtaagcgatactggaatcggaataagcgatgaacagcaaaaacgccttttcagttctttcatgcaggccgagtcgagcacgacgcgcaaatacggcggcacggggcttggccttgctatttccaaaagcatgatcgaactgatgggcggcgcgctgactgtggaaagcgcgccaaaaatcggcagccggttcagctttgatctcacatttgagacgattgacgcgcccggcgcggcgccggcccatgacgcttccgccgatgcgctgcaaaagcccctgttcgaaggagaggttctgctctgtgaggacaacctcatgaaccagcgcgtcatgtgcacgcatctggcgcgagtgggcttgcgcaccgtggtggcccagaacggcaaagagggggtggacattgtgcgcaagcgcaaggaaaacggcgaaaaaccctttgacctgattctcatggacatccacatgcctgtgatggacggacttgaagccgcgtcagccatcacggcgctcaatgttgcgacgcccatcgtggccaccacggcgaacatcatgaccgccgacaagaatttctaccgatcgtgcggcatgcccgactgcgtgagcaagccgttcacttcgcaggaattatggcgttgcctgatgaaatacctcacgccggtcagccgggcggctgaggaaagcgccgcgcagacagaggaagacgcgcaactgcacaagtggctgcaaacacacttcgtgaaacatcacagaacgacagcccgcgacatcagggaagccgtggaaaagggcgatatcaagctggcgcatcggctggcgcacactgtaaagggcaacgcggggcaaatcggcgaaaaccgcctgcagcatgccgccgccgaggtggaaagccgctcaaagactcggccaatctga

SEQ ID NO: 25950 - protein, 548 aa, Unknown
  Obtained from environmental sample
  DOMAIN (88)...(153): His Kinase A (phosphoacceptor) domain
  misc_feature (1)..(548): Xaa is any amino acid
MIPRESRRVFQALYAIDIMAVIAAPLYVDGRFWGVMCVEQGHTPRKWTQNEKGFVAMTASTIAGVIMRDIYTIKLEEALNKAMEASKAKSDFLSSMSHEMRTPLNAITGMTTIGKKAKDMERKDYALGKIENASTHLLGVINDVLDMSKIEAKMLELSPGEFNFEKMLQKVVAVVNFRVDEKRQKLVVHIDNKIPKTLIADDQRLAQVVTNLLSNAVKFTPEEGSIILNADFMGEEKGLCTIQVSVSDTGIGISDEQQKRLFSSFMQAESSTTRKYGGTGLGLAISKSMIELMGGALTVESAPKIGSRFSFDLTFETIDAPGAAPAHDASADALQKPLFEGEVLLCEDNLMNQRVMCTHLARVGLRTVVAQNGKEGVDIVRKRKENGEKPFDLILMDIHMPVMDGLEAASAITALNVATPIVATTANIMTADKNFYRSCGMPDCVSKPFTSQELWRCLMKYLTPVSRAAEESAAQTEEDAQLHKWLQTHFVKHHRTTARDIREAVEKGDIKLAHRLAHTVKGNAGQIGENRLQHAAAEVESRSKTRPI

SEQ ID NO: 25951 - DNA, 597 bp, Unknown
  Obtained from environmental sample
  misc_feature (1)..(597): n is a, c, g, or t
atgtccgcgcagtcaaatcagttcgatatgattaaagaggctacggctttcatccaaagcaaaaccaatgtcaaacccgaatatgggataattttaggtaccggtttaggccgtttggccgacagtatcgacaaagagaccgtcctcaactacgaggatatcccgtacttcccgctgtcaaccgtcgagacgcacgccggcaaactgattttcggcaagatcgccggaaagcctgtcgtcgcgatgcaggggcgctttcactactacgagggctactctatgcagcagatagttttcccggtgcgcgtgatgaaatttcttggggccggtactctcattgtgtcaaacgcctgcggcgggataaacccgctctttcctccggggactatcatggccatcaccgaccacatcaacctgcttggcgacaacccgctcataggccaaaacgacgaccgcatcggcccgcgctttcctgatatgtcggagccttactcaaacgaactattggccgtcgcctccaaagtcgcgcttgacaacgggataaagttggaacgcggggtgtacgcctctatgagcgggccgtcgctgggagactaa

SEQ ID NO: 25952 - protein, 198 aa, Unknown
  Obtained from environmental sample
  DOMAIN (25)...(198): Phosphorylase family 2
  misc_feature (1)..(198): Xaa is any amino acid
MSAQSNQFDMIKEATAFIQSKTNVKPEYGIILGTGLGRLADSIDKETVLNYEDIPYFPLSTVETHAGKLIFGKIAGKPVVAMQGRFHYYEGYSMQQIVFPVRVMKFLGAGTLIVSNACGGINPLFPPGTIMAITDHINLLGDNPLIGQNDDRIGPRFPDMSEPYSNELLAVASKVALDNGIKLERGVYASMSGPSLGD

SEQ ID NO: 25953 - DNA, 462 bp, Unknown
  Obtained from environmental sample
  misc_feature (1)..(462): n is a, c, g, or t
ttgcaggtccttttgcagcttcaccagctttttgattttgtcgtggccgaagaggagggcctcgaccatgtccgcttcctggacttcctgcgcgccggcctccaccatgacgatggctgcctccgtgcctgccaccaccaagtcgaggtcgcttgcggctcgctgggcgacggtcgggtttatcacgaactccccctttacgcgacccaccctgacgccggcgacggcattgtggaagggtatctcgctgatcagcagggcggccgaggcccccacgatggccagcacatcgggctggtgttgcccgtcaaagctgatcacctgggcagtgacggcggtgtcgccgttgtagccttcctcaaagagcgggcgcagggggcggtcaatcaggcggcttacgagggtctccttcgtggtggccttgccctccctctgaaccagccgccgggatctcggcgataa

SEQ ID NO: 25954 - protein, 153 aa, Unknown
  Obtained from environmental sample
  misc_feature (1)..(153): Xaa is any amino acid
MQVLLQLHQLFDFVVAEEEGLDHVRFLDFLRAGLHHDDGCLRACHHQVEVACGSLGDGRVYHELPLYATHPDAGDGIVEGYLADQQGGRGPHDGQHIGLVLPVKADHLGSDGGVAVVAFLKERAQGAVNQAAYEGLLRGGLALPLNQPPGSRR

SEQ ID NO: 25955 - DNA, 1080 bp, Unknown
  Obtained from environmental sample
  misc_feature (1)..(1080): n is a, c, g, or t
atggacgccataggcgctttggagatgaagccgcctgtcgtgcagccgggcgaggtatggaaggaatccggccgctgggaagcgatgggcgaaggtatgctgagggcgaagaacaggctggacaatgacttcgtcgtcagtcccaccgcggaggaggcctttactgcaatcgttcgcgacgaattatccagttacaaacagcttccccttgtcctctaccagatcaacacaaagtaccgcgacgagatacgcccccgttacggagtaatgcgcgggcgggaattcgtgatgaaagacgcctattcgtggcattgcgatgacgaaagcctggacaaaacttaccaggccatgggacgcgcctacagaaaaattttcaaacgctgcggcctttcggtgattccggttaaagcggattcaggagctatgggaggatccggctcggaagaatttatggtggaaagcgagataggcgacaacaccttgctcctctgcaaaaaatgcgattacgccgccaatgtggaaaaggccggctgcaagcccgatttcacgatcccggcttcatcggcaactaccccgccctatgaaaaaatcgacacgccgaatgttaaaaccattgaagagcttggcgcttttctagaaaacaacgacggctctccgatgaattcaaaacagttcatcaaaacgcttatataccgcgccgtcaatgtagaaatggatctttcctcggcgccaggctgtaaagacctggaacggaaaaactttgccccggacagcgcaaagggcggcgttgaaatgtatccgcaggctttcttcgccgtggcgattcgcggcgaccttgacgtgaacgagactaaactggccgccctggtaaaagccggcgaggtggcccttgccacggacagcgacgtagtccgcctgaccaacgcgcctgtgggttttgccggccccgtggggcttatctcgctgcccgtcatcgttgatcatacggttacagccatgaacgacgcggttacaggcgctctggcaaaagacctgcactacaggcatgtagcttacggccgtgatttccgccctggatga

SEQ ID NO: 25956 - protein, 359 aa, Unknown
  Obtained from environmental sample
  DOMAIN (189)...(356): YbaK / prolyl-tRNA synthetases associated domain
  misc_feature (1)..(359): Xaa is any amino acid
MDAIGALEMKPPVVQPGEVWKESGRWEAMGEGMLRAKNRLDNDFVVSPTAEEAFTAIVRDELSSYKQLPLVLYQINTKYRDEIRPRYGVMRGREFVMKDAYSWHCDDESLDKTYQAMGRAYRKIFKRCGLSVIPVKADSGAMGGSGSEEFMVESEIGDNTLLLCKKCDYAANVEKAGCKPDFTIPASSATTPPYEKIDTPNVKTIEELGAFLENNDGSPMNSKQFIKTLIYRAVNVEMDLSSAPGCKDLERKNFAPDSAKGGVEMYPQAFFAVAIRGDLDVNETKLAALVKAGEVALATDSDVVRLTNAPVGFAGPVGLISLPVIVDHTVTAMNDAVTGALAKDLHYRHVAYGRDFRPG

SEQ ID NO: 25957 - DNA, 849 bp, Unknown
  Obtained from environmental sample
  misc_feature (1)..(849): n is a, c, g, or t
ttgttttattccggacggaaacgggattttgccctgtctctgcccggtaaggggataacactgccagtttcggtatgcatcagtcctgatgaaaacagtacaccggaaaccattcatgaatttgaccggttttgcatgaatgccggggagcaggttctgccgccgcatgacagtattgcctttaacgatccggcttctatagtctttacttcggggactaccggttttgccaaaggcgtaaccctttcccataaaaacattattgccaacaccagcgcggcaattcgcattttacaacccaatgagcgggacatctttatgaatgtgctgcccctccatcatacctatcccacggtctgttcatttttggcccccattttccggggcattccgacggtcattgccgaaaaaattgtcggcaaggtggtgattgacgacataagggacgcgggagttacctttcttattgccgttcccctgttatacgataaagtgatggatgccattcagagcgggtataaaaaactgccggcactgctccgcggccccttaaatctgttgagggtaatcgccctggccgaagcgaataaaggccgtcctgaattcgggcaaaaggtattccgctttatccgtaaaaaagccggtatgcactcaatacggattatggttgccggcggcgggcctctcagcccccagacggcggatttttttgactcttttggttttaacatcgtgcacggctatggtatgagcgagaacagcccccttatcagcgtgaatactccccgtcacaagcggaatgtatcagtcggccttccggtcagttacaccgaggttaaaaatccttga

SEQ ID NO: 25958 - protein, 282 aa, Unknown
  Obtained from environmental sample
  misc_feature (1)..(282): Xaa is any amino acid
MFYSGRKRDFALSLPGKGITLPVSVCISPDENSTPETIHEFDRFCMNAGEQVLPPHDSIAFNDPASIVFTSGTTGFAKGVTLSHKNIIANTSAAIRILQPNERDIFMNVLPLHHTYPTVCSFLAPIFRGIPTVIAEKIVGKVVIDDIRDAGVTFLIAVPLLYDKVMDAIQSGYKKLPALLRGPLNLLRVIALAEANKGRPEFGQKVFRFIRKKAGMHSIRIMVAGGGPLSPQTADFFDSFGFNIVHGYGMSENSPLISVNTPRHKRNVSVGLPVSYTEVKNP

SEQ ID NO: 25959 - DNA, 1389 bp, Unknown
  Obtained from environmental sample
  misc_feature (1)..(1389): n is a, c, g, or t
gtggtattcaacgcatcctccggagtggtaaatatctccggcggcgaggttaaagcgaccgcaaacgacggctacgcggtgcaaaacaattccaccggcgaggtaaacatttccggcggcacggtttcggcaaccaccggcagggcgattaatcacaattccaccggtacgctgaacatcaccggcggcacggtttcggcgaccaccggcaatgcggtgtacaacaattccaccggagcggtaaaaatctccggcggcacgatttcgacggatggcgtcgcggtgtacaacaattccaccggtccggtaaccatctcaggcggcacggttcagtcaaccgggacaaccagcggcggtgcggtgtcaaacgcctccactggcaaaataaccgtgtcgggagcgtcaacgaaggttacttcacaaacccaaggctatactgtgggcacaattactttgtcggcgtcctcatcggataatgccgatctgcggcttgaaataatcggcggtacggtggaaaacaccagcaccggcagggcggtgtacaacgcttccgccggcgaaataaaaatctccggcggcacggtttcggcgacatcaaactatacggtacacaacaattccaccggcacgttaaatatttcaggcggcgcggtctcgtcgacttcgagcgcggcagcgtataacttttccaccggggcggtaaacatttccggcggaacggtttcatcgacaacgggcagagcggtttggaacgcttctaccggcaaaatcaccgtgtcgggagccgcagccgttacttcggcaaacccagaccccgcacagggcacgatttttttgaacgcgccctcagcggacgataccaaccttcggcttgaaataaccggcggcacggtagaaaacaccgcttctatcgcaaatgccaaggctatccgcaacaattccaccgggggggtaaccatttccggcggcaaggttcgggcggtaacgggcgtcgcggtttggaacaattctaccggcgtaatcagtgtgtcgggaaccgcaaccgttacctcggcaaacataactgccgacaacggcacaatttacttggcagcgcccacagcggataataccaaccaacggcttgtaataaccggaggcatagtggaaaataccggggctaacggcagggctatccgcaatgcttccaccggaacagtaataatttctgctggcacggttcgggcaacgggaagcggagtaccttactcggtatacggcaataccggcgcaacgctgactctcaccaggccgcctgcggtgcttatagggtttacctacccgtcaacctttaccgccccacccgctcttaccctataccggcagcgggctcggccaatctgtcattaa

SEQ ID NO: 25960 - protein, 462 aa, Unknown
  Obtained from environmental sample
  misc_feature (1)..(462): Xaa is any amino acid
MVFNASSGVVNISGGEVKATANDGYAVQNNSTGEVNISGGTVSATTGRAINHNSTGTLNITGGTVSATTGNAVYNNSTGAVKISGGTISTDGVAVYNNSTGPVTISGGTVQSTGTTSGGAVSNASTGKITVSGASTKVTSQTQGYTVGTITLSASSSDNADLRLEIIGGTVENTSTGRAVYNASAGEIKISGGTVSATSNYTVHNNSTGTLNISGGAVSSTSSAAAYNFSTGAVNISGGTVSSTTGRAVWNASTGKITVSGAAAVTSANPDPAQGTIFLNAPSADDTNLRLEITGGTVENTASIANAKAIRNNSTGGVTISGGKVRAVTGVAVWNNSTGVISVSGTATVTSANITADNGTIYLAAPTADNTNQRLVITGGIVENTGANGRAIRNASTGTVIISAGTVRATGSGVPYSVYGNTGATLTLTRPPAVLIGFTYPSTFTAPPALTLYRQRARPICH

SEQ ID NO: 25961 - DNA, 990 bp, Unknown
  Obtained from environmental sample
  misc_feature (1)..(990): n is a, c, g, or t
gtgtaccacaataaaaccggcacggtaactatctccggcggcacggttcagacgacaggggcggcatcaacgtgcagggcggtgcataataattccaccggaacggtaagcatcgccggcggaactgttaaggcaacgggtaccagcggcagggcggtacaaaacgcttccaccggcacaataaccatttccggcggcacggttcaggcgacaacgggcgttgcggcgtacagcaattcccccggaaaaataatcgtgtcgggaacggcgatggttacatcaagaaacgtgaccagcgccagcggcacgattcatattgcagccggcggttccggcaacaccggcgcgcggcttgaaataacaggcggcacgattgataacaccgccaccggctcctccgccaacagagcagtgtacaacgtttccgccgacgggatagtcatttcaggcggcacgattcagacgaatgggggccctgcggtgaacaacgcttccaccggcacattaaccatttccggcggcacggtttcgcagataaacgccagtggctcggcggtgtccaactccggtaccggcacagtaaacatctcaggcggcacggtggaaggcgggatcaacacggtgtccaattccggtgccaccggcatagtaaacatatcgggcggcacggtttcgtcgacatcatacgcggtgtacaattccggcaacaatgcggtgctaaacatctcaggcggcacggttcaggcgacggtaggcagcgcggtgtggaactatggcaacactgcgacagtaaacatatcaggcggcacggttaaggcaacgacaggcagcgcggtgaggaaccgtgtcgtcggcaaaatcaccgtgtcncagccgaccgcgaccccaacgctgattacctcggcaaacacaaacgccgtggaaggcacgattttctttgaattaccgcctgccaccaacccgggggacaataccgacacacggctttga

SEQ ID NO: 25962 - protein, 329 aa, Unknown
  Obtained from environmental sample
  misc_feature (1)..(329): Xaa is any amino acid
MYHNKTGTVTISGGTVQTTGAASTCRAVHNNSTGTVSIAGGTVKATGTSGRAVQNASTGTITISGGTVQATTGVAAYSNSPGKIIVSGTAMVTSRNVTSASGTIHIAAGGSGNTGARLEITGGTIDNTATGSSANRAVYNVSADGIVISGGTIQTNGGPAVNNASTGTLTISGGTVSQINASGSAVSNSGTGTVNISGGTVEGGINTVSNSGATGIVNISGGTVSSTSYAVYNSGNNAVLNISGGTVQATVGSAVWNYGNTATVNISGGTVKATTGSAVRNRVVGKITVSQPTATPTLITSANTNAVEGTIFFELPPATNPGDNTDTRL

SEQ ID NO: 25963 - DNA, 1329 bp, Unknown
  Obtained from environmental sample
  misc_feature (1)..(1329): n is a, c, g, or t
atgcgctcccaatccaaacctcgtcgcttgcagggaaacatggaggctccggatcagagaagcgtatgcggcttattctgtctggaaccaaaggccggaagccgcgctggaatcgctgtttttccggctcagggaagaagcggcgggagcagcattggcatgagcggcttttaccggcgggccctcagcaaacttaacaggctcaacctggagcagtgccgggaactccttgtatcggcttcgcaggaaatctttcggcttgataccgtgcttgactctctgccctgcggcatactggtatgcgacgagaaacaccgcctgctcatggcgaataaagccgctctgcgtttcctgcccatcagttacacggaaggcgatcttttatgggagcttctccccgatgagcgtatggcaaatttctttcaacaggcgttaaaacgcggcgacagggtactggagcatgaaatggatctccaaacgcaagggccgccgggcccgagccgcctgctctcaatcagtgtgcatccacttgtcgagaagcggcatataaccggttctctcgtttatattgaagatataaccgagaagcggggcagggaggtccggctgcgtcgcgctgaanatcttgccagccttaccacgcttgcggcgggcgtcgcccatgagataaaaaatccgctgggctcaatttcgattcatctccagcttatgcaaaagtccctcgccaaaagcagtgaaaaacaggaaccgttaattgacaaatattttaacatattgaacgaagaagttgaccgcctgaaccgcattgtggttgacttcttgttcgcggcgcgtcccatgacccttgaactgcgtgaggggaaccttaattcgcttattgcggagcttgccgaatttatcagggcggaactggaacagtccaatatccgtctttttctggagcttgatgaaaatatcccccccgcgtttatcgacgagcgttatatgaaacaggcattgctcaaccttattaaaaacgcccaagccgccatgcccaacgggggcctgttgaccatcgccacccaggtggcggacaatgagatacggataagcgtgtgtgataccggcgtggggataaacgcggaaagcctcgcgaaaatttttgaaccgtactttaccaccaaagacagcggaacgggtctggggcttacgctggtttataaaattataaaagaacatcatggtgaaatagcggtggaatcacgggaaggggagggcagtaattttgaaatcagcctgcccgtctatcggaaaaagaagcgtcttatcgcgtatgagggacaaaaatga

SEQ ID NO: 25964 - protein, 442 aa, Unknown
  Obtained from environmental sample
  DOMAIN (85)...(193): PAS fold
  misc_feature (1)..(442): Xaa is any amino acid
MRSQSKPRRLQGNMEAPDQRSVCGLFCLEPKAGSRAGIAVFPAQGRSGGSSIGMSGFYRRALSKLNRLNLEQCRELLVSASQEIFRLDTVLDSLPCGILVCDEKHRLLMANKAALRFLPISYTEGDLLWELLPDERMANFFQQALKRGDRVLEHEMDLQTQGPPGPSRLLSISVHPLVEKRHITGSLVYIEDITEKRGREVRLRRAEXLASLTTLAAGVAHEIKNPLGSISIHLQLMQKSLAKSSEKQEPLIDKYFNILNEEVDRLNRIVVDFLFAARPMTLELREGNLNSLIAELAEFIRAELEQSNIRLFLELDENIPPAFIDERYMKQALLNLIKNAQAAMPNGGLLTIATQVADNEIRISVCDTGVGINAESLAKIFEPYFTTKDSGTGLGLTLVYKIIKEHHGEIAVESREGEGSNFEISLPVYRKKKRLIAYEGQK

SEQ ID NO: 25965 - DNA, 417 bp, Unknown
  Obtained from environmental sample
  misc_feature (1)..(417): n is a, c, g, or t
atggtggtaatcgtcaacggcaacttcggcacgctgccgactgtttccagatccggatacaccttcgacggctggtatactcaaaacggatatagagtaggcccaggtgttcagtatttgggccactacgatagggtttacgcgcaatggactgccaacacgcccgctccgcaaccaacgcctccacctccgcaacccaacaccaaaacggtttacttcgaccccaacggcggcaacgcgcccagcttctcgagcatgcaggtaaccgttgacggcagatttgacccaatgccgactgttaccagaagcggatacatcttcgagggctggtatactcaaaacggtagtatagtaacccataataccaagtatttgggcacttacgatgtggtttacgcgcactggaggaagcaataa

SEQ ID NO: 25966 - protein, 138 aa, Unknown
  Obtained from environmental sample
  misc_feature (1)..(138): Xaa is any amino acid
MVVIVNGNFGTLPTVSRSGYTFDGWYTQNGYRVGPGVQYLGHYDRVYAQWTANTPAPQPTPPPPQPNTKTVYFDPNGGNAPSFSSMQVTVDGRFDPMPTVTRSGYIFEGWYTQNGSIVTHNTKYLGTYDVVYAHWRKQ

SEQ ID NO: 25967 - DNA, 804 bp, Unknown
  Obtained from environmental sample
  misc_feature (1)..(804): n is a, c, g, or t
gtggattttttggggcacgcggaaggttacgcgaaaaatgtcagggagcaggtaaacgcggcgaatttcgattatgtttttatcctttcatccttgaataatgattttaacatcagccgtatggccagatatcttaccgccacaatgcaaagcggaggctttcctgtttttgttttgaccaaagcggatcttgtagaagactttagtgttctggccgccgaggcccaaaaactggctcgggaagtaccggtaatttgcgtaagcagcaagacgggttttggcattgaagagctttcacccttccttgagcctgccaaaaccgtaatattcctgggatcttccggcgtaggtaagtcttctcttttaaaccggctggcaggtgagaaactaatggaagttaaatccatacgcgaggatgacagtaaaggccgccacaccacgacattccggcaactcttccggcttgaatcgggagcccttgtaatagatacgcccggaatgcgagaactcgggctctgggattcgaaagaaggcataagcctggccttcgcggaagtggaggaacttttttcccagtgcaagttttctgattgcagccaccagaccgagcctggctgcgcggttctggcggcgctggaagacggcagactttcacaagagcaatggaaaaattacaaagcccagagtagagagaatgcttttgttatgaatcattctgcttacctgaagcaaaagcaggagtttcacaagtccatagcgcggaacatcaggcaagacagaaaaggacggaaatttattaagtaa

SEQ ID NO: 25968 - protein, 267 aa, Unknown
  Obtained from environmental sample
  DOMAIN (106)...(187): GTPase of unknown function
  misc_feature (1)..(267): Xaa is any amino acid
MDFLGHAEGYAKNVREQVNAANFDYVFILSSLNNDFNISRMARYLTATMQSGGFPVFVLTKADLVEDFSVLAAEAQKLAREVPVICVSSKTGFGIEELSPFLEPAKTVIFLGSSGVGKSSLLNRLAGEKLMEVKSIREDDSKGRHTTTFRQLFRLESGALVIDTPGMRELGLWDSKEGISLAFAEVEELFSQCKFSDCSHQTEPGCAVLAALEDGRLSQEQWKNYKAQSRENAFVMNHSAYLKQKQEFHKSIARNIRQDRKGRKFIK

SEQ ID NO: 25969 - DNA, 672 bp, Unknown
  Obtained from environmental sample
  misc_feature (1)..(672): n is a, c, g, or t
atggcggtgataaagcccctggagcttgttatcgacaactggccagcaggaaaggttgaggaagtcgaagcggtgaacaaccccgaagacgagtcggcgggcaagcggaaaattccctttacaggtaaactgtggattgaacgggaggatttcgaggaagtcccgccgcccaagtacttcaggcttttccccggcaacagcgtgcggctgcgttacggctacatcgttacctgtaccggctgcgacaaggatgcggcgggaaacgtcaccgccgttcactgcacctacgatcctgaaacaaagggcgggaacgcgccggacaacaaaaaagtaaaaagcaccattcactgggtttccgcctctagcgcgattccgattgaagtgcgcatttacgactatctttttgccgttgataggccgatggaagtggagccaggaaagactttcctggacaacctaagtcccaattccctggaagtgataggcaacgcctgggccgagccatgtttggcggaagctaaaacaggggatcgttttcagtttgagcggctgggctacttcgttaaagacccagatagcgataagccaggaacagatggcaaaagccgtccggttttcaacaagacagtaggcttgagggacacctgggccaaaattgtaaaaaaggcgtaa

SEQ ID NO: 25970 - protein, 223 aa, Unknown
  Obtained from environmental sample
  DOMAIN (1)...(190): tRNA synthetases class I (E and Q), anti-codon binding domain
  misc_feature (1)..(223): Xaa is any amino acid
MAVIKPLELVIDNWPAGKVEEVEAVNNPEDESAGKRKIPFTGKLWIEREDFEEVPPPKYFRLFPGNSVRLRYGYIVTCTGCDKDAAGNVTAVHCTYDPETKGGNAPDNKKVKSTIHWVSASSAIPIEVRIYDYLFAVDRPMEVEPGKTFLDNLSPNSLEVIGNAWAEPCLAEAKTGDRFQFERLGYFVKDPDSDKPGTDGKSRPVFNKTVGLRDTWAKIVKKA

SEQ ID NO: 25971 - DNA, 414 bp, Unknown
  Obtained from environmental sample
  misc_feature (1)..(414): n is a, c, g, or t
ttgctggcctcaagctgcgccggctgcctgccggggccgataacgttcagccccgcgctgtggaatgtgtcggcgattccgttggcaagcggcagttcagggccaatgacggttatatcaattttttccctcagggcaaattgcctgagcgtttcctgcccttctacggaggcgggatccgcgttcatcgcgacattttcgcatttggcttcagccgccgtcccgccgtttccaggcgccacaaagactttatccacttttggggattgggccaatttccaggcaagggcgtgttctctgccgcctgcccctactacaagtattttcatgcaattttccttaaattcctctcgcagaggcgcagaggacgcagaggaagaaaagaaaggaagaaagggtgggggtgcatattag

SEQ ID NO: 25972 - protein, 137 aa, Unknown
  Obtained from environmental sample
  misc_feature (1)..(137): Xaa is any amino acid
MLASSCAGCLPGPITFSPALWNVSAIPLASGSSGPMTVISIFSLRANCLSVSCPSTEAGSAFIATFSHLASAAVPPFPGATKTLSTFGDWANFQARACSLPPAPTTSIFMQFSLNSSRRGAEDAEEEKKGRKGGGAY

SEQ ID NO: 25973 - DNA, 774 bp, Unknown
  Obtained from environmental sample
  misc_feature (1)..(774): n is a, c, g, or t
gtggttaaagaacccgcgggctacaaaggctggcaagatcaattaaaaagagtaaccgaacaaggccttatttccacaacanggagcacacgcccgtcttttcaagaacttgcggacccctattgggcggacgttgcgggaaagggaaatgttcccatagtttccgctatttttacttttaaaaataattcaggcagaattgtaggtttgatagggatcaactttataagcacagttcaggatgttgtggacgatttggtaaaagaagtgtacaacggcgcgggaatggccgcaatatacagcgataacggcactattatggctcactgggataaagacagggtcaaggataatattaaaaccaatgccagggaaaaagcgctttttggaaacgacgttagccgcatagttgacacaattttaaatggcggcggaaaaagcaaagatgccattacgctggaaaaattctctgctgatcagaatacaaacgtatattttattttcgatcctattctcgtttcaggctttgaatcaactccctgggctctgcaactgggtattcccatatcggaaataaaaaaaccggttaatgatttgatttcttattctgtagtattcgccgttatccttcttgtattggcggcaattattaccctgcttgtagccagcggaattgttaaaccgattatcggcgtaaccgctacactcaaggacatatccgaaggcgaaagcgatctgacgcggagtattaaggttagttcaaagatgaagtag

SEQ ID NO: 25974 - protein, 257 aa, Unknown
  Obtained from environmental sample
  misc_feature (1)..(257): Xaa is any amino acid
MVKEPAGYKGWQDQLKRVTEQGLISTTXSTRPSFQELADPYWADVAGKGNVPIVSAIFTFKNNSGRIVGLIGINFISTVQDVVDDLVKEVYNGAGMAAIYSDNGTIMAHWDKDRVKDNIKTNAREKALFGNDVSRIVDTILNGGGKSKDAITLEKFSADQNTNVYFIFDPILVSGFESTPWALQLGIPISEIKKPVNDLISYSVVFAVILLVLAAIITLLVASGIVKPIIGVTATLKDISEGESDLTRSIKVSSKMK

SEQ ID NO: 25975 - DNA, 321 bp, Unknown
  Obtained from environmental sample
  misc_feature (1)..(321): n is a, c, g, or t
gtgcggaatcttgacgagcctgtgacaaaaaacagctatgccgtttttgccatgctgaaatcccaggtaggccatcacgctgaaagggactgtatttgttgcggggaatgcaggcgcgtatgccctgtcggactggatccggaggaactgtataagcggataattaccatgaaccgtgacgagccgcggcctgcgggcggcgcgccaggtggcggcgcggaggaatgccatggctgcggctgttgcgaattggtctgcccttccagtctgcctctctccgatatgattatgggaaagatacgggggaacggaaatggctga

SEQ ID NO: 25976 - protein, 106 aa, Unknown
  Obtained from environmental sample
  misc_feature (1)..(106): Xaa is any amino acid
MRNLDEPVTKNSYAVFAMLKSQVGHHAERDCICCGECRRVCPVGLDPEELYKRIITMNRDEPRPAGGAPGGGAEECHGCGCCELVCPSSLPLSDMIMGKIRGNGNG

SEQ ID NO: 25977 - DNA, 444 bp, Unknown
  Obtained from environmental sample
  misc_feature (1)..(444): n is a, c, g, or t
atggctgacatggaattactattgaaacagaatcccctcgttaatgtttcccggtcaaccgcggcccgtatgtggcttgtggcgatttgcgcgtttatagccgcgctgcagtccgcagttggggattcgtttttatccctgatcatcgcccttgccgcccttgtttccgcgttattaacggaactgcttataacctataaaacgcacggcttcgggaagataaaggacgggagcgcggccgcgtcggcgctggttcttgcccttctgtttccaaaccaaattcaccctgtatacgccgcgttaagcgccatattcgccatcgccgtggtaaagcacagttttggcggcttgggggcgaattggatgaatcccgctttgggcggctggctttttgcccgtttttcatggctgcacgctttttcattgcgcttaacggttccataa

SEQ ID NO: 25978 - protein, 147 aa, Unknown
  Obtained from environmental sample
  misc_feature (1)..(147): Xaa is any amino acid
MADMELLLKQNPLVNVSRSTAARMWLVAICAFIAALQSAVGDSFLSLIIALAALVSALLTELLITYKTHGFGKIKDGSAAASALVLALLFPNQIHPVYAALSAIFAIAVVKHSFGGLGANWMNPALGGWLFARFSWLHAFSLRLTVP

SEQ ID NO: 25979 - DNA, 624 bp, Unknown
  Obtained from environmental sample
  misc_feature (1)..(624): n is a, c, g, or t
ttggatgaatcccgctttgggcggctggctttttgcccgtttttcatggctgcacgctttttcattgcgcttaacggttccataaacagcctggatgaatcgggtaccgctgtcggcaatatggtaaacagctccctgaacagaacaattttttcttttctcgggtcggaactgcctcccggatatattgaccttttcgcgttaaaaacgccgggtattatcgccgaccgcgccgtgcttgtactcgttctcgccacggccgttattgccgcttcccagataagccgctcatggctttcctttgtttacctcgccgtcttcgggctgttgacgcggatgctgggggatattaccctgtggaacggtgatgttatttacgcttttctttctggcggtacccttgtgacggcgtttatcctgatcacggatccttcaacaggagctaaatcaatgccgggcggcgtaatcgcggcggttcttgcggccatcctcggttttgttttccgcttttacggccgggaattctttggctgtatctatgccgccgctctggttaatatcctgattccgctgttatacaaagcggaacgccgcctgctttatcccgtaaaggaggcggcatga

SEQ ID NO: 25980 - protein, 207 aa, Unknown
  Obtained from environmental sample
  misc_feature (1)..(207): Xaa is any amino acid
MDESRFGRLAFCPFFMAARFFIALNGSINSLDESGTAVGNMVNSSLNRTIFSFLGSELPPGYIDLFALKTPGIIADRAVLVLVLATAVIAASQISRSWLSFVYLAVFGLLTRMLGDITLWNGDVIYAFLSGGTLVTAFILITDPSTGAKSMPGGVIAAVLAAILGFVFRFYGREFFGCIYAAALVNILIPLLYKAERRLLYPVKEAA

SEQ ID NO: 25981 - DNA, 1221 bp, Unknown
  Obtained from environmental sample
  misc_feature (1)..(1221): n is a, c, g, or t
ttgtatatccgccgcaatggtgctttatgccgtattaggggcgaattagcaatgagcaggataaagctgatcctcggatctcatgcccatgtgccatacggctcaaataccgtcgactttgaaaatgtttacataaaccttctgcggccttttgtcaccagcctgtacagataccccggtatccaggcggttctccattattccggcgtactgctgcattggattgaacgctcgcatcccgagttgttcatgctaattaatgatatgattgcccgtaaacaggcggaaatactcggaggcgggttttacgagcccatgctggcgattatacctttgcaggataaaatagggcagattgagatgttaaccacctacatccgtaaacagttcggaaaacggccccagggctgctggatacccggctatgcctgggagcaggggctggtaagcccgcttgcgagctgcggtatgggctttacttttctcggcaagcgccaatntgatctggcagacggcaatgacgccccctgcatttgcgaagaccagggaaagctcattaccgttttcccggtgtcccagcagcttgaagaagatctaagcaaaaagaatattcagcctatattaaaaaatcttaacagtattaacaatgacagcggtgagaaggttgtttcaatatttcccggcaggctgaataccgggcctgggggttcagtcgattgggcatggggtaatttctttgaggaactttccaaatgtgaaagttttattgagacaataaatcccggcaaattgcttaaaagccttaaagggctgcaaaaactgtgtattcccgattcaacatgcaatactcacagcgtgccgccccggcgtttcatcattgtgaatccggaagcgggcgggatttactcaaagatgatctttaccaacgttctgataaaccagctccggggcgacaagtcgcgcaagctgtccgcccacgaggaactgtggaaagcccagagcagcgaccttttctgttcaacgggccagaggctgcgcagccattcgatcaggaacgcggcttattccgcccttctgcgcgccgagcaggttacccgcgataagggaaaatttgccccgtcgcttgttccctttgattttaacatggacggcgttgaagagtggcttttccaggacgcgaagatcaactgttatgtgcaaagtataggcggcggtttttga

SEQ ID NO: 25982 - protein, 406 aa, Unknown
  Obtained from environmental sample
  DOMAIN (24)...(333): Glycosyl hydrolase family 57
  misc_feature (1)..(406): Xaa is any amino acid
MYIRRNGALCRIRGELAMSRIKLILGSHAHVPYGSNTVDFENVYINLLRPFVTSLYRYPGIQAVLHYSGVLLHWIERSHPELFMLINDMIARKQAEILGGGFYEPMLAIIPLQDKIGQIEMLTTYIRKQFGKRPQGCWIPGYAWEQGLVSPLASCGMGFTFLGKRQXDLADGNDAPCICEDQGKLITVFPVSQQLEEDLSKKNIQPILKNLNSINNDSGEKVVSIFPGRLNTGPGGSVDWAWGNFFEELSKCESFIETINPGKLLKSLKGLQKLCIPDSTCNTHSVPPRRFIIVNPEAGGIYSKMIFTNVLINQLRGDKSRKLSAHEELWKAQSSDLFCSTGQRLRSHSIRNAAYSALLRAEQVTRDKGKFAPSLVPFDFNMDGVEEWLFQDAKINCYVQSIGGGF

SEQ ID NO: 25983 - DNA, 378 bp, Unknown
  Obtained from environmental sample
  misc_feature (1)..(378): n is a, c, g, or t
ttgtctgacacaaacaataataacaatagcgctaacacaaacggtcaatccgctaacacaagcgggcaatctgctaacacaaacggtcaatccgctaacacaaacggtcaatctgctaacacaaacggtcaatccgctaacacaaacgggcaatctgctaacgcaaacggtcaatccgctaacacaagcgggcaatctgctaacgcaaacgatgtgcctgccaacgcggaagcgcaatccaataaaaaagacactgtctttgtttgcgtggaggattgttacctgatgtcaaggcgctggcgcgtaggcgatgagtggacgggcaagaaatgcccggcacactttaccgtcaaggccgagaacaaaggcaaaaaatga

SEQ ID NO: 25984 - protein, 125 aa, Unknown
  Obtained from environmental sample
  misc_feature (1)..(125): Xaa is any amino acid
MSDTNNNNNSANTNGQSANTSGQSANTNGQSANTNGQSANTNGQSANTNGQSANANGQSANTSGQSANANDVPANAEAQSNKKDTVFVCVEDCYLMSRRWRVGDEWTGKKCPAHFTVKAENKGKK

SEQ ID NO: 25985 - DNA, 492 bp, Unknown
  Obtained from environmental sample
  misc_feature (1)..(492): n is a, c, g, or t
gtggacgggcaagaaatgcccggcacactttaccgtcaaggccgagaacaaaggcaaaaaatgaacctggacttcgcgctggtcaatcgcgccctgctaaacatagccatggcgcctgttacagaggctgacaaaatggcgggaaacgaagcatggaataccgccaaggaatactactttaatacattccttgaagccattgcgcaggcagattggacaggcgcgaggcgccgccgggaactgtgcccggctcaaatgccctataaaaagaacgatagctttgcgcatgcctatgccctgccaatagactgcgcgagggctattgagcttgacggacaagagtactttgagacggtagcgaatttgctttataccaacgcggggccttgccgcagctgccttggctgcggcaagtgcctgaaccataccggcgacaggccgcaccggcttttctgccggcacaagcggcatgccaggctttttatatgttag

SEQ ID NO: 25986 - protein, 163 aa, Unknown
  Obtained from environmental sample
  misc_feature (1)..(163): Xaa is any amino acid
MDGQEMPGTLYRQGREQRQKMNLDFALVNRALLNIAMAPVTEADKMAGNEAWNTAKEYYFNTFLEAIAQADWTGARRRRELCPAQMPYKKNDSFAHAYALPIDCARAIELDGQEYFETVANLLYTNAGPCRSCLGCGKCLNHTGDRPHRLFCRHKRHARLFIC

SEQ ID NO: 25987 - DNA, 624 bp, Unknown
  Obtained from environmental sample
  misc_feature (1)..(624): n is a, c, g, or t
atgaagttggcatttttcaaaattgttttacttactgttttttccttaatgtttatacaatgtcatggtaaagcggaacagaaagtagcgagtgtaactcagcttagcgattccgagaagttcgcgctggaataccctttggttggaagtgacaatatatttacatacagaaacgcaagcgagacggcagacattttagaaaaaggcaggggaattgtctttatcggctttaaagagtgccagtggtgtcagcaatacgccgttttccttaacgatgtagcgcgagagatggaagttgaaaagattttttactgcgatataaaagaagaccgggaaactaactcggaagattaccggaggatagtcgatatttattccggtcggctccagtatgatgacgagggccgcccacggctgtatgtgccggacgcggcgatagtaagcaggggcaggataatcacccacgattttgagacatcaaaagacacgttagggtacgctacgctacaggaatactggaatgatgagcgggtgaacgcgctaaaggaacggttcagagaggggataaatattttaaccagattattgcgaatacctgcaatctcgtgccaatctgatccatga

SEQ ID NO: 25988 - protein, 207 aa, Unknown
  Obtained from environmental sample
  SIGNAL (1)...(23)
  misc_feature (1)..(207): Xaa is any amino acid
MKLAFFKIVLLTVFSLMFIQCHGKAEQKVASVTQLSDSEKFALEYPLVGSDNIFTYRNASETADILEKGRGIVFIGFKECQWCQQYAVFLNDVAREMEVEKIFYCDIKEDRETNSEDYRRIVDIYSGRLQYDDEGRPRLYVPDAAIVSRGRIITHDFETSKDTLGYATLQEYWNDERVNALKERFREGINILTRLLRIPAISCQSDP

SEQ ID NO: 25989 - DNA, 1113 bp, Unknown
  Obtained from environmental sample
  misc_feature (1)..(1113): n is a, c, g, or t
atggcatcattatcaattcctgccgccaatggaatggcgcatgatttattggcgcttggagctttagtaacaaggcttgatcccggaattattccctttgcggaggcgaatgaatatttgttgcatgtttcaggcggagagtacaatgtggcgacaaatctgtccacttgtttcggcatgaaaaccgctatcgcaagcgcgattgtaaattacccaatcgggcgcagaatagagtacgccgtgcagaaagcgggagttaccccctattttaaacgttttgaacatgacggagtgcgcggtccgaacatggccatagtgtggagcgaccgggggcagggagtacgcgcccccgtggttttttacaaccgttccaatgaagccgcccaacaattaaagcccggaagttttgactgggacgctatttttaaaaagggcgtccgctggtttcactccggaggaattttcagcgcgctttcacccacgacaagcgagttggtaatagaggcgatgcaggccgcgaaaaaagcgggcgcagtagtatcttttgatttaaattaccgcgcaaaactgtgggctgtagccgccgcggaacagggcttaagcgccgctcaggcgagcgaaggcgcggcaaagacattgcgcaaaataacgagctatgttgacgtgcttgtcggcaacgaggaagatctgcaaaaagggcttggcttaaaagggcaggatgttgaaacaaagggcaaacttgatccatccgctttctttggcatgatggagagcgttacaaaagacttccccaacataaaagccgtggcgacaacgttacgcgaagttcattccaccaaccgccattcatggagcgcggtactatggcttgacggtaaaacgtaccaggccccaaccgcggaacttgacgtatacgaccgcgtaggcggcggcgacggctttgcctcaggcctcttctacgggttgttgtcaggcaagtcccccgaagactctttaaggctgggttgggcgcacggtgcgttagtaaccaccacaccaggagacacatcaatgttcagtcttgatcaagttgaagcgtttgcgaagggcggctcggcgaggatacaaagataa

SEQ ID NO: 25990 - protein, 370 aa, Unknown
  Obtained from environmental sample
  DOMAIN (13)...(355): pfkB family carbohydrate kinase
  misc_feature (1)..(370): Xaa is any amino acid
MASLSIPAANGMAHDLLALGALVTRLDPGIIPFAEANEYLLHVSGGEYNVATNLSTCFGMKTAIASAIVNYPIGRRIEYAVQKAGVTPYFKRFEHDGVRGPNMAIVWSDRGQGVRAPVVFYNRSNEAAQQLKPGSFDWDAIFKKGVRWFHSGGIFSALSPTTSELVIEAMQAAKKAGAVVSFDLNYRAKLWAVAAAEQGLSAAQASEGAAKTLRKITSYVDVLVGNEEDLQKGLGLKGQDVETKGKLDPSAFFGMMESVTKDFPNIKAVATTLREVHSTNRHSWSAVLWLDGKTYQAPTAELDVYDRVGGGDGFASGLFYGLLSGKSPEDSLRLGWAHGALVTTTPGDTSMFSLDQVEAFAKGGSARIQR

SEQ ID NO: 25991 - DNA, 669 bp, Unknown
  Obtained from environmental sample
  misc_feature (1)..(669): n is a, c, g, or t
ttggtgaccgataacaagattaatatccttaacctaaaaaatatgcaagcaatgcaaagcgatttcagcaagtacgacatagacaatatgtcgccggtgccgttgctctgccaaaccggctacctcacgttctcggattacgatgaaaaatccggcgagtacaccgtagacttccccaacaacgaagtgcgcgcctgcttcgccggctcgctgttggagcaatacgccggaatatcgtataacgataggttagacacgaaattcatacgggcgatagtgcacggtaacctcgatgacgcgatggacaccctgagccgcttcttagccgctatcccgtacgagatagcggacaataaagagaagtacttccaattggtgacgcacctgatattcatgatgctcggcttcaactgccgctcggaagtgcggatagcgacaggacggatagatactcttgtaataacgcgggacttcgtctactgcttcgagttcaaattagatggaagcgcgaaggaggcgcttgcgcagatagacagcaaagaatacgcggttccttggacggggagcgggaagaaagtgttcaaagtcggggtgaacttcgattttgagaagaggaatataggggagtggttgtcgacggtcgacgaccaaaagaaccccattccatag

SEQ ID NO: 25992 - protein, 222 aa, Unknown
  Obtained from environmental sample
  DOMAIN (1)...(210): Protein of unknown function (DUF1703)
  misc_feature (1)..(222): Xaa is any amino acid
MVTDNKINILNLKNMQAMQSDFSKYDIDNMSPVPLLCQTGYLTFSDYDEKSGEYTVDFPNNEVRACFAGSLLEQYAGISYNDRLDTKFIRAIVHGNLDDAMDTLSRFLAAIPYEIADNKEKYFQLVTHLIFMMLGFNCRSEVRIATGRIDTLVITRDFVYCFEFKLDGSAKEALAQIDSKEYAVPWTGSGKKVFKVGVNFDFEKRNIGEWLSTVDDQKNPIP

SEQ ID NO: 25993 - DNA, 366 bp, Unknown
  Obtained from environmental sample
  misc_feature (1)..(366): n is a, c, g, or t
ttgggcgttgaaggctttggtgctggccacgcctatctccgctccggcgtggaggtagacgccgccgtccgccgcccgcgctatcgtggatcccaccacattgcagatagaaagcaccgtcgcgcccctgcgcttagcctccttgagcgcggccagcgtgtccgccgtctcacccgactgcgagacggtgaagatcagcgtgttcgcgcctattatcggattgcggtagcggaactcggaggcgtactcgacctccactggtatgcccgcccactcctctatgaggtactcccccaccatcgcggcgtaataactcgtgccgcaggcggtgattatcacgcggtctatggaacgcagctcacgtag

SEQ ID NO: 25994 - protein, 121 aa, Unknown
  Obtained from environmental sample
  misc_feature (1)..(121): Xaa is any amino acid
MGVEGFGAGHAYLRSGVEVDAAVRRPRYRGSHHIADRKHRRAPALSLLERGQRVRRLTRLRDGEDQRVRAYYRIAVAELGGVLDLHWYARPLLYEVLPHHRGVITRAAGGDYHAVYGTQLT

SEQ ID NO: 25995 - DNA, 684 bp, Unknown
  Obtained from environmental sample
  misc_feature (1)..(684): n is a, c, g, or t
gtggttcaattcaacatactgaacgcagcggcaaaacacagcgttaagtacatagtgttttccagttccgctgcagtttacggtaacccaaagtatctgccgatggacgaaaagcacccaacggagccggagaactattacggctacacaaaactagccatagagcagtatttggagtggtacagaaaattaaagggaataaactacgccgcgctccgctacttcaatgcggcgggatatgacattaagggcaggattagcggcttggagcaaaacccagcgaatttgatacctatagtaatggaagccgctataggcaaaagagcctttgtagaggtgttcgggaacgattacgaaaccccggacggcacgggagttagggattatattcacgtgagcgacctagccaaagcgcacagaatggcttttgacaaattgcaaagtggaggaagttttacagtgaatttgggagttagcagcggaaatagcgttttagaggttataaaagcggcagaacgcatatctggcaggaaaattgaatataaaatagcacctcgccgtgcaggagatgccccctcagttttagcaaacccggcttatgcaaaggggtttttgggctggcaggcagagttttctgatttaaacacgctccttgaaagcacctgggttgcttataaaaagtaa

SEQ ID NO: 25996 - protein, 227 aa, Unknown
  Obtained from environmental sample
  DOMAIN (1)...(157): NAD dependent epimerase/dehydratase family
  misc_feature (1)..(227): Xaa is any amino acid
MVQFNILNAAAKHSVKYIVFSSSAAVYGNPKYLPMDEKHPTEPENYYGYTKLAIEQYLEWYRKLKGINYAALRYFNAAGYDIKGRISGLEQNPANLIPIVMEAAIGKRAFVEVFGNDYETPDGTGVRDYIHVSDLAKAHRMAFDKLQSGGSFTVNLGVSSGNSVLEVIKAAERISGRKIEYKIAPRRAGDAPSVLANPAYAKGFLGWQAEFSDLNTLLESTWVAYKK

SEQ ID NO: 25997 - DNA, 753 bp, Unknown
  Obtained from environmental sample
  misc_feature (1)..(753): n is a, c, g, or t
atgatagattggccgagtcgaacctacaggaacgcggcgaaccatctggcgcatatcgctttggaacttggcggcaacgacgccttcatcgtatggaaggacggcgatgtagactttgcggttgaggaaacgatctgggggaggatgtacaacacaggccaggtttgctgcgcctccaaacgcttcctgatccacaacagcctcaaggaagatttcgccaaaaagcttgttgaaaggattaggaagatcaagctgggagacccggcggacgatgccacgcagctcggctgtcttatcagtgaaaaagccgcgatagaagtcgagagacaggtgaacctcaccgtttcccagggcggcaaaatcatcctgggcggcaagcgaaacggagcgttctatgaacccacggtaattgttgacgtgcccaggtctgcggacgtcgccaaagacatggagatcttcggtccggtggtgccgatcacgggctttgacaccctggaagaagcggtagagatcgccaattcttccaaattcggactatgcggctgtatctttacttcggacatgaagaccgcctggaaaaccgccgccgggcttgaatgcggcggcgtgatcatcaacggcgcgagtttcttccgcagtttcgagatgccctttggcggctacaagtactcaggcataggaacagaaggcgtcatgtcaacctttaacgaggtaacgctgaccaagactatagtcctgaaaaatatcgtgtaa

SEQ ID NO: 25998 - protein, 250 aa, Unknown
  Obtained from environmental sample
  DOMAIN (1)...(244): Aldehyde dehydrogenase family
  misc_feature (1)..(250): Xaa is any amino acid
MIDWPSRTYRNAANHLAHIALELGGNDAFIVWKDGDVDFAVEETIWGRMYNTGQVCCASKRFLIHNSLKEDFAKKLVERIRKIKLGDPADDATQLGCLISEKAAIEVERQVNLTVSQGGKIILGGKRNGAFYEPTVIVDVPRSADVAKDMEIFGPVVPITGFDTLEEAVEIANSSKFGLCGCIFTSDMKTAWKTAAGLECGGVIINGASFFRSFEMPFGGYKYSGIGTEGVMSTFNEVTLTKTIVLKNIV

SEQ ID NO: 25999 - DNA, 957 bp, Unknown
  Obtained from environmental sample
  misc_feature (1)..(957): n is a, c, g, or t
atgatggccngaactaacgccatgatacaaaggacggttaatatttttgaattccgttttggggagaaaaagataaaatttacaatgaatctggctcccgatcttccgcaaagaatcataacggatgatcagcggcttgcccaggttgttaccaacctgttgagtaacgcggtcaaatttacgccggaaaacggaagcattacgctttccgcccggcgtcttccagacgcccggcgtcttccggacgcccggctggaagacaaagaacagaatttttgtactttggaaattgccgtcaccgatacgggaataggaataccaaaagagcagcagggcaaactgtttgattcctttgttcaggtagattcgagcataagccggaaattcggcggaacaggccttgggcttgccatttgcaaaagaattgttgaattgatgcacggtaatattacaatggaatccgaaacaggcaagggagcgacctttacctttacattccgcgctgaaatcggaacacaggcatcggtcgccagcgcggatgttccggcggaagcgaaggacggcggcgcatctaacggtgcggacaagattgaattccacggtaaacgtatactgcttgcggaagacgtggaaataaaccgcgagatagttattaccgtattgcagcccctggggcttgaaataatcgaagccgaagacggaaaaaatgcgtacaatttgttctgcgccaatcccgatgcctacgaccttatttttatggacattcacatgccgggcgttgacggctatgaatcgacaaggcttatccgcgcctttaaccatccaagggcaaaaaccgtccctataattgccatgaccgctaacgtcttccgcgaggacatagaacgctgccatgccgccggtatgaacgatcatatcataaaaccgcttgactttaacgcggtaatggcgacatga

SEQ ID NO: 26000 - protein, 318 aa, Unknown
  Obtained from environmental sample
  DOMAIN (202)...(318): Response regulator receiver domain
  misc_feature (1)..(318): Xaa is any amino acid
MMAXTNAMIQRTVNIFEFRFGEKKIKFTMNLAPDLPQRIITDDQRLAQVVTNLLSNAVKFTPENGSITLSARRLPDARRLPDARLEDKEQNFCTLEIAVTDTGIGIPKEQQGKLFDSFVQVDSSISRKFGGTGLGLAICKRIVELMHGNITMESETGKGATFTFTFRAEIGTQASVASADVPAEAKDGGASNGADKIEFHGKRILLAEDVEINREIVITVLQPLGLEIIEAEDGKNAYNLFCANPDAYDLIFMDIHMPGVDGYESTRLIRAFNHPRAKTVPIIAMTANVFREDIERCHAAGMNDHIIKPLDFNAVMAT

SEQ ID NO: 26001 - DNA, 402 bp, Unknown
  Obtained from environmental sample
  misc_feature (1)..(402): n is a, c, g, or t
atgccggacggggctgtggaaaaaggttcttccagattttttgcagccccgctgccctccctttgccaggatttaggaaatttgcgggtcaagtttagagctctgcggcggggtatgttgatttccttgcggtcgaacagttatgcaggacacctcttgaaaaacgtttcaagatgtattatagtgtgtatagtgaggtgtatgatgagaactaatgtggttctggatgatgacttggtaagcgaagcttttaattactccgaaacaatttccacaaaaagagaacttattgaaaccgcattaaaagaatatgttaatacccgaaaaagaaaaaacatcaaggaaataagggggaaaatttcatttagcgaggattatgattataaggctatgcgaaaatga

SEQ ID NO: 26002 - protein, 133 aa, Unknown
  Obtained from environmental sample
  misc_feature (1)..(133): Xaa is any amino acid
MPDGAVEKGSSRFFAAPLPSLCQDLGNLRVKFRALRRGMLISLRSNSYAGHLLKNVSRCIIVCIVRCMMRTNVVLDDDLVSEAFNYSETISTKRELIETALKEYVNTRKRKNIKEIRGKISFSEDYDYKAMRK

SEQ ID NO: 26003 - DNA, 399 bp, Unknown
  Obtained from environmental sample
  misc_feature (1)..(399): n is a, c, g, or t
atgattctggtagatacgtctgtcctgatagggtactttaagggaacagaaggagccgtttatgaaaaaatgaattatcttgttgataatgatataccttttggcatatgcaattatgtttatcaggaattattgcaaggagcggcaaacgagcaggaatacaaattattgaaagattatttatcctcattgccgttttatggtttacggaatggaaatgagtcgtttgaaaatgcagcccttatgtatatgaattgcagaaagaagggaattacggtgagaagcactattgatttattaatagccgaaacagctattgaaaatgatctatacctgtttcataacgacaatgactacacgaatatttcaaaagcatataatattttgaaaatgtattag

SEQ ID NO: 26004 - protein, 132 aa, Unknown
  Obtained from environmental sample
  DOMAIN (2)...(131): PIN domain
  misc_feature (1)..(132): Xaa is any amino acid
MILVDTSVLIGYFKGTEGAVYEKMNYLVDNDIPFGICNYVYQELLQGAANEQEYKLLKDYLSSLPFYGLRNGNESFENAALMYMNCRKKGITVRSTIDLLIAETAIENDLYLFHNDNDYTNISKAYNILKMY

SEQ ID NO: 26005 - DNA, 492 bp, Unknown
  Obtained from environmental sample
  misc_feature (1)..(492): n is a, c, g, or t
ttgggaatactgcaacaaactaagttgaaagaagggttgtctcccgtataccggatttcaaaagactatgctgcctgtgattggcgcgcaaacggctatcgtttgcctaccgaggccgagtgggagtatgcggcaaaaggcggaaacatggataccaaagtttttgattattccggcagtaacagcgtggatgaagtggcgtggtatttaaaaaacagcggaagtgccacgcacccggtcggaatgaaaaagccgaatagccttggcctttatgacatgagcggtaacgtatgggaatggtgttgggacagatttgaaaagtactctccggacgcccaaacaaatccgaaaggcgtcaccgaagggccaaagcgcgtattgcgggggggatgctggttacttccggctttgaactcacgttcttcctttcgttcttctgctgatccgttgctgggaaatagcaacaagggctttcgcgttgtgctcaattag

SEQ ID NO: 26006 - protein, 163 aa, Unknown
  Obtained from environmental sample
  DOMAIN (1)...(162): Domain of unknown function (DUF323)
  misc_feature (1)..(163): Xaa is any amino acid
MGILQQTKLKEGLSPVYRISKDYAACDWRANGYRLPTEAEWEYAAKGGNMDTKVFDYSGSNSVDEVAWYLKNSGSATHPVGMKKPNSLGLYDMSGNVWEWCWDRFEKYSPDAQTNPKGVTEGPKRVLRGGCWLLPALNSRSSFRSSADPLLGNSNKGFRVVLN

SEQ ID NO: 26007 - DNA, 888 bp, Unknown
  Obtained from environmental sample
  misc_feature (1)..(888): n is a, c, g, or t
ttgataagaataggccgagggcttgccgggggcgggctttcaggcgctccctacacatggcatctgacacgggaacccgcttccgtggttccgggcgggacggagggcgcctggcgctattggaatttcgggcccgaatccgacggagagcgatcctatgtcggggagggagaagggacgctcggccctgacggaaaaacgggcatcagcggcgagacaggcggcgagggcattgaaggcgcggcctaccgctaccggcttgaaacctcggtgcaggacgcggcacgccaggaaatatcctcccgcgcctctgttttggttcatcccgcctctttttacattgccgcgcggcttgattcaggaacgataaaaaccgccgccacaggcggcggcgcgggcgcggcttcaacctcttcagcctttttcctcagcgcgggacagccggcgacattaagctgggcgcttgtttcgcctaacggcgacctggcgcagaatcagagcggcgacttgtcaatacagcttgtccgccacgaatggaaacaggcgcggcagcagggatcgggcggcagggtcaacctgatatgggagcgggttgaggaaatcgccgcgcagagaaacgtaaaaatttcggccggaaacaattccggcgtgtttaattttactccggacaaaagcggtctctgggaactcaggctttccggccgcgatcaaaagcagagaattgccgcgacccgctcccgcttttacgtgagcggcgcgggatgggtgcgctgggattccgatgacgtggattccataaccctgaccaccgaccgccaaagctacgcgcccggtgagacggcgaaaataatggtgcgctcgccgctgaaaaaggcaaatacctgttaa

SEQ ID NO: 26008 - protein, 295 aa, Unknown
  Obtained from environmental sample
  misc_feature (1)..(295): Xaa is any amino acid
MIRIGRGLAGGGLSGAPYTWHLTREPASVVPGGTEGAWRYWNFGPESDGERSYVGEGEGTLGPDGKTGISGETGGEGIEGAAYRYRLETSVQDAARQEISSRASVLVHPASFYIAARLDSGTIKTAATGGGAGAASTSSAFFLSAGQPATLSWALVSPNGDLAQNQSGDLSIQLVRHEWKQARQQGSGGRVNLIWERVEEIAAQRNVKISAGNNSGVFNFTPDKSGLWELRLSGRDQKQRIAATRSRFYVSGAGWVRWDSDDVDSITLTTDRQSYAPGETAKIMVRSPLKKANTC

SEQ ID NO: 26009 - DNA, 780 bp, Unknown
  Obtained from environmental sample
  misc_feature (1)..(780): n is a, c, g, or t
atgaaattatttcttgagttggatacatacagcaatatcatctcgtgtaacagcctggaatccatagaaaaaataaaatcactccttcataacaccaatggatttgatgtgattctgacaaaccctccattcggggcaaagattaaccaacaagctctgttaaggacatttcaactaggatataaatggaagaaaaatcaaaatggatttaccagaaatgataatatcctaaatactcaaacagtagaaactttatttattgaacgatgtattgatcttttaaaggttgggggtaagatggccatcgttttacctaacgggaattttgaaaatccctctcttgagtatatccgatattatattttgaaaaagtgtaaaattatggccgttgttaatcttccacaagagacatttataccatatggaactggagtaaaaacatctttattgttcattgaaaaaaaggaagaagacgacacacaggtatatcccatttttttaggcaaaatcacaaaattggggtatcaaggaaataaaaatggtactccaatgtataaaaaaaattcatacgggcaaattgtaacagactcaaacgggaatcagatcctggatgaaaatatttctgaattgatacagttatacaaaaacttttgcgctggaaaagactttgtcacctcacattcattttcaataaaatcatcacaaataggaagcagattcgattttgattattattctcccgaaacacgaaatttattgcctatacgacaaattctgtaa

SEQ ID NO: 26010 - protein, 259 aa, Unknown
  Obtained from environmental sample
  DOMAIN (1)...(252): N-6 DNA Methylase
  misc_feature (1)..(259): Xaa is any amino acid
MKLFLELDTYSNIISCNSLESIEKIKSLLHNTNGFDVILTNPPFGAKINQQALLRTFQLGYKWKKNQNGFTRNDNILNTQTVETLFIERCIDLLKVGGKMAIVLPNGNFENPSLEYIRYYILKKCKIMAVVNLPQETFIPYGTGVKTSLLFIEKKEEDDTQVYPIFLGKITKLGYQGNKNGTPMYKKNSYGQIVTDSNGNQILDENISELIQLYKNFCAGKDFVTSHSFSIKSSQIGSRFDFDYYSPETRNLLPIRQIL

SEQ ID NO: 26011 - DNA, 309 bp, Unknown
  Obtained from environmental sample
  misc_feature (1)..(309): n is a, c, g, or t
atggtagtaatcgcaattgacgggccgagtggttcggggaaatcttcggttgccaaagaggtggctcggcgattgggttacgcctatttagataccggagctatgtatcgcgctgcgacgctgtgggccgggggtgaagtcgacgatttaacggataaagaggcggtaactgccgcagtgaaagcgatgccgctggtgtcaggcctcgaccccgatgctgccacagtcacactggctggcaatgatgttaccgatgcgattcgcgctgagagtgtttcggagcaggtatccaaggtggccaccaattag

SEQ ID NO: 26012 - protein, 102 aa, Unknown
  Obtained from environmental sample
  misc_feature (1)..(102): Xaa is any amino acid
MVVIAIDGPSGSGKSSVAKEVARRLGYAYLDTGAMYRAATLWAGGEVDDLTDKEAVTAAVKAMPLVSGLDPDAATVTLAGNDVTDAIRAESVSEQVSKVATN

SEQ ID NO: 26013 - DNA, 384 bp, Unknown
  Obtained from environmental sample
  misc_feature (1)..(384): n is a, c, g, or t
ttgaccaacgatggcgaattggcaaaccggctcagccaccccaaataccacgtgcccaaaacttatatcgtaactatgaagggcgaactttttccccgattacaaaaggaattactacaaggcgttgacgtgggggacggattcgctaaagcggaccgattaaaattgctgcaaactaacggcgaatattctctagtggaactccaaattcacgatggccgcaaccgcattgtgcggcgcatgtttgatgccgttggctgcccggtaatcgaattggtacgcacaaaattcggccccatcaaacttggtgaacaaaaactaggccgcatccgcgttctaaattcaacggaagtaggcagcttaatgaaagccgtcgggctataa

SEQ ID NO: 26014 - protein, 127 aa, Unknown
  Obtained from environmental sample
  misc_feature (1)..(127): Xaa is any amino acid
MTNDGELANRLSHPKYHVPKTYIVTMKGELFPRLQKELLQGVDVGDGFAKADRLKLLQTNGEYSLVELQIHDGRNRIVRRMFDAVGCPVIELVRTKFGPIKLGEQKLGRIRVLNSTEVGSLMKAVGL

SEQ ID NO: 26015 - DNA, 591 bp, Unknown
  Obtained from environmental sample
  misc_feature (1)..(591): n is a, c, g, or t
atgtttcgttttttaattttcatattaatcagtgctatatttgcctttgcgggtacagaaaccgaaggcaaaaccgctgcatggataacccttgaaggcgatgttgaccccggcatgaacgactatgcgcgccgtgccatagcagaagcggtcaagagaaagccagatttaatagtttttgaggtaaacacttttggcggtcgcttggatgccgcctttgatattgtggatacaataacagccttgaaaattccaaccattgctctagtgcaaaaaaaagccataagcgcaggggccttaattgccctttccagtgacaagctctatatgctccccagcacaaccattggcgactgcgcccccatagtgcaaagctccgatggtcagcctcaaattgtgggcgaaaaaatccaatccccgctaagggcaaaattccgcaatttggcagagagaaacgggcacccgcgcttgctctcagaagcctttgttagccccgacttgggcgttatggaactctccaacaaagacacaaccatttacataaacgtagccgaatatagcgatatgtcagaagaagagcaaaaaaaatga

SEQ ID NO: 26016 - protein, 196 aa, Unknown
  Obtained from environmental sample
  SIGNAL (1)...(17)
  misc_feature (1)..(196): Xaa is any amino acid
MFRFLIFILISAIFAFAGTETEGKTAAWITLEGDVDPGMNDYARRAIAEAVKRKPDLIVFEVNTFGGRLDAAFDIVDTITALKIPTIALVQKKAISAGALIALSSDKLYMLPSTTIGDCAPIVQSSDGQPQIVGEKIQSPLRAKFRNLAERNGHPRLLSEAFVSPDLGVMELSNKDTTIYINVAEYSDMSEEEQKK

SEQ ID NO: 26017 - DNA, 510 bp, Unknown
  Obtained from environmental sample
  misc_feature (1)..(510): n is a, c, g, or t
ttggtggtttgtcatagcttttgtagtttttgtttggtttataatgatcaaactgataattgtaattattcgttatataaagtctcgtttataatgcaagaactgtttgaacaaatagtaaagggccgcgcttttgaatacgcggttataccgactgccgccattatcttttctccggagttgcttgaagcttgtgcggtaaacgtatgcgggaaatataataaatgctggacctgccctccggctgtggcccccctggaagaacaacaacaaaaaatacggtctttttcctgcgcctttgtctttactaccacatcaaatctggacgattcttttgattatgaagggatgatgcgggcaaaagattaccatgccccgctgaccgctgatatgcaagaaaaattcggtgcggcgaatctcgtcttcggcgcgggaggctgtacgatttgtactacgtgcgcctggcccgaaccctgccgtttcccccaaaagacattcccggcgatataa

SEQ ID NO: 26018 - protein, 169 aa, Unknown
  Obtained from environmental sample
  misc_feature (1)..(169): Xaa is any amino acid
MVVCHSFCSFCLVYNDQTDNCNYSLYKVSFIMQELFEQIVKGRAFEYAVIPTAAIIFSPELLEACAVNVCGKYNKCWTCPPAVAPLEEQQQKIRSFSCAFVFTTTSNLDDSFDYEGMMRAKDYHAPLTADMQEKFGAANLVFGAGGCTICTTCAWPEPCRFPQKTFPAI

SEQ ID NO: 26019 - DNA, 750 bp, Unknown
  Obtained from environmental sample
  misc_feature (1)..(750): n is a, c, g, or t
atgaaaagcatgacctgttacgcctacaaaaaagaatccaaagataatgtaacggtctcggtagagataaaggggtacaacagccgttttctggatctttcggtcaaccttcctttctggctttcttcacttgagccttgggtaagggaatatcttaattcccgtatttccaggggtaaacttgatgtcggaataagggtcagggaagaaggcgctccaatatcagtttcgataaatgaaaacgccgcacttgcatataaaaacatgataagcggtttaagcaaaactttaggtataaaggaagagccaggcctgggattgttattgggccttgaaggagttttggaaatcgaaacagacagggatgttgaaaagtaccgggcttttattgaaactgtccttgccgccgcgacagatcaggcggaagccgagcgcgtgcgggaaggcaggcacacaatggaggatatacttacccatatttacgttttggaagaatcagctaaaagcataagctcctttgtgccggatattgaaaaagcgataaaagaaaacctgcgaacgcgttttgccgagctattgggggacaaaatcgatgagaaccgcattctggcggaaaccgcaattttattgatgaagtatactatttccgaggagctttccaggctttcttcgcatctaaagggattccgtctggaaacggaaagaaatttcagccccggcaagaactggattttctttcacaggaaataa

SEQ ID NO: 26020 - protein, 249 aa, Unknown
  Obtained from environmental sample
  DOMAIN (1)...(155): YicC-like family, N-terminal region
  misc_feature (1)..(249): Xaa is any amino acid
MKSMTCYAYKKESKDNVTVSVEIKGYNSRFLDLSVNLPFWLSSLEPWVREYLNSRISRGKLDVGIRVREEGAPISVSINENAALAYKNMISGLSKTLGIKEEPGLGLLLGLEGVLEIETDRDVEKYRAFIETVLAAATDQAEAERVREGRHTMEDILTHIYVLEESAKSISSFVPDIEKAIKENLRTRFAELLGDKIDENRILAETAILLMKYTISEELSRLSSHLKGFRLETERNFSPGKNWIFFHRK

SEQ ID NO: 26021 - DNA, 552 bp, Unknown
  Obtained from environmental sample
  misc_feature (1)..(552): n is a, c, g, or t
atgtcgagtaagaaagacaaaaaggatttaaagattgcggtttccgggaaaagcggctgcggcaacaccactgtaagccgccttttggctgacactttggaaatcaggtttatcaatttcactttccgaagtcttgcacaggaaaagggtttaagcctgaaagaggtgcttgctttggcggcaaaggacgattcctgggacaaggaagttgatacccggcaggctgaaatggcaagagagcagggcggctgtgtattgggttccagactggcaatatggatgctgcctgaagcggatttaaaggtgtttcttacagcgaaggcggagaccagagcaaagcgtattcagggcagggaaggggaaagtttggcagatatagcggaatttacagccttaagagaccagcaggatcatgagcgctacttgcgtatttacaatataaacaacgatgactatgccttttcggatttagtaattgctactgacgaaataagccccgctgaaattgtcaggctgattatcgcggaacttgataggaagttcgcttcataa

SEQ ID NO: 26022 - protein, 183 aa, Unknown
  Obtained from environmental sample
  DOMAIN (18)...(178): Shikimate kinase
  misc_feature (1)..(183): Xaa is any amino acid
MSSKKDKKDLKIAVSGKSGCGNTTVSRLLADTLEIRFINFTFRSLAQEKGLSLKEVLALAAKDDSWDKEVDTRQAEMAREQGGCVLGSRLAIWMLPEADLKVFLTAKAETRAKRIQGREGESLADIAEFTALRDQQDHERYLRIYNINNDDYAFSDLVIATDEISPAEIVRLIIAELDRKFAS

SEQ ID NO: 26023 - DNA, 783 bp, Unknown
  Obtained from environmental sample
  misc_feature (1)..(783): n is a, c, g, or t
atgacgggcggcattacggtcttaagctcggacgccggaagctcccttaaacaaacttacacggaaacactctatgaaaacagaaccgtaatattaaagggtgtcgattcaaactcgcttattacagtcccgggagaattcgggtcggatacttatatctgggttcaaggtaagaacgggcctacactggaaaaatttgttccccaacggcttataggcgacttatatacccatattccgataaaggacgcaatgtcctcaaaattcggaatgataggcgcgtatgtagtaatacttgtcattgttttctttttggggttcttcgccatcttcgcggaacccgggcttgcggttaccgccgtaaccgtagaggagatgaccaccggtacttttaagcgttctaaattaataaagattgcggctatgggagtaggcgggggcatggtgataggtttcgcgcgggtgctgttcagcaatatgctgccgtcaggcggcatacatctttcgtggattctggctccttgctatctccttgccttgatcctgacaattttcgcgccggaagatttttcgtcgatagcgtgggacgttgcgggtatagcgacaggccccatcacagttccaattattataacttcaggccttggacttggccgcgattcactgcgggcggacggcgctttcggcattgtggcgacggccagcgtatttccgattatcgtaatattaatatcaggcattgttgataaagcgagatcaaagcgcgtgttaagcaggatgtag

SEQ ID NO: 26024 - protein, 260 aa, Unknown
  Obtained from environmental sample
  DOMAIN (62)...(250): Protein of unknown function (DUF1538)
  misc_feature (1)..(260): Xaa is any amino acid
MTGGITVLSSDAGSSLKQTYTETLYENRTVILKGVDSNSLITVPGEFGSDTYIWVQGKNGPTLEKFVPQRLIGDLYTHIPIKDAMSSKFGMIGAYVVILVIVFFLGFFAIFAEPGLAVTAVTVEEMTTGTFKRSKLIKIAAMGVGGGMVIGFARVLFSNMLPSGGIHLSWILAPCYLLALILTIFAPEDFSSIAWDVAGIATGPITVPIIITSGLGLGRDSLRADGAFGIVATASVFPIIVILISGIVDKARSKRVLSRM

SEQ ID NO: 26025 - DNA, 630 bp, Unknown
  Obtained from environmental sample
  misc_feature (1)..(630): n is a, c, g, or t
ttgaacaactggtacatccgccgctcccgccgccgtttttggcgcagcgggaatgacagcgacaaactcgaagcttacggtgctctctacgaagctcttaaaacattaataacagtcgccgctccattcatgccctttaccacggacgctatctggagaaatcttcgtttggaaagcgatcccgaatcggtgcatttaacggactatcccgtacctgacgaaaaacgccgcgacagcgcgcttgaattccgcatggcctgtgttatgtccgccgtttcaatcgggcgctcgctccgctcccagtacaatattaaaatgcgccagccgcttcgcaaggcggaagttgttacgcgcaatgaagatgagaaaaacgccttaatgggcatggcggacataatccgcgaggaactgaacgtaaaagaagctgttttttccgataaagaggaagatttggtagagtatgaggtaaaagccaacttccgtgtattgggaaaagaactcgggaaggacatgaaatccgccgccgccaaaatagaggcgcttaaacacgcccagattcaaagcgtcatagaaggcgcgtccctttcgatagacattccatgtgagggcggcggcacaagggcgctgtaa

SEQ ID NO: 26026 - protein, 209 aa, Unknown
  Obtained from environmental sample
  DOMAIN (1)...(115): Anticodon-binding domain
  misc_feature (1)..(209): Xaa is any amino acid
MNNWYIRRSRRRFWRSGNDSDKLEAYGALYEALKTLITVAAPFMPFTTDAIWRNLRLESDPESVHLTDYPVPDEKRRDSALEFRMACVMSAVSIGRSLRSQYNIKMRQPLRKAEVVTRNEDEKNALMGMADIIREELNVKEAVFSDKEEDLVEYEVKANFRVLGKELGKDMKSAAAKIEALKHAQIQSVIEGASLSIDIPCEGGGTRAL

SEQ ID NO: 26027 - DNA, 498 bp, Unknown
  Obtained from environmental sample
  misc_feature (1)..(498): n is a, c, g, or t
atggccgagaaatcccggagcgcccttgcggtggatcaggaagttgaagttatggttatttccgtggacaccgccaaccgcaacataaaactcggcatgaaacagctttccgaagacccctggaagcaattctgcgaaacttacaaacccggctccccagtggagggcgaagtcgcttcagttacggatttcggcgttttcctgcgcgtacccggcggcatagaggggcttattcacaagtcaaaccttgttgaaaaccgcgaagatgacccggacgaggccctgaaaaagattaaagtcggggacaaattaaaagccattgtactggaagttcagagcgacaagcaaaaagtagctttttcactgcgaggatatcaaaagaaggcgcaaaaggatgaattatcgcgttacatggcggaagaagaagtctccgattccacttatacgctcggctctcttttaaaatccaaaaatcctcaggcaaatgaatccgagtga

SEQ ID NO: 26028 - protein, 165 aa, Unknown
  Obtained from environmental sample
  DOMAIN (47)...(123): S1 RNA binding domain
  misc_feature (1)..(165): Xaa is any amino acid
MAEKSRSALAVDQEVEVMVISVDTANRNIKLGMKQLSEDPWKQFCETYKPGSPVEGEVASVTDFGVFLRVPGGIEGLIHKSNLVENREDDPDEALKKIKVGDKLKAIVLEVQSDKQKVAFSLRGYQKKAQKDELSRYMAEEEVSDSTYTLGSLLKSKNPQANESE

SEQ ID NO: 26029 - DNA, 963 bp, Unknown
  Obtained from environmental sample
  misc_feature (1)..(963): n is a, c, g, or t
atgaatccgagtgaagggtataaacctttaataacaaaaagccccgccattcaggaacaaatcgaaattgttaaaaaggtggcaaaaaccgactcgtcagttctgctcttgggagaaagcggggtagggaaggaaattttcgctgaatttatacaccaaaacagccgccgtaatttcctgccgtttgtcaaagtaaactgcgccgccctgccggaaggacttttggaaagcgaattattcggacacgttaaaggagcgtttacaaacgccgtttccaaccggcaggggcgttttgaaatggcggacacaggcactattcttttagatgagatcggcgatattcccctgccgcttcaggcaaagattctgcgggttattcaggaaaagaaatttgaaaaagtaggctccgatgttaccgataacgccgacgttcgtattctcgcggcgacaaacaaagacattgaagaacttgtgcaaacaggcaagttccgcgccgatttgtactaccgccttaacgtgctgcctatttatattccgccgctgcgccacaggcctgaggatattcctgaactggcgcgacattttcttgacatatacatgaagcaaaacaacaggcaatttgaaggttttacggaagaagccctgcaagccatgctttctcattcgtggccgggaaatgtccgcgagcttcaaaattgcatagaacgcgcctgcgtgatcggtaaaaacaagcttgtcggacatgaagacttgtttataaaactcgcggattttccggatatccgagggaaaattaaggaccgcagccttaaaacggccgttaatgtatttaaggccaattttatccgaaaagtgcttgaagagaacaactggaaccagacggaggccgccagggtacttgccatacagcgcacttatttgtcaaaattgataaaagagctaagaataaacgtaaaggagtag

SEQ ID NO: 26030 - protein, 320 aa, Unknown
  Obtained from environmental sample
  DOMAIN (10)...(231): Sigma-54 interaction domain
  misc_feature (1)..(320): Xaa is any amino acid
MNPSEGYKPLITKSPAIQEQIEIVKKVAKTDSSVLLLGESGVGKEIFAEFIHQNSRRNFLPFVKVNCAALPEGLLESELFGHVKGAFTNAVSNRQGRFEMADTGTILLDEIGDIPLPLQAKILRVIQEKKFEKVGSDVTDNADVRILAATNKDIEELVQTGKFRADLYYRLNVLPIYIPPLRHRPEDIPELARHFLDIYMKQNNRQFEGFTEEALQAMLSHSWPGNVRELQNCIERACVIGKNKLVGHEDLFIKLADFPDIRGKIKDRSLKTAVNVFKANFIRKVLEENNWNQTEAARVLAIQRTYLSKLIKELRINVKE

SEQ ID NO: 26031 - DNA, 423 bp, Unknown
  Obtained from environmental sample
  misc_feature (1)..(423): n is a, c, g, or t
atgtccgacaagcttgtttttaccgatcacgcaggcgcgttctatgcaattttgaagctcgcggacatttcccggccacgaatgagaaagcatggcttgcagggcttcttccgtaaaaccttcaaattgcctgttgttttgcttcatgtatatgtcaagaaaatgtcgcgccagttcaggaatatcctcaggcctgtggcgcagcggcggaatataaataggcagcacgttaaggcggtagtacaaatcggcgcggaacttgcctgtttgcacaagttcttcaatgtctttgtttgtcgccgcgagaatacgaacgtcggcgttatcggtaacatcggagcctactttttcaaatttcttttcctgaataacccgcagaatctttgcctgaagcggcaggggaatatcgccgatctcatctaa

SEQ ID NO: 26032 - protein, 140 aa, Unknown
  Obtained from environmental sample
  misc_feature (1)..(140): Xaa is any amino acid
MSDKLVFTDHAGAFYAILKLADISRPRMRKHGLQGFFRKTFKLPVVLLHVYVKKMSRQFRNILRPVAQRRNINRQHVKAVVQIGAELACLHKFFNVFVCRRENTNVGVIGNIGAYFFKFLFLNNPQNLCLKRQGNIADLI

SEQ ID NO: 26033 - DNA, 780 bp, Unknown
  Obtained from environmental sample
  misc_feature (1)..(780): n is a, c, g, or t
atggcgagaagtgaaagaaaatctgataaatcgctgcttactcccgcatgcaatgataaatgcggtctgtgcggggtatgcggcaaggaaatcaagattgttaaaaattatgataataaacctcaaagtataattgataataacaaaattgccgaagacaatactgaaaatacggattctgatgttaacttaaataatattatggttaacaaaaacaaaatggaccctgatatttacaggttgttgttcagtttcagcaaatccggcagcgctgtttttcacggccatttaagccttattgaattattttccatgacatttacaagggccggcattcccgtgatatatacaaaaggctttaatcctatcccaaagattgaatttgcctctcccttgtctacgggtataagcgcagataacgagatagccgccatagacttttctaagccttattcgtcggaaaggtttataacagaaatgaacttaaaattacctcaaggtttccgtattgaaaattcagtatgttattacattccgtccggcatgaaaaaacactcgttatcgtcgttgttatggggtttcggctacaaaaataaagacacgattgattatgtacgcgcaaaggaagaaaaagcctacaggcaggaacgcgttaaagattgtgaatcgctgttttacctgagacgcaatttagtccttgccaaaaatgttgcagtacacgctgatgaatgggttaaatattttgacgcatataatcatttatacaatatgtctaagtag

SEQ ID NO: 26034 - protein, 259 aa, Unknown
  Obtained from environmental sample
  misc_feature (1)..(259): Xaa is any amino acid
MARSERKSDKSLLTPACNDKCGLCGVCGKEIKIVKNYDNKPQSIIDNNKIAEDNTENTDSDVNLNNIMVNKNKMDPDIYRLLFSFSKSGSAVFHGHLSLIELFSMTFTRAGIPVIYTKGFNPIPKIEFASPLSTGISADNEIAAIDFSKPYSSERFITEMNLKLPQGFRIENSVCYYIPSGMKKHSLSSLLWGFGYKNKDTIDYVRAKEEKAYRQERVKDCESLFYLRRNLVLAKNVAVHADEWVKYFDAYNHLYNMSK

SEQ ID NO: 26035 - DNA, 462 bp, Unknown
  Obtained from environmental sample
  misc_feature (1)..(462): n is a, c, g, or t
ttgtcattttcttacacgcggttaagcggctcggcaagcaaccaatttgccgtgtgggtcgaagacgcgcagggaaagtttataaagacgctctacgccacaaaatatacggcaacaggcggctggaaacgcagggatacttctatccctatatgggttaaaaagtcgaatcttgcgaatttaacaggcgcgcaggtagacgcgataaccggcgcaactccgaaaacagggacgcttgtctacacatgggacggcactgactcaagcggcaaagccgtttctacgggaaattatgtcctgttccttgaaggaactctaaggtgggagaatcaagttctctaccgtgccccaatcagtctcggaaaagaaatcatgtcgtgggaagtaagcgcggaatataaaggcgacgcaacagcggaccgcgccatgatcagcgatgtaaaagagagaacgctgcgctag

SEQ ID NO: 26036 - protein, 153 aa, Unknown
  Obtained from environmental sample
  misc_feature (1)..(153): Xaa is any amino acid
MSFSYTRLSGSASNQFAVWVEDAQGKFIKTLYATKYTATGGWKRRDTSIPIWVKKSNLANLTGAQVDAITGATPKTGTLVYTWDGTDSSGKAVSTGNYVLFLEGTLRWENQVLYRAPISLGKEIMSWEVSAEYKGDATADRAMISDVKERTLR

SEQ ID NO: 26037 - DNA, 459 bp, Unknown
  Obtained from environmental sample
  misc_feature (1)..(459): n is a, c, g, or t
ttggcaaataccgttaaaactacctcacagatctacaattcaattaataaatccaatgtgcaaggttatgttccgccaagcaacaacacgcaacaggggacgcaaaataattcttcgactgccggttcaagttcaagttctagctctagctcaagttctagttcaaaggcaagttccggttctagctcaaattcaagttccagctcaggagcaagctcaagttcatcgtcatcaagtaatacagtaaaaaagtgttcttcctgtggtggtaatggaaaatgcgatagatgtggaggagatggacgcagaggatgccctgggtgtagcggtaaaggttatattgttacaattgctggtaaacctcaatgtaaaaactgtgacggaaaaggaactgtgaaatgcggagtttgtcatggcgacggtaaatgcagtcgttgtagagggaaaggaactttataa

SEQ ID NO: 26038 - protein, 152 aa, Unknown
  Obtained from environmental sample
  misc_feature (1)..(152): Xaa is any amino acid
MANTVKTTSQIYNSINKSNVQGYVPPSNNTQQGTQNNSSTAGSSSSSSSSSSSSSKASSGSSSNSSSSSGASSSSSSSSNTVKKCSSCGGNGKCDRCGGDGRRGCPGCSGKGYIVTIAGKPQCKNCDGKGTVKCGVCHGDGKCSRCRGKGTL

SEQ ID NO: 26039 - DNA, 1041 bp, Unknown
  Obtained from environmental sample
  misc_feature (1)..(1041): n is a, c, g, or t
gtgctggatgagcccaccgcggtgcttaccgagaccgaggccgacatactccttgaaagcctcacgcgcctttcgggggaaggtatcggtatcatttttatttcccaccgccttcatgaagttacaaagatcagtcatcgggttttggtgcttcgggacggtaaattgatccgggatactccgaacaaaggcatatcggttcaggatatcagtacctggatggtgggccgtgaaatttcaagccgccctgttgacagtgccgagcgcctctttgaaggtgaagcctttagggtggaaaatctctgggtggatatgccgggggaaacggtgcgggatatctcgttcacggtaaagaaaggggagatcttcggcatagggggccttgcggggcaggggaaactgggcatccccaacggcatcatgggcctttacgccgcgggcggcaaggcctggatagacggcgaaaatctcgagctgggagaccctaggaagatccttgacgcgggggccgcctttgtttccgaggatcgccggggcgtgggccttttaatggacgaaagccttgagtggaatatcgcctttggggccatgcagataaagggccataatttgaagaaattcttcggcgggcttttcagtctgcgggacgaaaaggccatgcggcatcttgccgaggaatacatcaaaaagctggaaataaaatgtacaggatcaaagcaggcggctaaggagtttcccggcgggaaccagcagaaaatctgtctttccaaggcctttgctctggaaccaaaattactctttgtttccgagcctacgcgcgggatagacgtgggggcaaaaaaaattgtgctggataccctgcgtttctacaaccagagcaagggaacaaccattgtgatgatctccagcgagcttgaagagcttcgctcaatctgcgacagaatcgccattgttgacgaaggaaagatagcggggattttgccgccagactcgccagccgctgaattcggtttattaatgtctggagagaagatagcatga

SEQ ID NO: 26040 - protein, 346 aa, Unknown
  Obtained from environmental sample
  DOMAIN (120)...(321): ABC transporter
  misc_feature (1)..(346): Xaa is any amino acid
MLDEPTAVLTETEADILLESLTRLSGEGIGIIFISHRLHEVTKISHRVLVLRDGKLIRDTPNKGISVQDISTWMVGREISSRPVDSAERLFEGEAFRVENLWVDMPGETVRDISFTVKKGEIFGIGGLAGQGKLGIPNGIMGLYAAGGKAWIDGENLELGDPRKILDAGAAFVSEDRRGVGLLMDESLEWNIAFGAMQIKGHNLKKFFGGLFSLRDEKAMRHLAEEYIKKLEIKCTGSKQAAKEFPGGNQQKICLSKAFALEPKLLFVSEPTRGIDVGAKKIVLDTLRFYNQSKGTTIVMISSELEELRSICDRIAIVDEGKIAGILPPDSPAAEFGLLMSGEKIA

SEQ ID NO: 26041 - DNA, 597 bp, Unknown
  Obtained from environmental sample
  misc_feature (1)..(597): n is a, c, g, or t
atgagcagcgttgcaaacattcaaattcaaggcgatagccttcaagataaaataaaagcgtttgtttctgatttcggctggccccgccttatcattttcttttttgtagtggcgctttttatcgttgctccattcgtaggcatcaatattgacagctcttttaaggatgtgctggtacgtttcgggcaaaacgggatcatggtgctggctctggttcccatgatgcaatccggttcagggctgaacttcggcctgcccgtcggcattgtcgcgggcctattgggctcgaccctggcaatgcagttacagttttctggcgccttgggttttgtaatggcgattttattaagcatacctttcgcctttgtttttggctggctctacggcatactccttaacaaagttaaaggcgaggaaatgactatcgccatgtacgttggattttctattgttacattcatgtcgatcatgtggcttttgctgccttactcgaatcctacaatggtttggggctacactggtcggggcttgcgtacaacaataaccctggacggttactgggcgcgtatcctcaataatttcctggctcggccataa

SEQ ID NO: 26042 - protein, 198 aa, Unknown
  Obtained from environmental sample
  misc_feature (1)..(198): Xaa is any amino acid
MSSVANIQIQGDSLQDKIKAFVSDFGWPRLIIFFFVVALFIVAPFVGINIDSSFKDVLVRFGQNGIMVLALVPMMQSGSGLNFGLPVGIVAGLLGSTLAMQLQFSGALGFVMAILLSIPFAFVFGWLYGILLNKVKGEEMTIAMYVGFSIVTFMSIMWLLLPYSNPTMVWGYTGRGLRTTITLDGYWARILNNFLARP

SEQ ID NO: 26043 - DNA, 1107 bp, Unknown
  Obtained from environmental sample
  misc_feature (1)..(1107): n is a, c, g, or t
gtgctgatctttgtggtcataaccctgaccgcgattccgatatcaggaattcccatcccggagatagtccaggagatcctctcccgcatagggcggaactgctttttggtattcagccttctgctcccgatcatggcgggaatggggatcaactttggcatggtcctgggcgccatggcaggacaaatcgggcttatcttcgcggtggactggaacattgtaggcgtgccgggcctgatcttcgcgagcctgatcgcggtgcccatcgcggcgtgtcttggctggcttgcggggcagatcctgaaccgcgcccggggcagggaaatggttaccgggtatgtccttggttttttcatggacggcttttaccagtttatcgtactttatctgatgggacggcctgcaatatgggccggggaaaccgcgggtaaatgggctgccctcattcccattcattcccccagaatcgtgttaagccggggttacggtatacgcaacaccctcaatttggactcggtgcgccagtcattggaccgctttattcccttgagaattgggggagtgaatattccccttaccaattacctggtaatcggtcttttgtgcctctttatcatctggttcagaaaaaccaaactgggccaggacatgcgggcagtggggcagaatcagaccgtagcccacgcgtcgggtattcccgtggatcggacgaggatcctggcaatagtgatttccactgttcttgcaagccttggccagattatttttttacaaaataggggaaatatggcaacttacaatgcccacaggcagacaggtttcttcgcggccgcggcgattttggtcggcggcgcttccatttcaaaggccagcattaccaatgtatttatcggaaccatattactgcatttaatgtacatagttgttccgcgcgccggaaccaacctcttcggttccgcccagattggcgagtatttccgggacgcctttagttacgcgatcatcgcccttgccctggtgatccacgcctggcgtaaacgcgccaatgccgaagccgcccgcagcggccttcgcggcgccgctgtaacgctgtccaaagaggaataa

SEQ ID NO: 26044 - protein, 368 aa, Unknown
  Obtained from environmental sample
  DOMAIN (22)...(339): Branched-chain amino acid transport system / permease component
  misc_feature (1)..(368): Xaa is any amino acid
MLIFVVITLTAIPISGIPIPEIVQEILSRIGRNCFLVFSLLLPIMAGMGINFGMVLGAMAGQIGLIFAVDWNIVGVPGLIFASLIAVPIAACLGWLAGQILNRARGREMVTGYVLGFFMDGFYQFIVLYLMGRPAIWAGETAGKWAALIPIHSPRIVLSRGYGIRNTLNLDSVRQSLDRFIPLRIGGVNIPLTNYLVIGLLCLFIIWFRKTKLGQDMRAVGQNQTVAHASGIPVDRTRILAIVISTVLASLGQIIFLQNRGNMATYNAHRQTGFFAAAAILVGGASISKASITNVFIGTILLHLMYIVVPRAGTNLFGSAQIGEYFRDAFSYAIIALALVIHAWRKRANAEAARSGLRGAAVTLSKEE

SEQ ID NO: 26045 - DNA, 615 bp, Unknown
  Obtained from environmental sample
  misc_feature (1)..(615): n is a, c, g, or t
gtgggatgcgagccggggataacttttctggatcgacgcgcctgggtcttcggcgaatttgtggatgagggcaaaattgaggaggccgcgctggtaaagctggacggcatagagaacccccacggcgcggcatgggaagcgttagccgcaatcctgccccgttttccgccggggacgattgacggcctctgggttccctgggatgaatttgccgatggctgtgccgaggcgcttgcggcggcgggaaggcgggacattaagctgaccagcatcggcatttctgataatgacatacaccgaatgctgcgccatcctgatatttggctcgcgagcgcggcggttgatccaaagctggcgggtacggttaatatgcgcctcctcgcggcccggcttgcgggggaatcacccgcggatactttttcctttagcccccagcttgtaaaaacaacggatttaaatataggggtgaatctcggcaatatctccgtgatagtgcccggatggggggaaggggaagggctttttgacaattacaagtggatgatcgatctgaaagccgcgggggagaaatacctgagaatccctccggtctcgctttcccaggtgacaccatga

SEQ ID NO: 26046 - protein, 204 aa, Unknown
  Obtained from environmental sample
  misc_feature (1)..(204): Xaa is any amino acid
MGCEPGITFLDRRAWVFGEFVDEGKIEEAALVKLDGIENPHGAAWEALAAILPRFPPGTIDGLWVPWDEFADGCAEALAAAGRRDIKLTSIGISDNDIHRMLRHPDIWLASAAVDPKLAGTVNMRLLAARLAGESPADTFSFSPQLVKTTDLNIGVNLGNISVIVPGWGEGEGLFDNYKWMIDLKAAGEKYLRIPPVSLSQVTP

SEQ ID NO: 26047 - DNA, 432 bp, Unknown
  Obtained from environmental sample
  misc_feature (1)..(432): n is a, c, g, or t
atgatgctcaggtatgacattcattctgctgaaggttccatgtacaatactccgccgtgttatggcatttacattattatgcttgttctggaatggctgaaaaatcttggcggcgttgaagcaataggaaaattgaaccgtgaaaaagccaaactcttctatgattaccttgacgcgtcagatttattttattctcccgtacaaaaagagtaccgcagtttaatgaatatcccgtttataacgactgaacagaatgaggctaagaagaccgagcttgaaacccgctttgtaaaagaagcggcggttgcaggacttatcaacctcgccggtcacaggcttgtcggcggcatgagggcgagtatttataacgccatgccgattgagggcgtaaaagcgttgataaacttcatggaaaaatttgaaaaaaaataa

SEQ ID NO: 26048 - protein, 143 aa, Unknown
  Obtained from environmental sample
  misc_feature (1)..(143): Xaa is any amino acid
MMLRYDIHSAEGSMYNTPPCYGIYIIMLVLEWLKNLGGVEAIGKLNREKAKLFYDYLDASDLFYSPVQKEYRSLMNIPFITTEQNEAKKTELETRFVKEAAVAGLINLAGHRLVGGMRASIYNAMPIEGVKALINFMEKFEKK

SEQ ID NO: 26049 - DNA, 780 bp, Unknown
  Obtained from environmental sample
  misc_feature (1)..(780): n is a, c, g, or t
atgaaggccggaaaatcgactttcctcaacgcttttattttcaaagacaaaatactgccggccgcctccacgccaatgacggcctccctctcggtcataacctacggcgagaaggaggaggttgcggcggagttttacacaaaatcggagtgggaggagatgacgtccaaggcgagccttggaaaaaagaaggcggatgccggcgaggagcctgattcggaaataagggctgccatggaactatttgagaattccaaaaaattgggcggcgaaatcgacgggctgcttggcggcaagaaatccgcaaatttaaacgaattggaggagtatgtgggcgctgacggcaaatatacgcctataacaaagagcgttaccgtcaaaaaggcggatccgcgcctaaaagggatacagatcgtggatactccgggcttcaacgatccggtcgtttccagagaagaaagaaccaaagaatttctgttgaaagcggatgtcgtcatcctcttgctctacgccggacaggcctttacggaagaagaccggaatatagcctttaaccacctaaaatacgccggagttggcaaagttatcttcgctgtgaataaatatgacatcggcgtggaagagggcgacatggaagacgcaataaaaaagcacgtcagagacgccatctctcaagaaataggtaagaataagaacgacgtcatactgaaaaaaatgttcgaaaacccgaatccggtcttgctttcggcgcaaatggcgctatttatcacttgggaatga

SEQ ID NO: 26050 - protein, 259 aa, Unknown
  Obtained from environmental sample
  DOMAIN (3)...(203): GTPase of unknown function
  misc_feature (1)..(259): Xaa is any amino acid
MKAGKSTFLNAFIFKDKILPAASTPMTASLSVITYGEKEEVAAEFYTKSEWEEMTSKASLGKKKADAGEEPDSEIRAAMELFENSKKLGGEIDGLLGGKKSANLNELEEYVGADGKYTPITKSVTVKKADPRLKGIQIVDTPGFNDPVVSREERTKEFLLKADVVILLLYAGQAFTEEDRNIAFNHLKYAGVGKVIFAVNKYDIGVEEGDMEDAIKKHVRDAISQEIGKNKNDVILKKMFENPNPVLLSAQMALFITWE

SEQ ID NO: 26051 - DNA, 777 bp, Unknown
  Obtained from environmental sample
  misc_feature (1)..(777): n is a, c, g, or t
atgcgcctaaagtccgttataacgatttgcggtatgctgacactcgccatcggcacctacaactgcggcggtggcggtggcggcggctcgctcaaagaggtcaccgaggagacccatcccaacggcgccaaaaagaaggtgagctactacgggagcggcaacagcctagcccgcacaacattcttcttcccggacggcacgacgcaatccgatcagttcttcaagaacggccagcccgacagcactaagatcatctacaaccaagacgggaagcccaacaagctctccaccttctcaaacggcaagccgaacgggcctgagaagtcgtggtaccctaacggcaacatcaagagcgaggccgagtatgccgacggcgtgccggtcgggagctcaaagatctactttgaggacggcgcggtggagttggaggtcaactacagggaaggcaagaaggacggcgaggagatcacgtactatgcggacggcaagaagaagcgcgtgaggacgtacgtgttgggcgaccaagatgggccgcagattgattattacgagaccggcgcgatcaagggcgagcaggtgttcgccaaaaacgcgctgaacggcccgttcaagacgtaccacaaggatccgaagggcgcccaaggaaaggtggaggagagcggcacctacgtcaacggtaagtatgaaggtgagaggttccagttcgacaagaacggaaagaagatatcgagggcggtgtacaaggacggggtcatggacttcggcgagcggttttaa

SEQ ID NO: 26052 - protein, 258 aa, Unknown
  Obtained from environmental sample
  SIGNAL (1)...(16)
  DOMAIN (103)...(124): MORN repeat variant
  misc_feature (1)..(258): Xaa is any amino acid
MRLKSVITICGMLTLAIGTYNCGGGGGGGSLKEVTEETHPNGAKKKVSYYGSGNSLARTTFFFPDGTTQSDQFFKNGQPDSTKIIYNQDGKPNKLSTFSNGKPNGPEKSWYPNGNIKSEAEYADGVPVGSSKIYFEDGAVELEVNYREGKKDGEEITYYADGKKKRVRTYVLGDQDGPQIDYYETGAIKGEQVFAKNALNGPFKTYHKDPKGAQGKVEESGTYVNGKYEGERFQFDKNGKKISRAVYKDGVMDFGERF

SEQ ID NO: 26053 - DNA, 1242 bp, Unknown
  Obtained from environmental sample
  misc_feature (1)..(1242): n is a, c, g, or t
atgtgcacgcataccgccgacatcggcaaccgcagcgtgcgcgtctacaacggcaactacgacaagtacatagccgcaaaagcggaggaagccgccgccgcggagacgcgcaccaagaaccttgaatcgaagatcgcgagcgccgagcgcttcgtcgaacgcttcagggccaaagcgaccaaggccgcgcaagcgcaatccaaggccaagatggtggagagtttgaaggcggaactgccgataatagagtcggaggcgaaaacggtcagcttcaagtttacctgctcgcgggaatcaggcgtcgcgccgctacagctaagacgctgctccgccggatacggggataaggtcgtactcaataatatagacttggagatacaccgaggcgacaaagccgccatcgtcggaccgaacggggcgggtaaatcaacgttgttaaaattattggccggaatgattaccccaattgacggagagatgatactagggcacaacgcggaactgcgctacttcgggcaacatcaattagaacaactcgacggcgaggctactctgtatgacactgtggcggcgcactcggcaagcagcgacaaaaactatataagaaacgctcttggcgcgttcttgttcagcggatcggcagttgacaaacaggtaaaagcattgtcaggcggagaaaagtcacgtctggcgttagccgcaatattggcgagcccgggcaatgtattattattggacgaaccgacgaaccacctagacatagcgtcgatagagatgctgtcggaatctatggcctcttacgccgggacgatactgttcgtttcccacgacgaatacttcatatcgcgcttagccaccagaataatagaagtaaggcctatgcgtttaagagatttcccgggaaatttagccgattatagatactatgtggacaaattatttaaggaacaagacgacgacgcggcaagcaaaaagagcaaatcagcgccgtcaaacatcgttgacgaaaaggaaatcaggatcaaggagcgggaagagaagaaaaagcgagaccgcgagacatcaaaattagaacaggagatagcgaaaaaagaggcgcagatagcggaacaagaattgatactgaacaatccggataacgcgttgaattacgaattgctgcattcaacatctgtggcgataggcggattaaagaaggaattggacgggttgatggagagatgggtggaagcgagttcttga

SEQ ID NO: 26054 - protein, 413 aa, Unknown
  Obtained from environmental sample
  DOMAIN (129)...(294): ABC transporter
  misc_feature (1)..(413): Xaa is any amino acid
MCTHTADIGNRSVRVYNGNYDKYIAAKAEEAAAAETRTKNLESKIASAERFVERFRAKATKAAQAQSKAKMVESLKAELPIIESEAKTVSFKFTCSRESGVAPLQLRRCSAGYGDKVVLNNIDLEIHRGDKAAIVGPNGAGKSTLLKLLAGMITPIDGEMILGHNAELRYFGQHQLEQLDGEATLYDTVAAHSASSDKNYIRNALGAFLFSGSAVDKQVKALSGGEKSRLALAAILASPGNVLLLDEPTNHLDIASIEMLSESMASYAGTILFVSHDEYFISRLATRIIEVRPMRLRDFPGNLADYRYYVDKLFKEQDDDAASKKSKSAPSNIVDEKEIRIKEREEKKKRDRETSKLEQEIAKKEAQIAEQELILNNPDNALNYELLHSTSVAIGGLKKELDGLMERWVEASS

SEQ ID NO: 26055 - DNA, 876 bp, Unknown
  Obtained from environmental sample
  misc_feature (1)..(876): n is a, c, g, or t
ttggccgaggttttacgaagttacccccgtcgccaaagggaggccgtcgcgaacccgcgccccattgacgaggcccttgtcgaatcgcagaaggcgcgcagggtgctggacaggctggtcggctacagcctctcgccgctgttatggaaaaaagtgaagaacggcctttccgcgggcagggtgcagtccgtcgccctccgcctcatctgcgaacgggaaaaggaagtggaatcttttatccccgaggaatactggagcctggaagcggatttcaagatcggcaggtcaacctttaccgcgcagcttgtaaaatggaacggcgccaaaccggaactgtccaatgaagctgcggcaaaaacaattattgacgtgcttaccggagccgattgcgcggtgagcgacattaaggaagttgacaagacaatcaaacccaagccccctttcatcacttcggaattgcagaagtccgcggcaaaccggctgggttatacgtcacgaaaaaccatgcaggtggcccagcagctttacgaaggggtgaatatgggctctacccgcatcgggcttatcagctacatgaggacggattcggtgcgcgtgtcggataccgcgcttgcggaactgcgggaatggcttggcaaaaactaccccaaagagcttcccgaaaaaccgctggagtatacttccgggaaaaaagcccaggacgcgcacgaggcgatacgcccgacctatgtcagctatacgccggattcggtcgccgaatacctgaacagggatcagctcaggctgtacacgataatctgggacgttttgtttcagccagatgaccagcgccaagacccgcaccgtgagcgtcgagataaaggccgtttcgggtaa

SEQ ID NO: 26056 - protein, 291 aa, Unknown
  Obtained from environmental sample
  DOMAIN (19)...(289): DNA topoisomerase
  misc_feature (1)..(291): Xaa is any amino acid
MAEVLRSYPRRQREAVANPRPIDEALVESQKARRVLDRLVGYSLSPLLWKKVKNGLSAGRVQSVALRLICEREKEVESFIPEEYWSLEADFKIGRSTFTAQLVKWNGAKPELSNEAAAKTIIDVLTGADCAVSDIKEVDKTIKPKPPFITSELQKSAANRLGYTSRKTMQVAQQLYEGVNMGSTRIGLISYMRTDSVRVSDTALAELREWLGKNYPKELPEKPLEYTSGKKAQDAHEAIRPTYVSYTPDSVAEYLNRDQLRLYTIIWDVLFQPDDQRQDPHRERRDKGRFG

SEQ ID NO: 26057 - DNA, 810 bp, Unknown
  Obtained from environmental sample
  misc_feature (1)..(810): n is a, c, g, or t
atgaccagcgccaagacccgcaccgtgagcgtcgagataaaggccgtttcgggtaaagccgcctccggcggtagcgatgaagggctgttcagggtttccgggacaaaacttgttgaaaaaggtttttacaaagtcatcaaactcctctcgtcaaaagaagagaaggggaatccctatcctccgcttaaagccggggacaaagtcgcaattgacaaattccatcccgaacagcatttcacgcagggcccgccccgttataccgaggcttccatcatcgacatgctgcgcgagaaggaaatcggcagaccctcgacttacgcgccgattatttccgtgctgctggaccgttattatgttacgcgatcaaacaaacagcttgtccccaccctgctggggaaaaaaatatacgaaatgctggttgaatattttcccggttacgtcgatgttgattttacggcttctatggaaacaaagctggacaaggtagaggaaagccagttgaaatggcccgacatgctaaaggaattctgggggcctttcaaagccaaggttgacgaggtgggcaaatccctggagtctttcaagggttctctggatgagccgaccgattatttatgcgaaaaatgcggcaagcccatcgtgaaaaaactgggacgcaatggatttttcctggcctgcaccggctttccggaatgccgcaacacaaggtcggtacctcttgccgtgtgcccgaaatgcggcggcgacgtcgtcgcgcggaaaacaaagggcaggggaaaagaattttacggctgcgccaactacccctga

SEQ ID NO: 26058 - protein, 269 aa, Unknown
  Obtained from environmental sample
  DOMAIN (203)...(241): Topoisomerase DNA binding C4 zinc finger
  misc_feature (1)..(269): Xaa is any amino acid
MTSAKTRTVSVEIKAVSGKAASGGSDEGLFRVSGTKLVEKGFYKVIKLLSSKEEKGNPYPPLKAGDKVAIDKFHPEQHFTQGPPRYTEASIIDMLREKEIGRPSTYAPIISVLLDRYYVTRSNKQLVPTLLGKKIYEMLVEYFPGYVDVDFTASMETKLDKVEESQLKWPDMLKEFWGPFKAKVDEVGKSLESFKGSLDEPTDYLCEKCGKPIVKKLGRNGFFLACTGFPECRNTRSVPLAVCPKCGGDVVARKTKGRGKEFYGCANYP

SEQ ID NO: 26059 - DNA, 1002 bp, Unknown
  Obtained from environmental sample
  misc_feature (1)..(1002): n is a, c, g, or t
atgccaaaaccagcgcaatatcgttcaggttctcttatatactttaaaggcgatcctgcggataaaatttatattctgcaatccggtaaagtaagtctggtttatcaggacattgaaacaggtgttgacgtaaaagacgcagtacagcccggcgaattcttcggagtaaaatcggcgttagggcgctatactcgtgaagaaaacgccatcgctctttcagataccaatgtaatgatattcacagttcccgaatttgaagctgtcgctatggctaactccagaatcatattaaaaatgttaaaagttttttccaaccaaatgaggcgtgttcataaacaagtatccaaagttatggcaaaagaagaacagccgcccgctgatggtctttttaatattggcgaattttatttaaagaataaacgtttttctcacgcaaaacatattttcagccgttatctgacattctatccttcggggaaaaacgctattcaggcgacaaaaaatcttgaaatagctgaaaacgctcttgcccgttacggagacggcaaaggaccgggcgtttctgtcagcgctgctgcccctgcagccgctcctgccgcggctcccgcgtcgcagaaagacatagataaagcaagcaaggcgtattatgacgctatcggtcttgtttcgcaggggaaatatcaagaagcgtttatgacttttaaagtaattgtagacagtaaagtcgatcaggaatggacggcaaaagcgtcttttgaaatcgggcgctgtttattccttatgaacaaatacgaagacagtattaaattttatacaaatatgctgactcagttcccgaaacatcccgaattaatcgaaaccatgtttatcatgggtcagtgtaacgaaaaggtcggcagaaaagatcaggcggtggcgttctacaaaaaaattatttcaatgggcggagacgagtccactatcgaaaaagtaaagcgggcgttaagcgccttaggagcgtaa

SEQ ID NO: 26060 - protein, 333 aa, Unknown
  Obtained from environmental sample
  DOMAIN (248)...(281): Tetratricopeptide repeat
  misc_feature (1)..(333): Xaa is any amino acid
MPKPAQYRSGSLIYFKGDPADKIYILQSGKVSLVYQDIETGVDVKDAVQPGEFFGVKSALGRYTREENAIALSDTNVMIFTVPEFEAVAMANSRIILKMLKVFSNQMRRVHKQVSKVMAKEEQPPADGLFNIGEFYLKNKRFSHAKHIFSRYLTFYPSGKNAIQATKNLEIAENALARYGDGKGPGVSVSAAAPAAAPAAAPASQKDIDKASKAYYDAIGLVSQGKYQEAFMTFKVIVDSKVDQEWTAKASFEIGRCLFLMNKYEDSIKFYTNMLTQFPKHPELIETMFIMGQCNEKVGRKDQAVAFYKKIISMGGDESTIEKVKRALSALGA

SEQ ID NO: 26061 - DNA, 510 bp, Unknown
  Obtained from environmental sample
  misc_feature (1)..(510): n is a, c, g, or t
ttgggtcctgaattatcgtgggctatttataaaaacggaactatcggcaaggcaaaagaagaccttgaacgagcgtgccgtgaaataaataaaaaattcaaagagaataaaaaaattgcgggcgcatgggtctccgtaaataaagctcttgttacacgcgcaagcgcggtaataccgattatccctttctatatttcatgtctttttaaagttatgaaagatatgggtcttcacgaaggctgtatagagcaaattacccgtctttaccgggatttcctttattcctctgccgccgtcaaaaacgctgacgcagttcccgtagacagcgagaagcgcattcgtattgatgactgggagatgcgcgatgatgtgcaaaaagcggttatcaaaagaatggatatggtaacgcctgaaaatgtgtttacagaaaccgatataaacgggtttaagcacgatttcctggaagctcatgggtttgatattaaaggcgttgattacgatgctgattaa

SEQ ID NO: 26062 - protein, 169 aa, Unknown
  Obtained from environmental sample
  DOMAIN (1)...(169): Short-chain alcohol dehydrogenase
  misc_feature (1)..(169): Xaa is any amino acid
MGPELSWAIYKNGTIGKAKEDLERACREINKKFKENKKIAGAWVSVNKALVTRASAVIPIIPFYISCLFKVMKDMGLHEGCIEQITRLYRDFLYSSAAVKNADAVPVDSEKRIRIDDWEMRDDVQKAVIKRMDMVTPENVFTETDINGFKHDFLEAHGFDIKGVDYDAD

SEQ ID NO: 26063 - DNA, 546 bp, Unknown
  Obtained from environmental sample
  misc_feature (1)..(546): n is a, c, g, or t
atggacaataaaaaactccttgtattttctgattcacatggtaatgtcaggaatcttaatgccctcttaaactgggcaaaagatcacattccgccaaatgacactatccatgccgcggcgttccttggtgatggtatttcagacttggagtattcggcggatgagtcaggtttttataccgattggaaacttgttatgggaaataacgattttggaatttttatgccggaaactttaacctttgactttgctgaacatcatttttttatgtgccacggacatcgttacagtttatacagcggatttaatatgctggtagcggcggcaagaaacgcaggagcggatatagcattatgcggtcacagccacattccatacaataaagtgatgaccggtgttagagttgttaatccgggaagcgtaggaaggccgcgaagcagggtaggcgcaacattcactgttattgaatgttcgtctgataattcgataaatataaatttttatggaataagctcgcacgggaatattaaggaaataaatatttaa

SEQ ID NO: 26064 - protein, 181 aa, Unknown
  Obtained from environmental sample
  DOMAIN (4)...(125): Calcineurin-like phosphoesterase
  misc_feature (1)..(181): Xaa is any amino acid
MDNKKLLVFSDSHGNVRNLNALLNWAKDHIPPNDTIHAAAFLGDGISDLEYSADESGFYTDWKLVMGNNDFGIFMPETLTFDFAEHHFFMCHGHRYSLYSGFNMLVAAARNAGADIALCGHSHIPYNKVMTGVRVVNPGSVGRPRSRVGATFTVIECSSDNSININFYGISSHGNIKEINI

SEQ ID NO: 26065 - DNA, 537 bp, Unknown
  Obtained from environmental sample
  misc_feature (1)..(537): n is a, c, g, or t
atggtcagattggccgagactgncggggacattgagcggacattggatattctgcagccttccgaaatgtttggtgaaatggcaatcttggaaaactccccacgttccgcgaccgccattgcgattgatgaagtaaaagtactggaatttaattcgcaaaattttgagatcctgcttcttggaaatccgcagattgccttgaaacttttaaaaatgttctgcaaacgcatatacgattccaaacgccgctttatgatccttactctgcctgagccgcaagtaaaaatagcggacgtatttcttatgttagatgaaactcagcctgatattgataaaaccagcgaacgtcgtgagtttaaaaccacagttgaaggagtggcccactgggcgggaatgagcgtcaacgaagcgagagatatacttggacattttgtaaaccagcgacgcgtagaaattttcccggatcgtataacagttaaaaacatcaacgacttttcccgctttgtcagttccagacgcaactcacgtggcgcctaa

SEQ ID NO: 26066 - protein, 178 aa, Unknown
  Obtained from environmental sample
  misc_feature (1)..(178): Xaa is any amino acid
MVRLAETXGDIERTLDILQPSEMFGEMAILENSPRSATAIAIDEVKVLEFNSQNFEILLLGNPQIALKLLKMFCKRIYDSKRRFMILTLPEPQVKIADVFLMLDETQPDIDKTSERREFKTTVEGVAHWAGMSVNEARDILGHFVNQRRVEIFPDRITVKNINDFSRFVSSRRNSRGA

SEQ ID NO: 26067 - DNA, 354 bp, Unknown
  Obtained from environmental sample
  misc_feature (1)..(354): n is a, c, g, or t
atgctagacataaaaaaaattcgtgagaatcctgagttttaccgcgtggaaactcaaaaaaagaattctgcaataagcatagacgaagttctgggacttgatgcaaaaaggcgggagttaattgccgaaacagaaaaattaaaggcagagcgaaacaccgcttcaaaaaaaattggcgaacttaaaaaagccgggcaaaacgcagactcagccgtagaagaaatgcgaatagtgggtgataaaattgccgaacttgatacaaaaatccgctcaatagacgaagaacaaaccgatagacttttgcgcattccaaacatcgcccacagctccgtctcgtgccgatctgatcattga

SEQ ID NO: 26068 - protein, 117 aa, Unknown
  Obtained from environmental sample
  DOMAIN (1)...(107): Seryl-tRNA synthetase N-terminal domain
  misc_feature (1)..(117): Xaa is any amino acid
MLDIKKIRENPEFYRVETQKKNSAISIDEVLGLDAKRRELIAETEKLKAERNTASKKIGELKKAGQNADSAVEEMRIVGDKIAELDTKIRSIDEEQTDRLLRIPNIAHSSVSCRSDH

SEQ ID NO: 26069 - DNA, 1149 bp, Unknown
  Obtained from environmental sample
  misc_feature (1)..(1149): n is a, c, g, or t
gtgacaaacagcggctacagcgtaacattcactcccacagacacagaaaactacaactggacaggcgtaacgctcacaaaaacaacaagcatcacggtgaacaaagccagcggcttagccaacaccgttccagttgaaatccagatttcaacgtcaaacaccgaaacacacacctacaacctccacgcgttggcattcaacaaaagcgaccacggcacattgagctacgcgctgggaacactcacagatgccagcagcattttggcctccgtgcccacgcttgccgatggaatcctatcctacaaaggtgcaggcaaaacaagcggcactgcaacgcagaacataaccatcacaagccagaactatgccgacataaccgctgccatcatctttgaggcaacccccaaagctgaagttgcaatcgttggcttgacagcgcanaattacgtctatgacggcacgcctaaactcggagtcactggcacagcaaccagcggggcatacacaggcgcgttggtctatgaatacgcangcacaggcatagacggcataaccaccacgcagccaacaaacgcangcgaatacattctcagggtatccgtcccggacgccgatgccctctacatcgggaagggagagatacgaattcaccatcgccaaagccaccgccttggccccaacaggctaaccgccacggaaggtcaaacactggcaagcgttacgctccccgcaggctgggcatgggcagatgccacaacacccgtaggcacagtcggcacacaaacccacaaggcaaactacaccccaagcgatgaggtaaattacaacacattaacagacgttgaattgagcatagaggtaaaagcaggcgaaaccgaccccgacacagaccctgacaccgacaccgacccaatcttctccaatcgggaaaatcccagaatcgggcgaatcggagtccagacaacagccaacgcaatactgctctccaacctaccgagcaacgcaaaggtagaagtctataacctccaaggcaaacgcatatattcagcacatcctgctaatcctcaaatcctgaccatcggggttcagacaaagggaatatatgtgataaaagcaggcaatcaaaccctgcgtgttgcggttaaataa

SEQ ID NO: 26070 - protein, 382 aa, Unknown
  Obtained from environmental sample
  misc_feature (1)..(382): Xaa is any amino acid
MTNSGYSVTFTPTDTENYNWTGVTLTKTTSITVNKASGLANTVPVEIQISTSNTETHTYNLHALAFNKSDHGTLSYALGTLTDASSILASVPTLADGILSYKGAGKTSGTATQNITITSQNYADITAAIIFEATPKAEVAIVGLTAXNYVYDGTPKLGVTGTATSGAYTGALVYEYAXTGIDGITTTQPTNAXEYILRVSVPDADALYIGKGEIRIHHRQSHRLGPNRLTATEGQTLASVTLPAGWAWADATTPVGTVGTQTHKANYTPSDEVNYNTLTDVELSIEVKAGETDPDTDPDTDTDPIFSNRENPRIGRIGVQTTANAILLSNLPSNAKVEVYNLQGKRIYSAHPANPQILTIGVQTKGIYVIKAGNQTLRVAVK

SEQ ID NO: 26071 - DNA, 771 bp, Unknown
  Obtained from environmental sample
  misc_feature (1)..(771): n is a, c, g, or t
atggcaggtacattagacaccatttttacctctctcaaacaagcgcagacgaagttggcggcgcagaaccgcgcaaacaaagacaaagctcttgccgccgccgccgccgcaatcgaccgtgacagagccgccattctggaagcaaacgctcgtgatgtggaacaggcgagaaagggcggcatgaaagaaagccttgttgaccgcctgcttcttaacgataagcggatagacggtattatagaaggaatcgaaattgtcatcaggcaggaagaccctatcggtaaagtgcaggcgggctggactctgcccaatggtctgcagattgataaagtaaccgtacccctcggcgtcgccgccattatttacgaatcacgtcccaatgttacggcagactgcgccgcccttgcgtacaaagcaggctgttcaatactattacgaggctcctcttccgcactggaatccaacaaagcgctggttaaagccatcaaggcggggcttgaaagcggcggcggaattgcggacgctgtcgctcttgcggaatcaggcagcagggacgaagttgacgaaatactcaaagcccgcggttatatcgacgtagttcttccgcgcggagggcatgagttaatccgcagagttgtagaaaacgctcgtatccctgtgattgaaacaggagaaggcaactgccacatctacgttgagccgagcgcggacatgaacaatgcaatagaaattatcgccaacgcaaaattgcaaaaacnccggcgtgtgtaa

SEQ ID NO: 26072 - protein, 256 aa, Unknown
  Obtained from environmental sample
  misc_feature (1)..(256): Xaa is any amino acid
MAGTLDTIFTSLKQAQTKLAAQNRANKDKALAAAAAAIDRDRAAILEANARDVEQARKGGMKESLVDRLLLNDKRIDGIIEGIEIVIRQEDPIGKVQAGWTLPNGLQIDKVTVPLGVAAIIYESRPNVTADCAALAYKAGCSILLRGSSSALESNKALVKAIKAGLESGGGIADAVALAESGSRDEVDEILKARGYIDVVLPRGGHELIRRVVENARIPVIETGEGNCHIYVEPSADMNNAIEIIANAKLQKXRRV

SEQ ID NO: 26073 - DNA, 759 bp, Unknown
  Obtained from environmental sample
  misc_feature (1)..(759): n is a, c, g, or t
atgtacctgccatatcaattatttattaaccatatcatagttgctatttttagaaaagtccgctgtttaataaaagtacttaaattatggagactttattccctttgtgttagtatagttatggacagaaaggtattaataatgagaaacaagaaaatacttatatcgataacttttcttttattttctctgctgccgatttatgcgcagtatgacagcgagaacgattttgaaaccaaattttcggaagacggaaaatccgtgtggattattaaatatctggggaagaatcaagatgtcaatatccccccgaaaataaaaagattacctgtcagcagaatagatagcaatgcttttgaaaaactttattatgtcaagaacgtaacaatatcggacagcgttaccagtattggacattatgctttcaatggttgttatttaacaagtgtaaaaataccggatagtgttaccagtattgggcattcggcttttcataactggacacttactgaaataaatgttgattcccgtaatactgcgtattcatcagaggatggagtattatataataaaaacaaaactaaattgattaaatatccgacaggaaaagatataacttcttttagtatactggacagtgttatcagtatagaggatagtgctttttacaaaagttataatcttgtccatgtagacataccgaacagcgttaccgaaattggagattgggcttttttcggttcagggcttaaagcttaa

SEQ ID NO: 26074 - protein, 252 aa, Unknown
  Obtained from environmental sample
  misc_feature (1)..(252): Xaa is any amino acid
MYLPYQLFINHIIVAIFRKVRCLIKVLKLWRLYSLCVSIVMDRKVLIMRNKKILISITFLLFSLLPIYAQYDSENDFETKFSEDGKSVWIIKYLGKNQDVNIPPKIKRLPVSRIDSNAFEKLYYVKNVTISDSVTSIGHYAFNGCYLTSVKIPDSVTSIGHSAFHNWTLTEINVDSRNTAYSSEDGVLYNKNKTKLIKYPTGKDITSFSILDSVISIEDSAFYKSYNLVHVDIPNSVTEIGDWAFFGSGLKA

SEQ ID NO: 26075 - DNA, 552 bp, Unknown
  Obtained from environmental sample
  misc_feature (1)..(552): n is a, c, g, or t
atggacacagtaacacttgacagaccgccacctaccggcgagggcctgacttttgagaaagtgtgggcaatgtttcaggaaaccagagaacaaatgaaggaaaccgaccggaagatcggcgaattgagcaaccgttttggcgaactggcggaacatctggttgctcccgctattcatgagcggtttaacgaattagggtatcactttagcggcgccgcggagggcggttatgtagtccgtgataataacggaaaaacccttgcgcaagtggacattctgttgataaacgacgactaccttatggcggtggaagtaaaggcaaccgtgcgtccgcaggatattgaacaccacatcaaacggatagagatactgaaagaacactggaacaaacaataccacgacacgcgcataatacggggagccatagcgggcgcgatattcgggagcgcggaaaaaaaggcggtcattgaggcgggattctacgcgctggttcaatccggagacacgatgaagctggaaataccggaggggtttgtgccacgggagttttga

SEQ ID NO: 26076 - protein, 183 aa, Unknown
  Obtained from environmental sample
  misc_feature (1)..(183): Xaa is any amino acid
MDTVTLDRPPPTGEGLTFEKVWAMFQETREQMKETDRKIGELSNRFGELAEHLVAPAIHERFNELGYHFSGAAEGGYVVRDNNGKTLAQVDILLINDDYLMAVEVKATVRPQDIEHHIKRIEILKEHWNKQYHDTRIIRGAIAGAIFGSAEKKAVIEAGFYALVQSGDTMKLEIPEGFVPREF

SEQ ID NO: 26077 - DNA, 417 bp, Unknown
  Obtained from environmental sample
  misc_feature (1)..(417): n is a, c, g, or t
atgggaggcgtctattcgatttcctccggcgtatccgtctcgccggttccgcagggcgagctttccatgcaggtgtatttcagctgcgatccaaagcgggcaacggaactccaaaccgccgttatcgcgttattgaatcaggcggcagacggcgtaataaaccgcgatacttttacgaaggccatggaagccccaaagaaagagtgggaagtctcgattcagagcaacgcctacatcgcccagagctacgcaaattcatcggtactgctgaaccttccgctgtcgcggctggacaagcggccaaagttgtttgacgccgttacccaggctgacattcagagggtatgcagacagctattacaaagcgatggacccgcgatagtggtactaatgccggaaatagggactagggactag

SEQ ID NO: 26078 - protein, 138 aa, Unknown
  Obtained from environmental sample
  misc_feature (1)..(138): Xaa is any amino acid
MGGVYSISSGVSVSPVPQGELSMQVYFSCDPKRATELQTAVIALLNQAADGVINRDTFTKAMEAPKKEWEVSIQSNAYIAQSYANSSVLLNLPLSRLDKRPKLFDAVTQADIQRVCRQLLQSDGPAIVVLMPEIGTRD

SEQ ID NO: 26079 - DNA, 1014 bp, Unknown
  Obtained from environmental sample
  misc_feature (1)..(1014): n is a, c, g, or t
atgatcccttttgagcaggcaaaaaaaatcagggcctcaatactgttcgccggcccgcttctggcgcaaaccggcaaggtaatgctgccgccgcccggcggggacgttataggcaggcggcggctggatacacatttcctcgctcttacggaactgggggcaaaggtaaaaaccaaagatacttttacctttacggcaaaatcgctgacaggtgcagacatttttctggacgaggcgtctgttaccggcaccgaaaacgccgtaatggcggctgtgcgcgcgaaaggaaaaacgatacttaccaacgcggccagcgagccgcacgtgcaggacctctgccgtatgcttgtttcgatgggcgcgcaaatcgaaggcatcggctcaaacatactgactataaccggggtaaaaaaactttccggctgcgactttacaataggagcggattacatggaggtcggttcctttatcgggcttgccgccgtcaccggaggagacctccatatagaaggaacccgcccacaggatctgcgccctgcgaaaatcgcttttggcaagctgggcatttcatgggcgcatgagggaacaactatccatgtcccgcaaaaacagccaatggaggttaactgcgatcttggcggtatgattccaaaaatcgacgacgcgccctggcccggcttcccgcctgaccttaccagcattatcaccgttgtagccacgcaggtaaaaggaacggtgctgatccacgaaaaaatgtttgaatcgcggatgttttttgtggacaagctgatcggcatgggggcgcggatagtgttatgcgatcctcaccgggctgttgttacaggccccgcgaggctgcatggctcaaagcttacagccctgacgtccgcgccggcatggcatgctcatagccgccctctgcgccgaagcagaagcgtatacgtaacgtctaccagatcgagcgcggctacgagcgcctcgtggaaaggttgtccagcctgggagctncgataa

SEQ ID NO: 26080 - protein, 337 aa, Unknown
  Obtained from environmental sample
  SIGNAL (1)...(22)
  DOMAIN (1)...(334): EPSP synthase (3-phosphoshikimate 1-carboxyvinyltransferase)
  misc_feature (1)..(337): Xaa is any amino acid
MIPFEQAKKIRASILFAGPLLAQTGKVMLPPPGGDVIGRRRLDTHFLALTELGAKVKTKDTFTFTAKSLTGADIFLDEASVTGTENAVMAAVRAKGKTILTNAASEPHVQDLCRMLVSMGAQIEGIGSNILTITGVKKLSGCDFTIGADYMEVGSFIGLAAVTGGDLHIEGTRPQDLRPAKIAFGKLGISWAHEGTTIHVPQKQPMEVNCDLGGMIPKIDDAPWPGFPPDLTSIITVVATQVKGTVLIHEKMFESRMFFVDKLIGMGARIVLCDPHRAVVTGPARLHGSKLTALTSAPAWHAHSRPLRRSRSVYVTSTRSSAATSASWKGCPAWELR

SEQ ID NO: 26081 - DNA, 861 bp, Unknown
  Obtained from environmental sample
  misc_feature (1)..(861): n is a, c, g, or t
gtgttacatgattcccaaaaaaggtgttttaccgagatacaggaattaatcaggaacatgcttaaaaacgaccgcgaactaaattcgttaataaaggattattaccaggcggaggcggatgtagataccttgcgtgacaagcaggatgaagatgacggcgagggaaaggttctggatcttcaggcgataaataccgaatttgacactttacggcaatcggtaaaaatgaccgtaggcaggcaggggaaccacttcccaatcctgacaagcgagtatttccgcagcggacctaatgatgtcgctttccgggaaaatatcataactatgttggctaaaattgaaagcatagacaaggaagcgttctgccgcgtatataaaaacaagcttaaccgtatagtcccctatgtggtgctgctcccctgttacggcgatctggggatttgttgggagccttttaacaaacataacagggcgaccagccgggggcgtatttttattcccatgtaccccaaaaatctctatatggcggttctaaacgccgtcgcggatctccgctggcaggtcgcgaaagaaaaagcgtctttttactggatggaagagggccttacgggcaactactaccagtggttcgtggcgcagaagctgaaaggggatgtaaaggattattttatacaggattacattatctggatgacaaaagaagccgaaggtatacagaaacttgataaggaaattcgcggaacattctggcggtatatgcctttctctaaggaggtcaaagaaaaactccgcacccgcagttatgtgtatcaggaactttaccagcgtgaccttaaccgcgcaatgtcagatggttattaa

SEQ ID NO: 26082 - protein, 286 aa, Unknown
  Obtained from environmental sample
  misc_feature (1)..(286): Xaa is any amino acid
MLHDSQKRCFTEIQELIRNMLKNDRELNSLIKDYYQAEADVDTLRDKQDEDDGEGKVLDLQAINTEFDTLRQSVKMTVGRQGNHFPILTSEYFRSGPNDVAFRENIITMLAKIESIDKEAFCRVYKNKLNRIVPYVVLLPCYGDLGICWEPFNKHNRATSRGRIFIPMYPKNLYMAVLNAVADLRWQVAKEKASFYWMEEGLTGNYYQWFVAQKLKGDVKDYFIQDYIIWMTKEAEGIQKLDKEIRGTFWRYMPFSKEVKEKLRTRSYVYQELYQRDLNRAMSDGY

SEQ ID NO: 26083 - DNA, 723 bp, Unknown
  Obtained from environmental sample
  misc_feature (1)..(723): n is a, c, g, or t
ttgacccaatcaatgcttgaggacggcagttggaaagggaagacattccgctcctacaatgttaaaacgccgcctgttcgcctaacgccgggccgtagcaacccctacgctaaatttttagaaaatgtaaaagataaactcacttccctgggttttgaagaatttgacggcccgttagttgagactgaattttggaattcggacgctctttttatgccgcagtttcattcagcccgtgacattcacgacgcgtacagcgtcgccgatccttctagcaaagacgggattgcgcgggcaaaatccattagcgaaccgtggctttcaaatgtcgcgtccgctcatgaaaacggcggcacaacgggcagtcgtggctggaattacggttttgaccgcgattttacaaaacggcttattctacgttctcaggggacggtgctatccgcgaaacaactgcccacggcgaaaattcccggcaaatacttcggtattgcccgttgtttccgttacgaccgcgtagacgcgacacacttgcccgatttttatcaaaccgaaggcattgtgttaggtgaaaatgtcaaccttcgcactcttttgggaatgttggaaatgtttgctcttgaagtcgccggagcgaaagaagttaaatatgttcccggttatttcccatttacggaaccgtccgttgaagtgcatattaaacacnccggtacttggctggtttga

SEQ ID NO: 26084 - protein, 240 aa, Unknown
  Obtained from environmental sample
  DOMAIN (18)...(240): tRNA synthetases class II core domain (F)
  misc_feature (1)..(240): Xaa is any amino acid
MTQSMLEDGSWKGKTFRSYNVKTPPVRLTPGRSNPYAKFLENVKDKLTSLGFEEFDGPLVETEFWNSDALFMPQFHSARDIHDAYSVADPSSKDGIARAKSISEPWLSNVASAHENGGTTGSRGWNYGFDRDFTKRLILRSQGTVLSAKQLPTAKIPGKYFGIARCFRYDRVDATHLPDFYQTEGIVLGENVNLRTLLGMLEMFALEVAGAKEVKYVPGYFPFTEPSVEVHIKHXGTWLV

SEQ ID NO: 26085 - DNA, 342 bp, Unknown
  Obtained from environmental sample
  misc_feature (1)..(342): n is a, c, g, or t
gtgggcgaaatccggcgtgaaacgatggtgttttttgaattgacagatcttggaagagcgtggaaagagaaaggaagcccggaagagcgtattatcgaacttgtaaaaacaaagagtggaaaactcaaactgcccgatattgcgaaggctcttaacattgagaataaagacattggcagcgcatttggaagcctttccaaacttggcatacttgcaatggacggcgataaaaatgtaattatgtcgaaggagccttctatcgatcaatttgccgtacttcgcggtttgccgcgaaaaaggcttaaaaggcgcaatagcggaaagctctttaaatacggctga

SEQ ID NO: 26086 - protein, 113 aa, Unknown
  Obtained from environmental sample
  misc_feature (1)..(113): Xaa is any amino acid
MGEIRRETMVFFELTDLGRAWKEKGSPEERIIELVKTKSGKLKLPDIAKALNIENKDIGSAFGSLSKLGILAMDGDKNVIMSKEPSIDQFAVLRGLPRKRLKRRNSGKLFKYG

SEQ ID NO: 26087 - DNA, 771 bp, Unknown
  Obtained from environmental sample
  misc_feature (1)..(771): n is a, c, g, or t
ttgtcgcggagacggcaaatgtcgccgtgccgggcaatatgccctatgtgggaagccacgncttttacccacaaggcgggaatgcatgcggacggaattttgaaagtgagccgctcttttgagcatatcgatccttctcttgtagggaatgatcggcacatagtaatgagcgaagtcggcggacgttccgctatagctgagagagctaaaaagatcgatccttccattacaagggatcaccctgtaacaatctctcttgcgcaaaagttaaaaaatcttgaggcggacggctggcagtttgaaggcgcggacggcagttttgatcttatggttcgccgagaacttgggcggtacaagccgctgtttaagattgaggcttaccgtgtggtaagcgaacacccgacaggcgaaacaatcgcctgctctcacgcatgggttaaagttcatgttgacggacaggaagaaatcgccgcaggcgaaggagacggacctgtcaatgcaatggacggcgcattgcgcagggcgttgaaacatttttaccctgaactgcaagaagttcgtcttaccgattacaaagtcagggtaatagacggcaacgccgcgacagcggcaaaggtgcgagtccttatcacttcttccgacggcaaacaaagctggacaacggttggagtttcggaggacataatagacgcaagccgtgcggcacttgtagattcaatagaatacaaattaattgatgatatagaacgacgctttaaagcgtatatgtag

SEQ ID NO: 26088 - protein, 256 aa, Unknown
  Obtained from environmental sample
  DOMAIN (101)...(244): LeuA allosteric (dimerisation) domain
  misc_feature (1)..(256): Xaa is any amino acid
MSRRRQMSPCRAICPMWEATXFTHKAGMHADGILKVSRSFEHIDPSLVGNDRHIVMSEVGGRSAIAERAKKIDPSITRDHPVTISLAQKLKNLEADGWQFEGADGSFDLMVRRELGRYKPLFKIEAYRVVSEHPTGETIACSHAWVKVHVDGQEEIAAGEGDGPVNAMDGALRRALKHFYPELQEVRLTDYKVRVIDGNAATAAKVRVLITSSDGKQSWTTVGVSEDIIDASRAALVDSIEYKLIDDIERRFKAYM

SEQ ID NO: 26089 - DNA, 768 bp, Unknown
  Obtained from environmental sample
  misc_feature (1)..(768): n is a, c, g, or t
atgctgaacaagatgacccaggaacttgccgtgtgcggtcttaacgccgtaattgctgtagcggagtaccaccctgagcaaatcaaccgcctttttttcagggaagagcggttaaagcaatttaccggaatttgcaaacaactggcggaacgtaaacgcccttacaaaatctgtgaagacgaagagctggagaggatatgcaagtctacccaccatcagggcgttgttgccatgatttatcttcccgaattggccccaatgtcgcaggaggatttggaagaatgggcccaggaagggaaaaccggcattgtgctcgattcggtcgggaacgatcacaacctgggagccatgataaggtcagccgcgttttttgatgttaaatatgttgtgatttcagaaaaagacagcgaagccaggctgacaacaggcgcttacagggtcgcggaaggcggcatggaacatgtgactgtgcgaagcctccgtaacacagcggcttttctgcgtgatgcttcaaaatctttaattaccatcgggactgacacaagggcccgtcagagaatagagcatttgtcaaaaataattcaggaaaaaaaaaaaggtagccacaacggtattgcgctggtactgggaaacgaagagacagggcttcctgacgacgtaaaagacgcctgctctgtccttgtccgcatcccgggaaccggccttatggacagcctcaacgtagcacaggccgccacctgttcatcacagggttctcggccaatctga

SEQ ID NO: 26090 - protein, 255 aa, Unknown
  Obtained from environmental sample
  DOMAIN (10)...(85): RNA 2'-O ribose methyltransferase substrate binding
  misc_feature (1)..(255): Xaa is any amino acid
MLNKMTQELAVCGLNAVIAVAEYHPEQINRLFFREERLKQFTGICKQLAERKRPYKICEDEELERICKSTHHQGVVAMIYLPELAPMSQEDLEEWAQEGKTGIVLDSVGNDHNLGAMIRSAAFFDVKYVVISEKDSEARLTTGAYRVAEGGMEHVTVRSLRNTAAFLRDASKSLITIGTDTRARQRIEHLSKIIQEKKKGSHNGIALVLGNEETGLPDDVKDACSVLVRIPGTGLMDSLNVAQAATCSSQGSRPI

SEQ ID NO: 26091 - DNA, 300 bp, Unknown
  Obtained from environmental sample
  misc_feature (1)..(300): n is a, c, g, or t
ttgatggccgagggtctgattttcaaggatagaacagaccttgatgaactaaacgggatacttgacgttactatcgaagcggcagctcccgcagacagcagctttgaagaagaactttcacgaatgataaaagaaaaaacaggcgcggcgggcattaaaataaaaacgctcatcagacctgaattgctgggcggttaccttttgcgaatcggcagtcattatgttgacgcaagcttaaaaggacagttggaaaatatagcggcttatttaaacggaaatacaggaggccgcaatggctaa

SEQ ID NO: 26092 - protein, 99 aa, Unknown
  Obtained from environmental sample
  misc_feature (1)..(99): Xaa is any amino acid
MMAEGLIFKDRTDLDELNGILDVTIEAAAPADSSFEEELSRMIKEKTGAAGIKIKTLIRPELLGGYLLRIGSHYVDASLKGQLENIAAYLNGNTGGRNG

SEQ ID NO: 26093 - DNA, 768 bp, Unknown
  Obtained from environmental sample
  misc_feature (1)..(768): n is a, c, g, or t
atggatatagcgcgcaggattaccgcaaggggcgacgtagaaaccataatcgggcgtatgcttatccaatacccggtagaaacaggaaataacgccgccgcggctgtcaattacgttgaatcgtatatcgctaccctgcccccgcgccccaaaaaaatagtcatggttagcgccgcaggtcctgatacaagcaatgttataaattccgcaaaacaaaggttcagttcaaagaacacgacttttgattttatttccgtaacgggcgccgttccgggaactcaaaacctttccaatcctccgggttcgggaaggtctcctcctcaacaaaggcagtcctcgtcgcagggcgcttcgtcagggacatctaccgtaacgccgcccgccggaacttctcagtcttcaacacagggcgtttcaagcggcgcttccggcgggcaaaagaccgcacagggatcaacgcagagtacttctcaacagggaacgggaacgcagtcttcaacacagggtgtttcaagcggcgcttccggagcgcagacatccacacagggaacggcgcaaaccggccctcagtcttcgcaaggtgcaacacgcaaacaacccctgatacccaatccggcggcgcgcagtcgtccggcgcggcttcttcctctcaggacgaatatactccgccgaagcaggaatccagggatgataaaggttctgctaacgcatacagcacacaaaagaaacaaagggagccgttcacatttaatcccacactgcttttaa

SEQ ID NO: 26094 - protein, 255 aa, Unknown
  Obtained from environmental sample
  misc_feature (1)..(255): Xaa is any amino acid
MDIARRITARGDVETIIGRMLIQYPVETGNNAAAAVNYVESYIATLPPRPKKIVMVSAAGPDTSNVINSAKQRFSSKNTTFDFISVTGAVPGTQNLSNPPGSGRSPPQQRQSSSQGASSGTSTVTPPAGTSQSSTQGVSSGASGGQKTAQGSTQSTSQQGTGTQSSTQGVSSGASGAQTSTQGTAQTGPQSSQGATRKQPLIPNPAARSRPARLLPLRTNILRRSRNPGMIKVLLTHTAHKRNKGSRSHLIPHCF

SEQ ID NO: 26095 - DNA, 531 bp, Unknown
  Obtained from environmental sample
  misc_feature (1)..(531): n is a, c, g, or t
atggcttcagtctcctcgtcaggcggaaaagaagaaaaattttcggaccacagcaagtatcttgctaattacgccgcggggcaaagcaaaaaacgggttactccttatcaggacaggcccgtaaaacaacaggccggcgctcatgccgcgataaatccctccggcccgcttcttcttaatttgtttgttgacgatcaaagcacttcaataggcaagcgcaatattcattcgcttaaatccggttacagtctatcggtcggcggcggaaagtcggatgatttccatatttttcttgtctctatgccgtctcatctcggagatatacgcagaaacggaagccagcttacatttattccgcgcaagcctaagtatttcccggatataggttcaaacgaggtaaaggaatgcataaataaaaagattcgcgttgtatccgataaaggttatgagatgtggtttagttttgtaacgtacgaagatccgctggaagcgctgaaccgcgtgctccactcgattaaagtgccgggctga

SEQ ID NO: 26096 - protein, 176 aa, Unknown
  Obtained from environmental sample
  misc_feature (1)..(176): Xaa is any amino acid
MASVSSSGGKEEKFSDHSKYLANYAAGQSKKRVTPYQDRPVKQQAGAHAAINPSGPLLLNLFVDDQSTSIGKRNIHSLKSGYSLSVGGGKSDDFHIFLVSMPSHLGDIRRNGSQLTFIPRKPKYFPDIGSNEVKECINKKIRVVSDKGYEMWFSFVTYEDPLEALNRVLHSIKVPG

SEQ ID NO: 26097 - DNA, 783 bp, Unknown
  Obtained from environmental sample
  misc_feature (1)..(783): n is a, c, g, or t
gtgcgccttatcaccatacataaaagcaagggacttgaattcccggtggtcttcctttgttgctgtaataaaaaaggacaaaatgattttagcagtgatttgtaccataccgatgattcgggactgacgtttacccctcccctgccgcaggaatacagcgataacgcctatgtcaggcgcagttatttttgggaacgctctctggcggttagaaaggaaaaaagaacagcggaactgcgccgccttctctatgtcggcatgacacgggcagaaaacgaattgttcctttcgggctgccttgacatcagcaagaccctcggtctggaaaacaaagaccaggactctggaatcgaaaacttttcactgaatctaaagcaatatatagagcttaaaagtgaaaaagccgccggaaacagtgccgcttatagcggcggcgccgttgtaaacggcggtattaaaggcgatacaatactggagggcaatacttttttcgggttgtgcctgccggcatttggcgcgcatttaccgtcagccaaagacgccggggattctttttttcatatcgaaaaaattcccgtttacaacgaacagcagatacgcaatgttgaaaaaagcggctcgcggttttcaaacgatcaaaaagggctaaacgagttctttgaattagtggaacctttttacgaaaacgcggacggcattgaaacacccaatgtcccaaagaaacattataccccaacatcgctgcattgcgctccgatttacaacggcgctcggccgatctga

SEQ ID NO: 26098 - protein, 260 aa, Unknown
  Obtained from environmental sample
  misc_feature (1)..(260): Xaa is any amino acid
MRLITIHKSKGLEFPVVFLCCCNKKGQNDFSSDLYHTDDSGLTFTPPLPQEYSDNAYVRRSYFWERSLAVRKEKRTAELRRLLYVGMTRAENELFLSGCLDISKTLGLENKDQDSGIENFSLNLKQYIELKSEKAAGNSAAYSGGAVVNGGIKGDTILEGNTFFGLCLPAFGAHLPSAKDAGDSFFHIEKIPVYNEQQIRNVEKSGSRFSNDQKGLNEFFELVEPFYENADGIETPNVPKKHYTPTSLHCAPIYNGARPI

SEQ ID NO: 26099 - DNA, 690 bp, Unknown
  Obtained from environmental sample
  misc_feature (1)..(690): n is a, c, g, or t
ttgtcacccgtggaaaacgaggcgcgttatgtagctttacgaatagaagaacttttaaaagaaaaaaacgagacaggggaatacaaataccggcccggtgatattgcaattctttttcgtacccgcagttcgcagcgcctgtttgaaaagcacttaatgctgttgaatatcccatatgtgagtgaggaattaaacggttttttttacggaggcccggtggacgatcttatgtctgtccttcggcttgcggcttatccaaaagacagcgccgcctacgcgcagatgctgcgctcccctttcgccggcctttccatgcaggggcttgcgctttgcgtccctagggtcgcagcgagcacaggtatcggtatgcccacagctcctttcagcgatgagccgcttgccttgctttcagaagatgacaaggataagtatcttcacgggaagcgtatttatcaaaaaatccttgacatagcccataaagaaagcattagctccctggtgagcgaattgtggtatggggaaggttatcgttatgaaaccgaatggaatccanagactgccgcttacagggaattgtacgattacctcttcccatctgcagccctggncgatgagaaaaccaggntcttgcgggatttaccgattacatccagggcctgtacaatgccgatgaacggtaagcaatattga

SEQ ID NO: 26100 - protein, 229 aa, Unknown
  Obtained from environmental sample
  misc_feature (1)..(229): Xaa is any amino acid
MSPVENEARYVALRIEELLKEKNETGEYKYRPGDIAILFRTRSSQRLFEKHLMLLNIPYVSEELNGFFYGGPVDDLMSVLRLAAYPKDSAAYAQMLRSPFAGLSMQGLALCVPRVAASTGIGMPTAPFSDEPLALLSEDDKDKYLHGKRIYQKILDIAHKESISSLVSELWYGEGYRYETEWNPXTAAYRELYDYLFPSAALXDEKTRXLRDLPITSRACTMPMNGKQY

SEQ ID NO: 26101 - DNA, 498 bp, Unknown
  Obtained from environmental sample
  misc_feature (1)..(498): n is a, c, g, or t
gtggcccactcaggggttgcatctgcccaaggttctgatagcggcaaaggggggtttatggacagccaacacaaaaaggtgatcatagtcggtagcgggccagccggctacacagcggcaatttattgcgcaagagccaacctgtcccccttggtcatcgagggaaaccagccgggcgggcaactgaccatcaccactgaagtcgaaaatttccccggcttcaaggatggggtgatgggaccccagctcatggaggagataaaggcgcaagcgtcgcggctgggcgcggaaatgctggctagttatgtgtcaaaggtggagctnnggcctcaaggccccattcaaggtggagtcggatgggggggcatatacctgcgacgcgctgatcatcgctacgggggcccaggcgaaatggctgggcatcagcaaggacgaagagctttcgcgcaatggcgggggagtgtcggcctgcgccacctgcgatgggtttttctatag

SEQ ID NO: 26102 - protein, 165 aa, Unknown
  Obtained from environmental sample
  misc_feature (1)..(165): Xaa is any amino acid
MAHSGVASAQGSDSGKGGFMDSQHKKVIIVGSGPAGYTAAIYCARANLSPLVIEGNQPGGQLTITTEVENFPGFKDGVMGPQLMEEIKAQASRLGAEMLASYVSKVELXPQGPIQGGVGWGGIYLRRADHRYGGPGEMAGHQQGRRAFAQWRGSVGLRHLRWVFL

SEQ ID NO: 26103 - DNA, 522 bp, Unknown
  Obtained from environmental sample
  misc_feature (1)..(522): n is a, c, g, or t
ttgcaccaacggggcataaagccagagtttttgctggcgctgctgaattcaaaactgctgaactacaggtacaaatccataggcaagcagacgggtggtggcagcttcgagtacttccccaacggcgtggaaaaattgcccatagccgaagccagccaagcgcagcaggaatccttggcggccaaagccaaaaaaatgatggagctaaacaagaaactgcgcgagagtatctccaccgcgctgaatatcatcaaagccgaatatgggataaaccaaatcggctccagcctagaacatttttacctgctggatgcgcaaaaatttatggaagaactgaaaaatgctggggccaacatattggaacacgaagatactaggctggaatggttccaaaaaaacaaagatgccatctgcgccataaaatcagaaatccaagaactggatgacaccatagacagagatgtctatgccctgtacggcctgacggcggaagacatagccatcgtggaggggagggcgtag

SEQ ID NO: 26104 - protein, 173 aa, Unknown
  Obtained from environmental sample
  misc_feature (1)..(173): Xaa is any amino acid
MHQRGIKPEFLLALLNSKLLNYRYKSIGKQTGGGSFEYFPNGVEKLPIAEASQAQQESLAAKAKKMMELNKKLRESISTALNIIKAEYGINQIGSSLEHFYLLDAQKFMEELKNAGANILEHEDTRLEWFQKNKDAICAIKSEIQELDDTIDRDVYALYGLTAEDIAIVEGRA

SEQ ID NO: 26105 - DNA, 345 bp, Unknown
  Obtained from environmental sample
  misc_feature (1)..(345): n is a, c, g, or t
atggctgttctggcctgcgaaaagcctccctcgctggcttgggaactgatacgccactttgcctttgccgccatctcctgccccgactgcatagccgcaaatggcatgcgtatcctagccgcgcccgtgcaaggtgattccccaatagtatccggcgagtcaggcgcggtcacagccggatttttggaatggatcatgtccagccaaaatgccgaccaaatgcgccaaaccttacagctaggcccaaactcacgtgtcctcctgataagcacagaaggcaacacatcgccgcaaacatacttagacgttgtgtggcatgggaagtactctgctgttagtgattag

SEQ ID NO: 26106 - protein, 114 aa, Unknown
  Obtained from environmental sample
  misc_feature (1)..(114): Xaa is any amino acid
MAVLACEKPPSLAWELIRHFAFAAISCPDCIAANGMRILAAPVQGDSPIVSGESGAVTAGFLEWIMSSQNADQMRQTLQLGPNSRVLLISTEGNTSPQTYLDVVWHGKYSAVSD

SEQ ID NO: 26107 - DNA, 810 bp, Unknown
  Obtained from environmental sample
  misc_feature (1)..(810): n is a, c, g, or t
ttgatccctttgaagggcctggcgtcgcgccttggcctcgaaagcattttcataaaggacgagtccaagcgctttggcctaaacgccttcaaggcccttggcggctcgtacgcgattgcccgagtgttggccgaaaaactgggcagccccattgaaacgctgacattcggcgagctggcctcccccgccctgcgcgacaaaataggcaatgtcgcatttgtcacggccaccgatggcaaccacggcaggggcgtggcctgggccgcgcagcaactgggccaaaaagccgttgtcttcatgcccaagggatcggcggagacgcgcgtcgccaacatccgcgccacgggggcagagtgccgcgtcacagaccacaactacgatggcgcagtgcgagaggcggaatcgtacgctaaaacaagcggcgccgtgctggtgcaggacatggcttgggatggctacgaaaaaatcccaaggtggatcatgcagggatatttgacaatggcaatggaaatccagtgccagcttagtgaagcgggggagccagtgccctcccacgtctttttgcaggcaggaaacggctctttccccgccgcgatccttggggctttagaggctggactgctgggcgcggaaggccgaaacgcacccgcgtccccccctttggcaataaccgtggagccgcacgaagcggactgcatatataaatccattcaggccaacgacgggcagccccgcgccattgccggcgaaatgccaacgctatggctgttctggcctgcgaaaagcctccctcgctggcttgggaactga

SEQ ID NO: 26108 - protein, 269 aa, Unknown
  Obtained from environmental sample
  DOMAIN (1)...(265): Pyridoxal-phosphate dependent enzyme
  misc_feature (1)..(269): Xaa is any amino acid
MIPLKGLASRLGLESIFIKDESKRFGLNAFKALGGSYAIARVLAEKLGSPIETLTFGELASPALRDKIGNVAFVTATDGNHGRGVAWAAQQLGQKAVVFMPKGSAETRVANIRATGAECRVTDHNYDGAVREAESYAKTSGAVLVQDMAWDGYEKIPRWIMQGYLTMAMEIQCQLSEAGEPVPSHVFLQAGNGSFPAAILGALEAGLLGAEGRNAPASPPLAITVEPHEADCIYKSIQANDGQPRAIAGEMPTLWLFWPAKSLPRWLGN

SEQ ID NO: 26109 - DNA, 399 bp, Unknown
  Obtained from environmental sample
  misc_feature (1)..(399): n is a, c, g, or t
atgtctatggagaaactttttaaattacgacaaaatggaacgacgttccagcgggagatcgtagcgggtctcacaacatttttaactatggcatatattcttgcggttaatccgggaatattaagcggaaggtttgccaatgcggaactgtttgtaggtatgccgtggggaggtatctttaccgccacggcccttgcggcggcaatagccactattgtaatggcatttacagctaacatgccggtcgcccttgctcccggtatggggcttaatgctttctttgtttatacggttgtattgcacatgggatatacatggcagattgcgttaacggcagttttccttgaaggtatcctgtttatggttctttctttaattaatgttcgcgaggcaatttaa

SEQ ID NO: 26110 - protein, 132 aa, Unknown
  Obtained from environmental sample
  misc_feature (1)..(132): Xaa is any amino acid
MSMEKLFKLRQNGTTFQREIVAGLTTFLTMAYILAVNPGILSGRFANAELFVGMPWGGIFTATALAAAIATIVMAFTANMPVALAPGMGLNAFFVYTVVLHMGYTWQIALTAVFLEGILFMVLSLINVREAI

SEQ ID NO: 26111 - DNA, 1275 bp, Unknown
  Obtained from environmental sample
  misc_feature (1)..(1275): n is a, c, g, or t
gtgcagaacgtgtgggcattggaattcctcggacggggcatacacggaaagatcgccagcgcggcggacgctccgttaggtgaaagtccgtgcatcaagtgcggacagtgcgccgcgcattgccccgttggcgcgatttatgaaagagacgacacggtaaaagtgtggacagccctgcaggataaggaaaaacaccccgtcgtgcagattgcccccgcagtccgcgtcgctttagctgaagaattcggccttgatcccggcacggtttttacaaaaaagatatacgccgccctgcgcagactgggatttaaaacagtctttgacactaacttttcagccgaccttaccatcatggaagaaggctccgaacttgtaaaacgcctgaccgaaaagggcgtcattcccctgataacttcctgctgcccggcgtgggtagattatatggaaaaatattacaacgacatgattcccaatttttcaaccgcaaaatctccccagcagatgatgggcgcgatgattaaagcatactgggctgaaaaagccggcgttgatcccgataaagtgtattcggtgtcagtcatgccgtgtaccgcgaagaagtgggaaacaaaacgcaatgacgacatgaagagcgccggtcacggttacgacgtggacattgtaattacaacaagggaacttgcgcggatgatcaaacaggcaggaattgaagtattgaaacttgacgaagaagaggctgacaatccgttaggaccgtacaccggagccggaactatttttggggcgacgggcggagtaatggaagccgcagtccgcagcgcttactaccttgttacaaagaaggaactccccgatgtggactttaaacccgcccgagggcttgatggcgtaaaggaaggggaagttgattttggcaacgggacaaagatacgcattgcggtagcccatcagatgggaaatattgccgcggttctggacaagctccgcgaggcgaaaaaagccggtaaagagccgccgtatcactttattgaagtaatggcgtgcagaggcggatgtatcgcgggcggaggacaaccttacggctgtacggatgatattcgcaaacaacgcacaggcggtctttatgtggacgatcaaaagtcccagtaccgctgttcgcatcaaaatccatatataggccaggtttacaaggaattccttggagagccgggcggtcacaaagcgcataaactgctccacaccaaatatgtggaacggccgttatatgtgaaatga

SEQ ID NO: 26112 - protein, 424 aa, Unknown
  Obtained from environmental sample
  DOMAIN (24)...(47): 4Fe-4S binding domain
  misc_feature (1)..(424): Xaa is any amino acid
MQNVWALEFLGRGIHGKIASAADAPLGESPCIKCGQCAAHCPVGAIYERDDTVKVWTALQDKEKHPVVQIAPAVRVALAEEFGLDPGTVFTKKIYAALRRLGFKTVFDTNFSADLTIMEEGSELVKRLTEKGVIPLITSCCPAWVDYMEKYYNDMIPNFSTAKSPQQMMGAMIKAYWAEKAGVDPDKVYSVSVMPCTAKKWETKRNDDMKSAGHGYDVDIVITTRELARMIKQAGIEVLKLDEEEADNPLGPYTGAGTIFGATGGVMEAAVRSAYYLVTKKELPDVDFKPARGLDGVKEGEVDFGNGTKIRIAVAHQMGNIAAVLDKLREAKKAGKEPPYHFIEVMACRGGCIAGGGQPYGCTDDIRKQRTGGLYVDDQKSQYRCSHQNPYIGQVYKEFLGEPGGHKAHKLLHTKYVERPLYVK

SEQ ID NO: 26113 - DNA, 486 bp, Unknown
  Obtained from environmental sample
  misc_feature (1)..(486): n is a, c, g, or t
atgatgataaacaacgataacgacattattcaatatatagaacccatactgcatttttgcattaagcggctgaataaccgtcaagacgccgaagacttagtcggcgaaataatggttcacatattaagcggcgtcaggaaatataagattgaatctcttgaaaaatggatatggagcattgcgcataatcgttacgcaaaattcatagataaaagaaagaaaataaattatactgaatcagaagccgattacgcggaaattgcggatacatacgattttattgatcaattaataatttcaaacaggtatcaaaatatatttaaggcgcttcatgagctttcaggcgaataccgcgatattttggttgattactatattaatcagcttccggtaaaacaaattgctgaaaaatacaaattacctgaaattatggttaaatggcggcttaatgtcggaagaaaaaagatagttgataaaataatataa

SEQ ID NO: 26114 - protein, 161 aa, Unknown
  Obtained from environmental sample
  DOMAIN (103)...(156): Sigma-70, region 4
  misc_feature (1)..(161): Xaa is any amino acid
MMINNDNDIIQYIEPILHFCIKRLNNRQDAEDLVGEIMVHILSGVRKYKIESLEKWIWSIAHNRYAKFIDKRKKINYTESEADYAEIADTYDFIDQLIISNRYQNIFKALHELSGEYRDILVDYYINQLPVKQIAEKYKLPEIMVKWRLNVGRKKIVDKII

SEQ ID NO: 26115 - DNA, 312 bp, Unknown
  Obtained from environmental sample
  misc_feature (1)..(312): n is a, c, g, or t
atgaatatttttgaatcaataatgttggtttgttttggttttgcgtggccgatttccatttacaaatcatttgtatccaaaaaaacagcgggtaaaagcctattgttcctgatagtattacaaataggttatgtggcgggtatttttttcaaactaaccgaatactggactaatttaaaaacaaaccctgacgagactatcagcataaatttatatttatacattcttaattttgtaatgataacgatagatgagttattatttttgagaaaccgtaaaatagagagaaccagggaccagggttgttcataa

SEQ ID NO: 26116 - protein, 103 aa, Unknown
  Obtained from environmental sample
  misc_feature (1)..(103): Xaa is any amino acid
MNIFESIMLVCFGFAWPISIYKSFVSKKTAGKSLLFLIVLQIGYVAGIFFKLTEYWTNLKTNPDETISINLYLYILNFVMITIDELLFLRNRKIERTRDQGCS

SEQ ID NO: 26117 - DNA, 552 bp, Unknown
  Obtained from environmental sample
  misc_feature (1)..(552): n is a, c, g, or t
atgcccgtcaccgcccgaatcgccatgaaagaacaagacccggcagtacgcggccgcaacttcaacgaggtgccctacggctatacgggcgacgaggcgaaatccgaggcggcacgttgtctaaagtgcaaaaagccgctatgcgtggacggttgcccggtcaatgtgaagatacccgagttcatcgggcttatcgccgacggcgagttcgtcgcggcggctcggaagatcaaggagaccaacgccctgccggcgatctgcgggcgcgtctgtccgcaggagacgcagtgcgagtcgcgctgcatactcggcaaaaagggcgagcctgtggccatcgggaatctcgaacgcttcgccgcagacacggaacgcgaatcgggtaaaatcgacctgccgccgaaaagccctccaaacggcaaaaacgtcgccgtggtcggctccggccccgcaggtcttacgtgcgcgggggagcttgtcaaggcgggtttcgatgtgacgatctttgaggcgttgcacgaagccggcggagttctcgttctcgtgccgatctga

SEQ ID NO: 26118 - protein, 183 aa, Unknown
  Obtained from environmental sample
  misc_feature (1)..(183): Xaa is any amino acid
MPVTARIAMKEQDPAVRGRNFNEVPYGYTGDEAKSEAARCLKCKKPLCVDGCPVNVKIPEFIGLIADGEFVAAARKIKETNALPAICGRVCPQETQCESRCILGKKGEPVAIGNLERFAADTERESGKIDLPPKSPPNGKNVAVVGSGPAGLTCAGELVKAGFDVTIFEALHEAGGVLVLVPI

SEQ ID NO: 26119 - DNA, 363 bp, Unknown
  Obtained from environmental sample
  misc_feature (1)..(363): n is a, c, g, or t
atgacagagttgaaaccgccgtcacacgcgcggcaaaagaaaggagtactgttcatggtatcgcctaagtatcacattttcgtctgcgggagcagccgtatcaacggaacgcaaaacgggacgtgccacaagaagggcgcggtcggcattgtgcaaaagttcatgcaggagatcgaggacagggacatcacgtccgactgcctcgtgaccaacaccggatgcttcagcatctgcgacaaagggccggtcgcggtcgtctatcccgaaggaacttggtacgggaacctcaccgaagacgcggtggaggagatctgcgagcagcattttgagggcggaaaagtagtggagaagtacaagatttaa

SEQ ID NO: 26120 - protein, 120 aa, Unknown
  Obtained from environmental sample
  misc_feature (1)..(120): Xaa is any amino acid
MTELKPPSHARQKKGVLFMVSPKYHIFVCGSSRINGTQNGTCHKKGAVGIVQKFMQEIEDRDITSDCLVTNTGCFSICDKGPVAVVYPEGTWYGNLTEDAVEEICEQHFEGGKVVEKYKI

SEQ ID NO: 26121 - DNA, 1086 bp, Unknown
  Obtained from environmental sample
  misc_feature (1)..(1086): n is a, c, g, or t
atgaacgagagccgtccgggcgtcgcgtcgaagattctctcgcccaccgaggcgtttgagcgttacgtgaagctgaaagagacgatgccgaacctcaccgtggctgggatcgccggccccggcgacgcgcttgcgaatttcgatctcactcgtgagacgtttcggcttatccgcgagtacgacaaaaacgttacgttctgcatagccacaaacgggttgctgctgccgcagtacgtttcgcagttgcgtgaactcggcgtcagccacgttacggtaacaatcaacgctgtcgatccggctattggcgccaagatttaccatcgtgtttcttacatgggaaaagcatacgagggcatagagggcgcggcgatacttcttgccaaccagctttccggaataaagatgcttgccgatgccggaattgtttgcaaggtaaattgcgttacgctcaagggtataaacgataaacatatcccagacgttgtgaagacggtgtctggtctcggcgtgtttatggcaaacatcatgccgcatattcctgtgaaggggtcggcgtttgaggggcttgagcgtgttaccaacatagagatcgcggcgctgcgtaaggattgcggcgcgtatgttaagcagatgtcgcactgccgccagtgccgctccgacgccaccggaacgctcgacgacgaccggtcggtggatttttacgacggcgaagagactaaggcggcgccgggcaaacttatgcgtttcgccgtagctactaagagcggcgctattgtggacatgcacttcggccacgcgagcgaattctacatatacgagagcgacgcgtccgacactcgcttcgtggaaacgcgcaaagtaggcaaatattgcaacggccccgagtgcaacggcaaagaggacaaatgggaaccgattatccgagccgtcgccgattgcgcggcggtactggctatgcggatcggccccacgcccgaaaaaaaattgaaagaaaaaggcattgacgccattatgacttatgacagagttgaaaccgccgtcacacgcgcggcaaaagaaaggagtactgttcatggtatcgcctaa

SEQ ID NO: 26122 - protein, 361 aa, Unknown
  Obtained from environmental sample
  DOMAIN (255)...(352): Dinitrogenase iron-molybdenum cofactor
  misc_feature (1)..(361): Xaa is any amino acid
MNESRPGVASKILSPTEAFERYVKLKETMPNLTVAGIAGPGDALANFDLTRETFRLIREYDKNVTFCIATNGLLLPQYVSQLRELGVSHVTVTINAVDPAIGAKIYHRVSYMGKAYEGIEGAAILLANQLSGIKMLADAGIVCKVNCVTLKGINDKHIPDVVKTVSGLGVFMANIMPHIPVKGSAFEGLERVTNIEIAALRKDCGAYVKQMSHCRQCRSDATGTLDDDRSVDFYDGEETKAAPGKLMRFAVATKSGAIVDMHFGHASEFYIYESDASDTRFVETRKVGKYCNGPECNGKEDKWEPIIRAVADCAAVLAMRIGPTPEKKLKEKGIDAIMTYDRVETAVTRAAKERSTVHGIA

SEQ ID NO: 26123 - DNA, 387 bp, Unknown
  Obtained from environmental sample
  misc_feature (1)..(387): n is a, c, g, or t
atggaaactgcctgcggtaaaaggaatgaactgcaaatcttcggggatgattatgatacccctgacgggacatgcattagggattatatacatgtaagcgatcttgctatcggacacgctatgacgcttgattatatctgcaaaaatgacaaaagccttattatcaatcttggaagcgaaacaggcagttctgtaaaggaagttcttgatacggctcgtaaagttacaggtaagccaatcccttccaaaattgccgggcgcagagcaggagaccccgccaaacttacggcttcctccgcttttgcccgtgaattgattggctggcaaacgcgttactccgatatggaaacattgataaagacaagctgggcagcttacgttagttga

SEQ ID NO: 26124 - protein, 128 aa, Unknown
  Obtained from environmental sample
  misc_feature (1)..(128): Xaa is any amino acid
METACGKRNELQIFGDDYDTPDGTCIRDYIHVSDLAIGHAMTLDYICKNDKSLIINLGSETGSSVKEVLDTARKVTGKPIPSKIAGRRAGDPAKLTASSAFARELIGWQTRYSDMETLIKTSWAAYVS

SEQ ID NO: 26125 - DNA, 504 bp, Unknown
  Obtained from environmental sample
  misc_feature (1)..(504): n is a, c, g, or t
ttggaactgattgacggaagagcggtagaaattataaataaaataacagacccgtatcttgactggtggaggaaaaaattacatttaaatataggaggctttgatttttcggtaattcccgcagttgtatttctctcattaattcagagtatatttaaaattctttcaacgtcgggaaaaataacactcggttttttgcttatacaaatattattatcgttatggagtattttttcttttattataatattttttataattgtgattgtcatacgggctataggttatctgactaacggcgatatatacaatcctttctggggacttattgattctatcacgcagccgcttttgtacagaatgaacagaatatttttcggcaaaaaaataggaaattacttagcaggtatatttttatcgttattatttttaattattttgcttgtcggcggaaacttaataatgatgtttctttccaaaattttttataatactccgatataa

SEQ ID NO: 26126 - protein, 167 aa, Unknown
  Obtained from environmental sample
  misc_feature (1)..(167): Xaa is any amino acid
MELIDGRAVEIINKITDPYLDWWRKKLHLNIGGFDFSVIPAVVFLSLIQSIFKILSTSGKITLGFLLIQILLSLWSIFSFIIIFFIIVIVIRAIGYLTNGDIYNPFWGLIDSITQPLLYRMNRIFFGKKIGNYLAGIFLSLLFLIILLVGGNLIMMFLSKIFYNTPI

SEQ ID NO: 26127 - DNA, 447 bp, Unknown
  Obtained from environmental sample
  misc_feature (1)..(447): n is a, c, g, or t
atgtttcttcgttctctgtccgcacccgtaactgaaatcagcggaataggggcatccgcttctcaaaaactcgcccgtcttggaatacgcacagccgctgaccttctgcttcactatccgcgcgattgggaagaccgtgaaaaaattgttccgttaaaagattacagaagcggcaaaatctgcacagttgtaacggttttcgcgcgagaatggatcggttacggcagaatgaaaacgctgaaaatttacatagaagacgaaaacactcaagccgctcttgtatgttttaaccgcccttggcttgacaaacagcttgttacagggcaaaaatacatgatttcaggacgcttctattacaagtacggagaattgcagtcagcgcttttgaagcggagcctgagtcttcaagcgcaagtttcggaaaaatactgcctgtttatccgctaa

SEQ ID NO: 26128 - protein, 148 aa, Unknown
  Obtained from environmental sample
  misc_feature (1)..(148): Xaa is any amino acid
MFLRSLSAPVTEISGIGASASQKLARLGIRTAADLLLHYPRDWEDREKIVPLKDYRSGKICTVVTVFAREWIGYGRMKTLKIYIEDENTQAALVCFNRPWLDKQLVTGQKYMISGRFYYKYGELQSALLKRSLSLQAQVSEKYCLFIR

SEQ ID NO: 26129 - DNA, 408 bp, Unknown
  Obtained from environmental sample
  misc_feature (1)..(408): n is a, c, g, or t
ttgtttgaaaacaggtgttatgatataatgtcagtttcgttggatgtatctttctctgacaggaagaatttagtttcaaatttactaaaaatcctgaaaggcattgatttctgtggtcaggaaccctcggtatacccacggctggaaaatttgctgaagagactcaggaatgatgtatggttcgttctggagtctccctatgtggatcggcattatcgggacacctattattcttattattcatcgaagtttaaaaaaattggtagagactgtattagggtacacatatttaatggagaaatatcaaaagatgatctattagacaaaggcactaactttgagaagaaaaatattgagggttttttattatccgtccgatactgcggtatattttgggcaggtcgttaa

SEQ ID NO: 26130 - protein, 135 aa, Unknown
  Obtained from environmental sample
  misc_feature (1)..(135): Xaa is any amino acid
MFENRCYDIMSVSLDVSFSDRKNLVSNLLKILKGIDFCGQEPSVYPRLENLLKRLRNDVWFVLESPYVDRHYRDTYYSYYSSKFKKIGRDCIRVHIFNGEISKDDLLDKGTNFEKKNIEGFLLSVRYCGIFWAGR

SEQ ID NO: 26131 - DNA, 447 bp, Unknown
  Obtained from environmental sample
  misc_feature (1)..(447): n is a, c, g, or t
ttgaaaagggcgtattcggcgctcgtgaaaaaacaaaaggtagcgtttcaccgcatggatgctcactatctgggaaaagatgcccaaagcgttcacaaagaaagctatgccgcagccgccggaggaaactcgtcttatatagacgccgtctggaaacccattaaagaggcggacatactttttgaagaaggagatacaattcctcctttcaaggtgcttcatgtccccggccacaccccgggaagcatcgcctttttcgacgaagaagccggggtgcttttttcaggcgacacactttttcagggcacttggggccgcacggatcttcccggcggcagcgaagcgctcattcaacaaagccttaagcgcctgcgttcaatggacgaaaaaatagttgtctgccccggccacggacctgttacaacgattggggaagaacgggattag

SEQ ID NO: 26132 - protein, 148 aa, Unknown
  Obtained from environmental sample
  misc_feature (1)..(148): Xaa is any amino acid
MKRAYSALVKKQKVAFHRMDAHYLGKDAQSVHKESYAAAAGGNSSYIDAVWKPIKEADILFEEGDTIPPFKVLHVPGHTPGSIAFFDEEAGVLFSGDTLFQGTWGRTDLPGGSEALIQQSLKRLRSMDEKIVVCPGHGPVTTIGEERD

SEQ ID NO: 26133 - DNA, 585 bp, Unknown
  Obtained from environmental sample
  misc_feature (1)..(585): n is a, c, g, or t
atgacgcttctggttgtcgatgaggcgtggcgcttcctggacaacgagatattccgtaacaagatgcgccagtggcttaaagagttgcggaaaaagcatgtgttctgcgtgtttgccacgcaggaagtcgccgacggcgcgaacagcccgattgccagcacgctgatccagaactgcccgacaaagatatatcttgccgatcccgaagcgcataacaactccgaagcgtatatgaaattcggtctgaccggggacgaggtggcgttattgacaatggcaagaaagaagcgggattactatttcaaaaatccccaggggacaaggctgttccagttgtcgcttggaataatatttctctcgcttatgcgggggcaggatgcccatgtcagaacggcaaaaggcgagatgatccgctgggcggattactgcaagaatttgctggaattgaaaagcacgggcgtttccaagggctttgtggaggagatactggatattcagggcgttaagttccgtcattatctggaaggcaagaccatagacattcctgaatatgaagttatggaggaaaggaagggtaaaaaatga

SEQ ID NO: 26134 - protein, 194 aa, Unknown
  Obtained from environmental sample
  misc_feature (1)..(194): Xaa is any amino acid
MTLLVVDEAWRFLDNEIFRNKMRQWLKELRKKHVFCVFATQEVADGANSPIASTLIQNCPTKIYLADPEAHNNSEAYMKFGLTGDEVALLTMARKKRDYYFKNPQGTRLFQLSLGIIFLSLMRGQDAHVRTAKGEMIRWADYCKNLLELKSTGVSKGFVEEILDIQGVKFRHYLEGKTIDIPEYEVMEERKGKK

SEQ ID NO: 26135 - DNA, 702 bp, Unknown
  Obtained from environmental sample
  misc_feature (1)..(702): n is a, c, g, or t
atggcgcagaacagctttacaggcgaggtgtgcggagtggactcgccgttggttacatgctcgacaaattacggcactccgtttttcctcaacctgaatgacggcgacgtgggccattcgcttgtttttggccccacaggttcgggcaaatctacgattatcgggctgttggcggcgagctttttgaagtatccggacggtcaggtatttatcatcgacaagggagcaagtgcgttaacaatgaccctcgcggcgggcggcgagtatgtcgatccatcggcgacagaacattgctttcagccattaggcgacattgacacggagccggacaaggcttgggcctgcgattttattacgacgctgctggagatgcaggggacaacgatattgcccaaaatgcttgtgcagattcgcgtaacaatagagcttatgtcggcgatggaaaaacagagacgcactttaaccacctttaagcagacctgcatgtaccgcgatgagattacaggccaaaacccgatagacgacgccgttcagccttatacgctggaaggaccctacggacgtatctttgacggcgacgcgacaaggatcaacgacagccgctggattctgttcgagatgagcgaattgatggaactaaaggacaaggtagtggcgcctgcgatcatgtttctgtttcattttctggaaaaacgtttttaa

SEQ ID NO: 26136 - protein, 233 aa, Unknown
  Obtained from environmental sample
  misc_feature (1)..(233): Xaa is any amino acid
MAQNSFTGEVCGVDSPLVTCSTNYGTPFFLNLNDGDVGHSLVFGPTGSGKSTIIGLLAASFLKYPDGQVFIIDKGASALTMTLAAGGEYVDPSATEHCFQPLGDIDTEPDKAWACDFITTLLEMQGTTILPKMLVQIRVTIELMSAMEKQRRTLTTFKQTCMYRDEITGQNPIDDAVQPYTLEGPYGRIFDGDATRINDSRWILFEMSELMELKDKVVAPAIMFLFHFLEKRF

SEQ ID NO: 26137 - DNA, 1668 bp, Unknown
  Obtained from environmental sample
  misc_feature (1)..(1668): n is a, c, g, or t
gtgaagaacccgtccacatacagcaagacctgcgtcttcgttcagggcgaggcctattacctgaagacgacgttccggcacgagatagaggcggcgcggacggccgtcctctctccggtgctgtcgttcgagcgggattacgaccgcgccagagcccgccacgagctgatcaatatggcggtgtcggctatgcacataccgcaaacggccgccgaggcggcgttccatagggcggtggagcaccagcgcgctttcgacaacgaattgcaggcctacggcaggcgggcgctcgaatatttggacgagaaccccgacacattcggcctcgtcatctttggccgcccgtacaacagcttcgcctccgacgcaaacatgggcatcccccacaaagcggcctcgcgcggctacattgtgatcccgttcgatatgcttccggcgggggactacatggccgacagcaagatgtactggggcatggggcagaagatcatgaaggcggcgcagttcgtcaaaaagcgcgacaacctcttcggcgtgttcataacgaatttttcatgcggccccgactccttcgtcctcagctacttccgcaatttgatgaagtctaagccgtcgctgacgcttgagctcgaccagcacaccgccgacgccggcatagacacgcgcatagaggcggcggtagacatcatgcagagctaccgccgcatcagcaagaccctgccgccggaggacgcgtcgttcgtccccgccgtggtgccggataacgagatgagggtgcgagccgccgacggcaaatactacaacctgcgcgaccccaaagtagagctgatgctcccatctatgggacgctacggcacggaagcgctcgccgcgatattcaggagcctgggcgtagacgcccacgccctacccgtcgccgacaaggaagtcctaagcatcggcaagaaaaactcaacctgcaaagagtgcgtaccatacatagtcaccaccggatcgttcctgcagtacgtttgggagagaaagaaagacccgaacaagatcacgctcttcttcatggcgaccagcgacggcccgtgccgcctcggccagtactgccgggccatagcgcaaaacatagagaacctgaaaatccccaacacggcggtgcttacgcttacggacgaaaacggatacgggggaatgggcgcggcaagcctcctgaaaggctggcaaagcatcatcgtctccgacaccttcagcgacatacggagtatgcttgccgtggcggcgagagacaaagaacaggcgcttaccgtgcttgaggagtgctggggagaattcatcaggttctttgagggcaaggtaggcggcggcattatgaagacgattgacaaagtggtgaaacgcctctcaaagataccgctaaaaatgaaacccgaagacgtgccggtggtctcggtcataggtgaaatcttcgtcaggcgcgacgagttctgccgcaaaaatatcaccgactacctggagtcgcacggcttcgccgcgaaagtagcgcctataagcgaattcctgtgctacagcaactacgtgcttaactccaacccgcccgatatagagcaaacgtttagagagcgcatccgcgtccgcctcacctctaagctccaagactggggagaacctcggccgatctga

SEQ ID NO: 26138 - protein, 555 aa, Unknown
  Obtained from environmental sample
  misc_feature (1)..(555): Xaa is any amino acid
MKNPSTYSKTCVFVQGEAYYLKTTFRHEIEAARTAVLSPVLSFERDYDRARARHELINMAVSAMHIPQTAAEAAFHRAVEHQRAFDNELQAYGRRALEYLDENPDTFGLVIFGRPYNSFASDANMGIPHKAASRGYIVIPFDMLPAGDYMADSKMYWGMGQKIMKAAQFVKKRDNLFGVFITNFSCGPDSFVLSYFRNLMKSKPSLTLELDQHTADAGIDTRIEAAVDIMQSYRRISKTLPPEDASFVPAVVPDNEMRVRAADGKYYNLRDPKVELMLPSMGRYGTEALAAIFRSLGVDAHALPVADKEVLSIGKKNSTCKECVPYIVTTGSFLQYVWERKKDPNKITLFFMATSDGPCRLGQYCRAIAQNIENLKIPNTAVLTLTDENGYGGMGAASLLKGWQSIIVSDTFSDIRSMLAVAARDKEQALTVLEECWGEFIRFFEGKVGGGIMKTIDKVVKRLSKIPLKMKPEDVPVVSVIGEIFVRRDEFCRKNITDYLESHGFAAKVAPISEFLCYSNYVLNSNPPDIEQTFRERIRVRLTSKLQDWGEPRPI

SEQ ID NO: 26139 - DNA, 576 bp, Unknown
  Obtained from environmental sample
  misc_feature (1)..(576): n is a, c, g, or t
gtgatggggctcttcctcctctacattgaatttttcaagatcggggtattcgccgtaggcggaggactggcgactctgccgtttttgtttcttatggccaatgaccgttttacgtttatccgtcagacaggctggctaagcgcggaacagttgggcaacttcattgccatcgcccagtgttcccccggcgccgtcggcttgaatatcagcgctcagaccggttttcagtatggcggcatatcgggcggcattatcgccgtactcggcctcataagcccggccattattattattaccgttatcgccggggctttgcaatcaattaaaaataataaaatttcagttgccgtcttcaccggcctccgtcccgccgccgcggggcttctaagcgcagcggggcttggcgtgtggagactcgccctgtataacgctgacaacggggcgtggcatgaaataatccgctggcgcgaaggtattgtctgccttgtgattttcctgcttatcgtaaaattcaaaggccaccccgtaatatacattgcgttaggtgcaatcgccggcatagcgcttggactgtaa

SEQ ID NO: 26140 - protein, 191 aa, Unknown
  Obtained from environmental sample
  DOMAIN (2)...(191): Chromate transporter
  misc_feature (1)..(191): Xaa is any amino acid
MMGLFLLYIEFFKIGVFAVGGGLATLPFLFLMANDRFTFIRQTGWLSAEQLGNFIAIAQCSPGAVGLNISAQTGFQYGGISGGIIAVLGLISPAIIIITVIAGALQSIKNNKISVAVFTGLRPAAAGLLSAAGLGVWRLALYNADNGAWHEIIRWREGIVCLVIFLLIVKFKGHPVIYIALGAIAGIALGL

SEQ ID NO: 26141 - DNA, 756 bp, Unknown
  Obtained from environmental sample
  misc_feature (1)..(756): n is a, c, g, or t
gtgtaccgcatggagctgcttggcgcgaaggttcatccggtaacatcagggacgcagacgctcaaagacgcggtgaatgaaaccatgcgggaatgggtcagccgtgtccacgatacccactacgtgcttggctctgtcatggggcctcatccctttcccatgattgtgcgcgattttcagagcgtgatcagcagggaggcaagggagcaaattctggcgaaagaaggaaaactgccctcggcggtgattgcctgtgtgggtggcggcagcaacgccatgggtgttttttacaattttattcccgacacaacagtacggctcatcggctgcgaagccgctggcctgggagtggatacggaaaaacacgccgcctcaatcgccaggggctctgtgggcatcttccacggaatgaagtcctacttttgccagaacgaagaggggcaaatcgcgccggtgtattcgatttcggcagggcttgattacccgggcatcgggcctgaacacgcctggcttaatgacacgaagcgcgccgaatatgtgccaattaccgatgaagaggctgtccgcggctttgagtatcttgcccggaccgaaggcattatctgcgcgatagaaagcgcccacgccgttgcccacgcgcaaaaaatcgcccacagtttcggcaaagacgaaagcgtcatcatttgcctttcgggcaggggtgacaaagatgtcgcggcaattgcccgctacagggggaaaacaatagatgagtaa

SEQ ID NO: 26142 - protein, 251 aa, Unknown
  Obtained from environmental sample
  DOMAIN (1)...(233): Pyridoxal-phosphate dependent enzyme
  misc_feature (1)..(251): Xaa is any amino acid
MYRMELLGAKVHPVTSGTQTLKDAVNETMREWVSRVHDTHYVLGSVMGPHPFPMIVRDFQSVISREAREQILAKEGKLPSAVIACVGGGSNAMGVFYNFIPDTTVRLIGCEAAGLGVDTEKHAASIARGSVGIFHGMKSYFCQNEEGQIAPVYSISAGLDYPGIGPEHAWLNDTKRAEYVPITDEEAVRGFEYLARTEGIICAIESAHAVAHAQKIAHSFGKDESVIICLSGRGDKDVAAIARYRGKTIDE

SEQ ID NO: 26143 - DNA, 441 bp, Unknown
  Obtained from environmental sample
  misc_feature (1)..(441): n is a, c, g, or t
atggggggcggtatgccctctatgggaggtatgcagatgccgatgggcgcaatgggaatgggtatgggaatggccatgccgggtatgcaaggaatgcagggtatggcaggtttgggcggccctacaaatgttcaggctgttcagttccccaatttgatgccgcacgccaatcctcaggaagcgggcaacatcagcctgataatggacgtctacatggagatgaccgttgaattgggccgcaccaaaaagctcatcaaggagatcctgagcatgggagagggcacgatcatcgagttggacaagttggccggcgagcctgttgatattttggtaaaccataaactcatagcaaagggcgaagttgtagtaattgatgaaaatttcggtgtccgcgttaccgaaatcgtttctccgcttgaaagaatgaacgatatgacctaa

SEQ ID NO: 26144 - protein, 146 aa, Unknown
  Obtained from environmental sample
  DOMAIN (63)...(139): Surface presentation of antigens (SPOA) protein
  misc_feature (1)..(146): Xaa is any amino acid
MGGGMPSMGGMQMPMGAMGMGMGMAMPGMQGMQGMAGLGGPTNVQAVQFPNLMPHANPQEAGNISLIMDVYMEMTVELGRTKKLIKEILSMGEGTIIELDKLAGEPVDILVNHKLIAKGEVVVIDENFGVRVTEIVSPLERMNDMT

SEQ ID NO: 26145 - DNA, 675 bp, Unknown
  Obtained from environmental sample
  misc_feature (1)..(675): n is a, c, g, or t
ttgtgcgccgttgccgttctgtttatcgcagccttgctggcttttagcgtcatggtacatataaagtacctgcccaatcccttcaacccccgcggcgacaggcagggggcggctcccctgacgcgcgaggaaaggcttgatcccgtccagacaggcggcgcttaccgctatgaattcacgggcagggtacaggctgtcgaaacctacgaaagggccctcgcgttgttttccgcctaccgcgacgaggccgccagggttaacattaaccgcatactggaatcaaacgccgcggaaagcctgaaaaacagggcgcgcgtgattctttcttttatggaaacgcccacatttgacacatttaaaagatcagataacgcggagtttgctgacgtggaaaaggatccggctttatatcagggcgtccatgtaatatggaagggaaggcccgcgaatttaaacatgtcagacagggagaccaccttcgatttgctgattgattacgatcccgacaggaacataaatgttattaaaggaatgcccgttgttacgtttaaccgcgctatacccctggaccagggaaagcagcttgaagtgctgggccgtattatgccccccggcgctgatggcagaattaatcttgagggcattgccatacaccagtcggggaaattggaatag

SEQ ID NO: 26146 - protein, 224 aa, Unknown
  Obtained from environmental sample
  SIGNAL (1)...(19)
  misc_feature (1)..(224): Xaa is any amino acid
MCAVAVLFIAALLAFSVMVHIKYLPNPFNPRGDRQGAAPLTREERLDPVQTGGAYRYEFTGRVQAVETYERALALFSAYRDEAARVNINRILESNAAESLKNRARVILSFMETPTFDTFKRSDNAEFADVEKDPALYQGVHVIWKGRPANLNMSDRETTFDLLIDYDPDRNINVIKGMPVVTFNRAIPLDQGKQLEVLGRIMPPGADGRINLEGIAIHQSGKLE

SEQ ID NO: 26147 - DNA, 369 bp, Unknown
  Obtained from environmental sample
  misc_feature (1)..(369): n is a, c, g, or t
atgataaccggtacatcagctgcaggagccgcagccggtatgaatattaatcaattaactgatgtttttaacgaatcggtaggagagatagttcagacaattgtgaataatggttattcacaaactcaggagtttgacgcagacaataccgcattgagtcttttagcctctgccggttatagtccgtccggacttattgatatgctgagggaattgagagctgttcaaagcggcagttccggaggctttaacaagacacatccaactcctgcgcagcgtattaccaacgcggaaaagtctgtaaacaagtacagtgtaactgatacccgctcgtacagacaggcgcggtttggttcagctaccagataa

SEQ ID NO: 26148 - protein, 122 aa, Unknown
  Obtained from environmental sample
  misc_feature (1)..(122): Xaa is any amino acid
MITGTSAAGAAAGMNINQLTDVFNESVGEIVQTIVNNGYSQTQEFDADNTALSLLASAGYSPSGLIDMLRELRAVQSGSSGGFNKTHPTPAQRITNAEKSVNKYSVTDTRSYRQARFGSATR

SEQ ID NO: 26149 - DNA, 567 bp, Unknown
  Obtained from environmental sample
  misc_feature (1)..(567): n is a, c, g, or t
ttggaggcttaccgtgcaaaggaaatgnaagtcttgataatggttgacgaaattgacgatattgtaattcccactctgcacagttaccgtaaagaaactccgggcgcggacgggaaaacagaaagtcagagttgggagctgaaagcggtaaaccgcgccggcgctgacgaagagttaggtgaaaagaaagacaagaccgcagaaaaagaagcgaaacccatcattgaaaaattaaaaaaagcgcttggcgaccgcgtaaaggaagttaaactttcccgccgcctgcatgactcgccgtcatgcatcgtagcggacgaaaacgatccgtcaatgcagatggcgcagatgcttaaagcaatgggacagaccgccatgaccgacattaagccgattttggaagtgaatggggaacacccaatcgttacgggacttaaggatgttgacgatgaagagcgcattgccgatgttgcgggagtgttacttgatcaagcgcttcttgtagaagggataaagttgaataatccggctgacttcgtgaagcggttgaacagactgttgtcaaaatag

SEQ ID NO: 26150 - protein, 188 aa, Unknown
  Obtained from environmental sample
  misc_feature (1)..(188): Xaa is any amino acid
MEAYRAKEMXVLIMVDEIDDIVIPTLHSYRKETPGADGKTESQSWELKAVNRAGADEELGEKKDKTAEKEAKPIIEKLKKALGDRVKEVKLSRRLHDSPSCIVADENDPSMQMAQMLKAMGQTAMTDIKPILEVNGEHPIVTGLKDVDDEERIADVAGVLLDQALLVEGIKLNNPADFVKRLNRLLSK

SEQ ID NO: 26151 - DNA, 729 bp, Unknown
  Obtained from environmental sample
  misc_feature (1)..(729): n is a, c, g, or t
atgagcgacattactggtgaagggccattttctgtaacgatgtgggattttcaggctaatggcggcggcagcgatactgttacatttatgataaaaggactcatccccaacaccgaatactattttataccaggattcgaccctgatgattttggtggtggttttgatactattgcagttaaagataaacaaggtacatctaatactgccggaactgtaattgtttcttattcatccgccgatcttaccctttcaggggccactttgtggggacgagaaggcaaggtatgttatgcattagaaagaaattttattggggataccctgtcaaaacagtactataagatgataagtgcaacttatacgctcactgcccctggtgattttgactatgataataatgcaaatctgccagagcctgaaccaatgacatcattagatgcctcaacatttctgtcatcgctcaagcttggggtaaatatttcaagttcgtttgattcatgcccaattgatgatgagaatttcagcgaaacagcctggggaaatcctgttataaagcaagcgttattaaacggaattgccgccgccggatttgaaatagtgcgacttccggttacatggataggttttatcggaagcgcaccagattataaagtagataaaagccgtttgagccgtgttgctgaagttgtaaaaatggttcacaatgcaggtcttaaaataatttga

SEQ ID NO: 26152 - protein, 242 aa, Unknown
  Obtained from environmental sample
  misc_feature (1)..(242): Xaa is any amino acid
MSDITGEGPFSVTMWDFQANGGGSDTVTFMIKGLIPNTEYYFIPGFDPDDFGGGFDTIAVKDKQGTSNTAGTVIVSYSSADLTLSGATLWGREGKVCYALERNFIGDTLSKQYYKMISATYTLTAPGDFDYDNNANLPEPEPMTSLDASTFLSSLKLGVNISSSFDSCPIDDENFSETAWGNPVIKQALLNGIAAAGFEIVRLPVTWIGFIGSAPDYKVDKSRLSRVAEVVKMVHNAGLKII

SEQ ID NO: 26153 - DNA, 699 bp, Unknown
  Obtained from environmental sample
  misc_feature (1)..(699): n is a, c, g, or t
gtgatagacgtgcttgacgaccggaaggcggaaacggtagaaacatggattaagacgcagaaaagcatcgatttaagcgaattggagagcatttccatggatatgtgggatccatatataaaagcggtacgagcggcggttcccgaagcggaccagaagatagcgtttgaccggtttcatgtgagcaagcatataaacgaggcattggacaaagtacgcaggagagaacacaacgctattatgaaacagatgggtgaaagccctttaagcaaaagccggtttcagtggcttataaattcgaaccggactgataaccggagcgggaagaggaaagcatttttaagcctgtcgcggctcaatctggagacggcgagggcatggaggataaaggaggccgctaacagcctatgggaatatgtgtacatgaatgttgcggatgcggcgtggaagaagctgctgtggtggataagccactgccgtatacctgaaatgatccaggctggcaagaccatacaaaattatttctggggaattctaaatgcaatacggcttaaggtaacaaatggaatgctcgaagctaagaacaacagcatccagcagattaagcgaatggcgtgtggatttagaaatccgcaaaggtttaaaaacgcaatcctctttcatttgggtaaattagacctttttccttccaccatatag

SEQ ID NO: 26154 - protein, 232 aa, Unknown
  Obtained from environmental sample
  DOMAIN (1)...(76): Transposase
  misc_feature (1)..(232): Xaa is any amino acid
MIDVLDDRKAETVETWIKTQKSIDLSELESISMDMWDPYIKAVRAAVPEADQKIAFDRFHVSKHINEALDKVRRREHNAIMKQMGESPLSKSRFQWLINSNRTDNRSGKRKAFLSLSRLNLETARAWRIKEAANSLWEYVYMNVADAAWKKLLWWISHCRIPEMIQAGKTIQNYFWGILNAIRLKVTNGMLEAKNNSIQQIKRMACGFRNPQRFKNAILFHLGKLDLFPSTI

SEQ ID NO: 26155 - DNA, 1380 bp, Unknown
  Obtained from environmental sample
  misc_feature (1)..(1380): n is a, c, g, or t
gtgtcgttcggctcgctgcccacgccgtatcagcagccgcccgtgcagaccgttatcataactaatataggtaccgagcctatccagttggatccgctgccgtcgaacgacgaatacgagctgggtccgttgatgaaggaggtcaacggcgtgcctgtgccttccgacgggcttttgacgaacggggccaaggtgacgtttaccatccgtccggtggctgatttgccggagggtgtatacagtaacgctatcgttatctccggcagcaacggcgcgttcgcgacgatatcgccgtggtttgaggtagcgaagccgctgaccttcgcactcggcgtgtcgccgcttacgaccttcggccacgtattttcgacgccgtacacggtaccggcgcagcagatcgtgaccataaccaacgtcggcaccggcccgatcaaggacttggagttgtcgccgtcgaataattacaatataagcgcgctgtcgacgaggaatctcggcgccaacggaagcacggcgacctttaccatccgtcccaaagcgaatttgccgataggcaattacgacgagaatataacgatcagcggtttgggcaaggtggtcggcgacagcgtcgtggacgtgagcgtggtgataaaaccgacctttaccgtggcgcctgttcgcacgatcaacgccgcgataccgttggaaccgaacggcgacttcggcgagttggacgaggggtacgagctgccggaggtgcagatcgtagtaatcacgaacacctgcgacagcgtagtaaccctgacgcagcctacgtcggttgattacatgataggcacgttgtccaagtttactctgcggcataacggcgatacggcgagcttcaccgtgcgtcccaagtcggatttggagcccgggcttcacgacgaggatataatagtggcgtgcggtcccggcggcgcgagcgtgacggtgccggtgctgttcagtgtggccgggaatccgcggtacgagatctccgcgtcgcggacgcaggttccgttcggttctctgagggcgccgtacacgcgtccggcggcgcagacggtcgtcatcaccaacatggcctccaacgccgtgttgctgaatgatccgcccgagtcggagaattacgagatcacgttgtcgacgaatagtctgccggcgcgcgggtcgaaggctactctgaccatccgtccgaaggcgggtttggatatcggcaatcacgacgaggagatagtgatagagggaaccggcgacgcctcggttgttgtgaccgcgtccttcagcgtgacatcgccgtcggtcttcgcgataacgttcaatccgatgggcggcgttgtaaatccgacgtcggcgacgacgggaacgggaagatag

SEQ ID NO: 26156 - protein, 459 aa, Unknown
  Obtained from environmental sample
  misc_feature (1)..(459): Xaa is any amino acid
MSFGSLPTPYQQPPVQTVIITNIGTEPIQLDPLPSNDEYELGPLMKEVNGVPVPSDGLLTNGAKVTFTIRPVADLPEGVYSNAIVISGSNGAFATISPWFEVAKPLTFALGVSPLTTFGHVFSTPYTVPAQQIVTITNVGTGPIKDLELSPSNNYNISALSTRNLGANGSTATFTIRPKANLPIGNYDENITISGLGKVVGDSVVDVSVVIKPTFTVAPVRTINAAIPLEPNGDFGELDEGYELPEVQIVVITNTCDSVVTLTQPTSVDYMIGTLSKFTLRHNGDTASFTVRPKSDLEPGLHDEDIIVACGPGGASVTVPVLFSVAGNPRYEISASRTQVPFGSLRAPYTRPAAQTVVITNMASNAVLLNDPPESENYEITLSTNSLPARGSKATLTIRPKAGLDIGNHDEEIVIEGTGDASVVVTASFSVTSPSVFAITFNPMGGVVNPTSATTGTGR

SEQ ID NO: 26157 - DNA, 633 bp, Unknown
  Obtained from environmental sample
  misc_feature (1)..(633): n is a, c, g, or t
ttggaacaaagcatctcatgggttcaaaggtggatcgaggaggcaaataccagcattcaggtggaagatgattttgcctttaaatacttttacgacccgccggataaacttgttaattcagggcgcatacttttcacattcatggacagttccagtttttttacgctaagcgaagaacggcggacaaacctggatttccgctggattgccgcaaacgacaggatccccctggatgaaggcggtgtctactacggtattcacaaaaaaacaaaagccctaaaagccgccaaagcctttacaaagtggttctttatggctgaaacccaaaagctgcttctggagacggcaaaaatcagccggctgaacgaatcgtcgtttggcatagccggagggttttcggccatgagaaccgtaacagaacaggttttccccctgttttacccgaaccttttgggccggatgcccccggagagttatctttcgccccccaatatactgccaagaaactggacggccattaaagagcgggtaatactcccgtatttgcgcgacagaatccgccataccaccagggaagaagtaaggtcactggaacgacgcatcagcgattggtacaggttgaatagggattag

SEQ ID NO: 26158 - protein, 210 aa, Unknown
  Obtained from environmental sample
  misc_feature (1)..(210): Xaa is any amino acid
MEQSISWVQRWIEEANTSIQVEDDFAFKYFYDPPDKLVNSGRILFTFMDSSSFFTLSEERRTNLDFRWIAANDRIPLDEGGVYYGIHKKTKALKAAKAFTKWFFMAETQKLLLETAKISRLNESSFGIAGGFSAMRTVTEQVFPLFYPNLLGRMPPESYLSPPNILPRNWTAIKERVILPYLRDRIRHTTREEVRSLERRISDWYRLNRD

SEQ ID NO: 26159 - DNA, 432 bp, Unknown
  Obtained from environmental sample
  misc_feature (1)..(432): n is a, c, g, or t
gtgttaaaagcgtggtttcccggcctgtcaaaggcgatgggggtgtttataccacttattgttgttaattgtattatcatgggccgagtggaaggctttgcgtcaaaacgccccttgcgcgattgtctggccgattccctgggcatgggcctgggctatacctgggtgcttgccggcatcgccctggtccgcgagcttttgggcaacggcacgattttgaattatcaggtgatgcctttaaactacaaaccggttcttttctttatattgccgcctgggggcttctttgttttcgccctgtttatagctcttaatatctatatcaagtcgcggttaaaagatccttccaaagctgacgaggatgggggctttggctgctgcaagcctaatgattgcgccggttgtggcgcggatgcgggggggaagaaatga

SEQ ID NO: 26160 - protein, 143 aa, Unknown
  Obtained from environmental sample
  DOMAIN (1)...(103): Rnf-Nqr subunit, membrane protein
  misc_feature (1)..(143): Xaa is any amino acid
MLKAWFPGLSKAMGVFIPLIVVNCIIMGRVEGFASKRPLRDCLADSLGMGLGYTWVLAGIALVRELLGNGTILNYQVMPLNYKPVLFFILPPGGFFVFALFIALNIYIKSRLKDPSKADEDGGFGCCKPNDCAGCGADAGGKK

SEQ ID NO: 26161 - DNA, 618 bp, Unknown
  Obtained from environmental sample
  misc_feature (1)..(618): n is a, c, g, or t
ttgcgccggttgtggcgcggatgcgggggggaagaaatgaacctttttaaaatattcctcgcggcgtttttaattgacaatgtcgtgttaatgcgttttatcgcgctctgcccctttatcggcatgagcaccgacgaggacaaatccgtcgggatggggctggcagttgtttttgtgacggttatagccacagccgttacctggccgatttaccgttttatccttgaaccgctggggcttgtgttccttcaattgctggtttttatcctggtaatcgcctccctcgttcagcttgtggagtattttttaaaaaaatccgtacccggcctgtacaagggcatggggatatacctcgccttaattacgactaactgcggcatactcgcggttacgctggacgtgataaacaatacctngcgtttttaccggcaagccctatacgtttatcgaatccattgtctacgctatcggcgtggcccttggatttttgctttcaatgctgttattggcgggtatacggaaccggctcaggacgagccctgttccggcttttctaaaagggacgcccgtgctttttgtcgccacggcccttctttcaatcgcctttatgggttttaa

SEQ ID NO: 26162 - protein, 205 aa, Unknown
  Obtained from environmental sample
  DOMAIN (12)...(174): Rnf-Nqr subunit, membrane protein
  misc_feature (1)..(205): Xaa is any amino acid
MRRLWRGCGGEEMNLFKIFLAAFLIDNVVLMRFIALCPFIGMSTDEDKSVGMGLAVVFVTVIATAVTWPIYRFILEPLGLVFLQLLVFILVIASLVQLVEYFLKKSVPGLYKGMGIYLALITTNCGILAVTLDVINNTXRFYRQALYVYRIHCLRYRRGPWIFAFNAVIGGYTEPAQDEPCSGFSKRDARAFCRHGPSFNRLYGF

SEQ ID NO: 26163 - DNA, 444 bp, Unknown
  Obtained from environmental sample
  misc_feature (1)..(444): n is a, c, g, or t
atgattatcatatttatcaccgcgatcttcgcgcttgccatagcttttgttcttggaaccgctctgggttttttcaaggatttctttgccgtgccgcaggatccccttgtgggcaaaattcgcgaagccctgcccggggcaaactgcggagcctgcggttttcccggctgtgaaaattacgctattgccatagcaggcgggaacgccggcataagttcctgctcggtcggcggtcccgccgttgttgaaaaactcacccaaatcaccggcaaggcgggagaagcggcgaagccggctgttacggttctctgctgccagggttcatacattcacaccccgcanaagggaatatacacaggtattaaaaactgccggggcgcanaaatggcgacgggcggaaccaagctctgnntcttcggctgtcttggttcggcgattgcgtga

SEQ ID NO: 26164 - protein, 147 aa, Unknown
  Obtained from environmental sample
  SIGNAL (1)...(19)
  DOMAIN (43)...(77): Putative Fe-S cluster
  misc_feature (1)..(147): Xaa is any amino acid
MIIIFITAIFALAIAFVLGTALGFFKDFFAVPQDPLVGKIREALPGANCGACGFPGCENYAIAIAGGNAGISSCSVGGPAVVEKLTQITGKAGEAAKPAVTVLCCQGSYIHTPXKGIYTGIKNCRGAXMATGGTKLXXFGCLGSAIA

SEQ ID NO: 26165 - DNA, 582 bp, Unknown
  Obtained from environmental sample
  misc_feature (1)..(582): n is a, c, g, or t
ttgcctttttgtgagcggagccgatgcctacggggttttgaaattgagagcggcgcgcacagagtgcagcgagtgccagaaaccgaatctcagggaagggtgcatacctcggcggcaacggtggcggttatgccggaagcagaggaagttgatgttgaaattagaaatgaggatttaaaagtggatgtgtacagagcgagcggcgcgggcgggcaatacataaacaaaacggattcagcggttcgcataacgcatatcccaagcggcgtggtggtggcttgccaaacggaacgcagccaaattcaaaaccgttcaaaagctatggaacttctgcgttcccgccttttagaccatgccatttcagaaaagcaaaaaaaggaagcagccgagagaaagagcctcgttggcaccggcgaccgcagcgacaaaatccgcacttacaattttccccagaacagggttacagaccaccgcataaatttgaccctttataatttagatagaataatagccggagatttacaggaaatcatagatgctttgcatttagcggatgcgcagagcaagttgggtagccaatga

SEQ ID NO: 26166 - protein, 193 aa, Unknown
  Obtained from environmental sample
  DOMAIN (45)...(158): Peptidyl-tRNA hydrolase domain
  misc_feature (1)..(193): Xaa is any amino acid
MPFCERSRCLRGFEIESGAHRVQRVPETESQGRVHTSAATVAVMPEAEEVDVEIRNEDLKVDVYRASGAGGQYINKTDSAVRITHIPSGVVVACQTERSQIQNRSKAMELLRSRLLDHAISEKQKKEAAERKSLVGTGDRSDKIRTYNFPQNRVTDHRINLTLYNLDRIIAGDLQEIIDALHLADAQSKLGSQ

SEQ ID NO: 26167 - DNA, 726 bp, Unknown
  Obtained from environmental sample
  misc_feature (1)..(726): n is a, c, g, or t
ttggttcaaatgaacccgcagccggagcaaaaggaaattgagcgccgttacggtgaaggcagcgggcgcgattacctggcttacgagcttgtcaatgaaaaagcttttttggatcttgcgctccttgccctgaaagactccggttttgaagagctggaagaaaagctcttgtctcacaacaaggcgcgggttttggacgtaggctgcgcaacaggcagtctccttgccgcgctccgcctaaggggctgggaaacagccggagtagaaatcagcgggcctcaggcggaatacggaagactaaaaaggaaccttgatctgcgtaacgggagacttgaagaaattcgctttcccgatgaatattttagcgtggtaattgcatctcatcttattgagcacttaaacgatcccgcgtcctttgtcggggaggtttaccgtatcctcgcgtcagaagggcatttttttgttaccacacctaacattgccggctttcaggcctggcttttcaagggccggtggcgctcggcaattttcgatcatctttaccttttttcagttaaaacgcttacacggctattaaaagagaaaggctttgccatcgaaaaaatttccacctgggggggccttgcaaagggcgccgtcccggaaaaggtaaagcgtttatttgataaagcggccaaacgtttcggctttggagacgtaatgataataagggcggtaaaacaatga

SEQ ID NO: 26168 - protein, 241 aa, Unknown
  Obtained from environmental sample
  DOMAIN (49)...(185): Methionine biosynthesis protein MetW
  misc_feature (1)..(241): Xaa is any amino acid
MVQMNPQPEQKEIERRYGEGSGRDYLAYELVNEKAFLDLALLALKDSGFEELEEKLLSHNKARVLDVGCATGSLLAALRLRGWETAGVEISGPQAEYGRLKRNLDLRNGRLEEIRFPDEYFSVVIASHLIEHLNDPASFVGEVYRILASEGHFFVTTPNIAGFQAWLFKGRWRSAIFDHLYLFSVKTLTRLLKEKGFAIEKISTWGGLAKGAVPEKVKRLFDKAAKRFGFGDVMIIRAVKQ

SEQ ID NO: 26169 - DNA, 414 bp, Unknown
  Obtained from environmental sample
  misc_feature (1)..(414): n is a, c, g, or t
gtgtccgcaagacattcaccttttgcggcggaactggaaccgggttcagcaaagcccaggcaactcccgccaaggcgcaacatggctgcttcaaatgaaagcctggttcgcgtacttggctcaaagaataaagttgccaaaacgtttccccggcactgctccttaaatgacgccggttttttctcaatttctccggcccgctcaaaaagcgcctccatttcctccctggaaaaatcaagaggctcgattaaatgtcgtcccttcagcatagtccctcccgaaaaaaaaccgcccctttgggcggttaaaaaagctacatcaaaaccattaccttcatcgggcacttgccaacgcaagccccgcagcctgtgcattttgcgttatccacaaccggaattccgtttgccattctaa

SEQ ID NO: 26170 - protein, 137 aa, Unknown
  Obtained from environmental sample
  misc_feature (1)..(137): Xaa is any amino acid
MSARHSPFAAELEPGSAKPRQLPPRRNMAASNESLVRVLGSKNKVAKTFPRHCSLNDAGFFSISPARSKSASISSLEKSRGSIKCRPFSIVPPEKKPPLWAVKKATSKPLPSSGTCQRKPRSLCILRYPQPEFRLPF

SEQ ID NO: 26171 - DNA, 504 bp, Unknown
  Obtained from environmental sample
  misc_feature (1)..(504): n is a, c, g, or t
atggtggcggttgtggctgcccggggtacccatgaaactacgcccttaaaaggggagtatatcggtgtaaagagctgtagggccgctaaaatttccaccggtagcatcaagctctgttcctggggttgccagggttttggcgactgcacaaaagtatgtaaatttggcgcaatcacaataggcgaagacgggctgccccatattgatgccgggcgatgcacgggctgcagggcctgcgccaatgaatgtccccagcacatcatctgggtaatccccagggatctaaaaggttcccgcccccaatgctccaatttaaacgttaataaagcaaaggtagccaaaaactgcaagcatggctgtattaaatgcgagctttgcgtaaaaaattgccctgaacaatgtattagaatggcaaacggaattccggttgtggataacgcaaaatgcacaggctgcggggcttgcgttggcaagtgcccgatgaaggtaatggttttgatgtag

SEQ ID NO: 26172 - protein, 167 aa, Unknown
  Obtained from environmental sample
  DOMAIN (142)...(165): 4Fe-4S binding domain
  misc_feature (1)..(167): Xaa is any amino acid
MVAVVAARGTHETTPLKGEYIGVKSCRAAKISTGSIKLCSWGCQGFGDCTKVCKFGAITIGEDGLPHIDAGRCTGCRACANECPQHIIWVIPRDLKGSRPQCSNLNVNKAKVAKNCKHGCIKCELCVKNCPEQCIRMANGIPVVDNAKCTGCGACVGKCPMKVMVLM

SEQ ID NO: 26173 - DNA, 339 bp, Unknown
  Obtained from environmental sample
  misc_feature (1)..(339): n is a, c, g, or t
atgcccttacacgcagacataatatcaaaaatagtccaaagccttataggtttgaatatctataaggttatcctatttggttcctatgcaagaggcacagcaacagaagacagtgatatagatttgcttgtgattttagatacagaagaatttgcaaaaacctttaaagatagaatgaacagaaatttgaccgtttcaaacgctttattggatataaacagagaatttgcaatggatattattgtttattcgcacggcgaatttgaatatttggataaaaaagaaagcgattttattaaagaaataaaaagtacaggcgttgagatttatgccaaatga

SEQ ID NO: 26174 - protein, 112 aa, Unknown
  Obtained from environmental sample
  DOMAIN (1)...(109): Nucleotidyltransferase domain
  misc_feature (1)..(112): Xaa is any amino acid
MPLHADIISKIVQSLIGLNIYKVILFGSYARGTATEDSDIDLLVILDTEEFAKTFKDRMNRNLTVSNALLDINREFAMDIIVYSHGEFEYLDKKESDFIKEIKSTGVEIYAK

SEQ ID NO: 26175 - DNA, 459 bp, Unknown
  Obtained from environmental sample
  misc_feature (1)..(459): n is a, c, g, or t
ttgagatttatgccaaatgaaaaagccaaacaaaatccttggctattctttgcagataatgacctagcccttgccgaagtggctatagataatctccaatttacggggcaagttgcttttctttgccagcaagcaattgaaaaatacttgaaagcatttttatttgaaaataaagttcaaataaaaaagatacatgatcttgaaaaattatattcagaagttaggaaaataaaagatttcggcatagatgagaatttactgcaaattttaaggaatttatatgtagaatctcgttaccctacagacattgcttttttagaaaatggacttttacctacaaaagaagatgctcaaagctacctagattttgctaaaaaagtagcaagtattattaaagaagaaatatccaccaatcgggaaaatcctttatcgggnagaatcagggttctgacaatttaa

SEQ ID NO: 26176 - protein, 152 aa, Unknown
  Obtained from environmental sample
  DOMAIN (11)...(134): HEPN domain
  misc_feature (1)..(152): Xaa is any amino acid
MRFMPNEKAKQNPWLFFADNDLALAEVAIDNLQFTGQVAFLCQQAIEKYLKAFLFENKVQIKKIHDLEKLYSEVRKIKDFGIDENLLQILRNLYVESRYPTDIAFLENGLLPTKEDAQSYLDFAKKVASIIKEEISTNRENPLSGRIRVLTI

SEQ ID NO: 26177 - DNA, 699 bp, Unknown
  Obtained from environmental sample
  misc_feature (1)..(699): n is a, c, g, or t
atgacaagcggagaaatgataccaatagaaagcccaagcaaactccccgatgcaagccgctacgaccacatagaagaaccctatattaaagcgcaaattttcacaccaaaagattacgttggtccccttatgcagctcgcagaagaaaaacgcggaacgtttggcacaatggaatacttagacgaaaacaaggttattttgcactatgaactgccgcttgcagaagttatgtttgatttttacgatagattaaaatccgtaagcaggggctatgctgggcttgattatgaacaagcaggctaccgcgaaaaccctctgattaaattggatatacttttgaatggcgaccccgttgatgctttttccgttattattcacagagaaaaagcccagcactacgcgcacgctatttgcgtaaaattaaaagacctaattcctcgccaacaatttgatgttgcaattcagggcgcaattggcggcaaaataataagccgcacaaccgttaaagcggttcgcaaagacgtgttagcaaaatgctatggcggcgatataacccgcaagcgcaaactattggaaaagcagaaagaaggcaaaaagcgaatgaagaatataggttccgttgaggttccgcanaaagcattcctagctgtgctttcgctctccagcccaagtgggcagagcggcgatgacgatgattga

SEQ ID NO: 26178 - protein, 232 aa, Unknown
  Obtained from environmental sample
  DOMAIN (23)...(112): Elongation factor G C-terminus
  misc_feature (1)..(232): Xaa is any amino acid
MTSGEMIPIESPSKLPDASRYDHIEEPYIKAQIFTPKDYVGPLMQLAEEKRGTFGTMEYLDENKVILHYELPLAEVMFDFYDRLKSVSRGYAGLDYEQAGYRENPLIKLDILLNGDPVDAFSVIIHREKAQHYAHAICVKLKDLIPRQQFDVAIQGAIGGKIISRTTVKAVRKDVLAKCYGGDITRKRKLLEKQKEGKKRMKNIGSVEVPXKAFLAVLSLSSPSGQSGDDDD

SEQ ID NO: 26179 - DNA, 981 bp, Unknown
  Obtained from environmental sample
  misc_feature (1)..(981): n is a, c, g, or t
atgtgggattttttaaagaaattttttattttcagcatgtttgtcaacgcgattaacaggctgccgccgcttcgcactttcatcatggatttgatttatccggagtcggtcaggtttaatcatccaaaagacaaattggctcacgccgatcttggtctaccggaaaaaaacattcccttgataacaaggggatcatcatcttatccggtatctctgaatcagacggcattgaagttaatcgatccggcgaacattacgccgtcgcttgttttaaacgcaaatgagattaacaccatgcgttctctcggtttggaacagcagcagcagttgatagacagaaatatcgacaagctgcgaaagattgtccgaaagacaaccgaagcgatggcgatccagtccatcaccggaaaaatcgagtacgatatccgcaatgccgacggcactatggatgtatacaaggttgattttggtacgccgaaaacagttcctattgcaaagaaatggaacgctgccggcacaaatgttggcgacattaccgcgtcagtgggtcaaattcttgatagccttggcgaaacgtcagacggttcggacatcgtttatctttgcggattcgacgtttattccgcgcttgtcgcaaaatcaggcgaacaaaaaaacagcgacctcatcaaagtctttgaaaatcatgttcagataggaactgcgaagttcattatctgctctgcaaagtattacagctacaaggaaaaaacaactaagaaagcgattcctgctaaatcagtcgtcgccatagcgaaagacgattccttcagcttagcgtactgcgcgcttgattcggctgacgcaaatttcgcgtcactcgcgttttatataaacgcggtgaagcagaatgatccggaagccatgaagcttatcggtcaatcgcgacccatgccgattccgaacgtagacgcaatcagaatcgcgcaggtattggaataa

SEQ ID NO: 26180 - protein, 326 aa, Unknown
  Obtained from environmental sample
  misc_feature (1)..(326): Xaa is any amino acid
MWDFLKKFFIFSMFVNAINRLPPLRTFIMDLIYPESVRFNHPKDKLAHADLGLPEKNIPLITRGSSSYPVSLNQTALKLIDPANITPSLVLNANEINTMRSLGLEQQQQLIDRNIDKLRKIVRKTTEAMAIQSITGKIEYDIRNADGTMDVYKVDFGTPKTVPIAKKWNAAGTNVGDITASVGQILDSLGETSDGSDIVYLCGFDVYSALVAKSGEQKNSDLIKVFENHVQIGTAKFIICSAKYYSYKEKTTKKAIPAKSVVAIAKDDSFSLAYCALDSADANFASLAFYINAVKQNDPEAMKLIGQSRPMPIPNVDAIRIAQVLE

SEQ ID NO: 26181 - DNA, 525 bp, Unknown
  Obtained from environmental sample
  misc_feature (1)..(525): n is a, c, g, or t
ttgcttatctgcgcgagataccctgattatgacgcgaaacgcgatgatcccattcaagagaaaaattttgcgggcatgcaaacgcttgtgggcatggtgcgtactattcgcagcgaatgcgggataacgccggaaaaaaaactgcgggttcttgtccgtaccgcgggtgtacaggcgcaagtctttaatcaaaactgtgatttaattaaactgctggcaggcattggggatttaagcgttgagggcgccaaagaagacaaaccttcaggctccatagggcttgcgggtcccggatttgaagtttttgtctttgtcgccgaagccgttgacacatgcgcgttaaagaaaaaactttcaggcgatcttgaaagagacaacaaatatatcgaaggattgcgcgccaaactggcaaacgaacagtttgtaaagaacgcgcctgaaactttagtagcggaacaaagaagcaaacttgaggaaacgcttctgcgtacggaaaaacttaagctttatctgaaggatttataa

SEQ ID NO: 26182 - protein, 174 aa, Unknown
  Obtained from environmental sample
  misc_feature (1)..(174): Xaa is any amino acid
MLICARYPDYDAKRDDPIQEKNFAGMQTLVGMVRTIRSECGITPEKKLRVLVRTAGVQAQVFNQNCDLIKLLAGIGDLSVEGAKEDKPSGSIGLAGPGFEVFVFVAEAVDTCALKKKLSGDLERDNKYIEGLRAKLANEQFVKNAPETLVAEQRSKLEETLLRTEKLKLYLKDL

SEQ ID NO: 26183 - DNA, 444 bp, Unknown
  Obtained from environmental sample
  misc_feature (1)..(444): n is a, c, g, or t
atggcaaagtggaaaaaagccgctcatgtagtgtaccagtgtagttatcacctggtatggacaccaaaatatagatatcggatattgcaaggggaaataaaagattatgtggaaaagaaaatcagagcgatctgcgaatggaaacgtgtagagatacaggaaataacgataatgcccgatcatgtccacatggtagcgataataccaccgaagctggctgtagccgaattgatgggaataatgaaggggaaaacggcgatagccgtttttcaacaccgaaaaaaccttcgaacaaaaccatactggggaaaccatttttggagccgcggctactgtgtcacgacggttgggatagatgaagaaaagatacgaaggtacgtaaagtatcaggaagacgccgagcggctcagcgaagaccacgaactacaagaaggcctcttttag

SEQ ID NO: 26184 - protein, 147 aa, Unknown
  Obtained from environmental sample
  DOMAIN (19)...(123): Transposase IS200 like
  misc_feature (1)..(147): Xaa is any amino acid
MAKWKKAAHVVYQCSYHLVWTPKYRYRILQGEIKDYVEKKIRAICEWKRVEIQEITIMPDHVHMVAIIPPKLAVAELMGIMKGKTAIAVFQHRKNLRTKPYWGNHFWSRGYCVTTVGIDEEKIRRYVKYQEDAERLSEDHELQEGLF

SEQ ID NO: 26185 - DNA, 381 bp, Unknown
  Obtained from environmental sample
  misc_feature (1)..(381): n is a, c, g, or t
gtgtgcgagatgagcaaggctgaggcgtgggctgtgtttttccagtatttgacaaacgaggagaaaagggagaaaataaaagagataatagcccgagaggagggaatagcgatggcattaaacgcaatgttccagataacgagtaattatgaggaatactcccgccttacgaccgatctaaaaaaccaactcgactggcaggccagcatggtaggggccaaacgcgagggccgtgccgagggccgcgcagaaggtctttccaagggtcgagcggagaccagccttgaaattgcccggaagatgaaaaacgcgggacggccattaagcgaaattgcagaatttaccggactgccaccggaaacctttacaacagaaaaatga

SEQ ID NO: 26186 - protein, 126 aa, Unknown
  Obtained from environmental sample
  misc_feature (1)..(126): Xaa is any amino acid
MCEMSKAEAWAVFFQYLTNEEKREKIKEIIAREEGIAMALNAMFQITSNYEEYSRLTTDLKNQLDWQASMVGAKREGRAEGRAEGLSKGRAETSLEIARKMKNAGRPLSEIAEFTGLPPETFTTEK

SEQ ID NO: 26187 - DNA, 1401 bp, Unknown
  Obtained from environmental sample
  misc_feature (1)..(1401): n is a, c, g, or t
gtgatgttaggtataaaagcaaaatttctaaattccgacgattctacaatctcttttaatcacagcttccgccaggcgctgattgcgcttgtagtaccaattgcgctgcaaaacctcatctcggcagcggttaattcggcggatattgtcatgctgggcaaaataaaccagtccgcaatgtccagcgtatcgcttgccggacagataactttcgtcctgatgctattttattttgggttgtccaccggagcgggcattctcgctgcccaatattggggcaaaaaagacatggcggctatcaagcgggttctgagtattgcctgtatgttttcggtatctgtatcttttgtgttctttatagcctcaatcagttttccggctgttctaatgcggatttttaccaacgacgctgagctgattatgtatggggaaaaatatcagcggatagtttcgtttacctatctcgccatgtgcttatcgcagatgtatcttgccattgcgaaaagcacggaaaaagtgcgtttctgtgcggttgtcagttcaatgagcctgttattgaacatagcccttaacgctgtgagcatttttattttgtttcccaacgatcctgaaaaagccattatcggcgtggctgtggctaccgtcatcgcgcgaattttcgagcttgtgtgttgcatattacattccctgcggaataaaaatattcgttttagcctgccagtacgcgataatactcaaaaagtgctcttgtcagattatatacgctacacgagtccggtattggcaaattatgttgtttatggcggcgcgttagcggcaactatagtgatcatcggacatgtgagttcggatatggtagcggctaacgcaatcgccgatgtagtcaggaatttggcaattgttgtgtgcggcggtataggaagcggcggaagcgtccttgtagggaagtatctgggcagtggcgatataaaatcagctaaaaaagccggaaacaggatatatctatacgctttggtttttgggatgctggcgggaatcgcagtcttattgacaaggccgctggtattcagcatcgtcgatataaacgcaacagcgaaaggttatctggatacaatgcttaccgtttgcgctgtttactgtatcggcaaatcggtaaactcaacgataattggcgggatattctgcgccggtggcgacgccaaatttggtttctggtgcgatgtcatagtaatgtggggaattatcataccgctcggctttctatgcgcctttatatggaaggtgtctcctggtttattatatattgcgttgtgttctgatgaatttttcaaagcgcctgttgcattaatcaggtttcttaaataccgatggctaaagaatatcacaagggatttaacataa

SEQ ID NO: 26188 - protein, 466 aa, Unknown
  Obtained from environmental sample
  DOMAIN (259)...(421): MatE
  misc_feature (1)..(466): Xaa is any amino acid
MMLGIKAKFLNSDDSTISFNHSFRQALIALVVPIALQNLISAAVNSADIVMLGKINQSAMSSVSLAGQITFVLMLFYFGLSTGAGILAAQYWGKKDMAAIKRVLSIACMFSVSVSFVFFIASISFPAVLMRIFTNDAELIMYGEKYQRIVSFTYLAMCLSQMYLAIAKSTEKVRFCAVVSSMSLLLNIALNAVSIFILFPNDPEKAIIGVAVATVIARIFELVCCILHSLRNKNIRFSLPVRDNTQKVLLSDYIRYTSPVLANYVVYGGALAATIVIIGHVSSDMVAANAIADVVRNLAIVVCGGIGSGGSVLVGKYLGSGDIKSAKKAGNRIYLYALVFGMLAGIAVLLTRPLVFSIVDINATAKGYLDTMLTVCAVYCIGKSVNSTIIGGIFCAGGDAKFGFWCDVIVMWGIIIPLGFLCAFIWKVSPGLLYIALCSDEFFKAPVALIRFLKYRWLKNITRDLT

SEQ ID NO: 26189 - DNA, 723 bp, Unknown
  Obtained from environmental sample
  misc_feature (1)..(723): n is a, c, g, or t
atgacagatcgccgagtccgtgtacggaaggtctttaagccattttgtgctgaacatggcagtaccgaaagaagaagcctgatcgccgacctcctcgccgctgccggagactatgacggcctgcaaattgattttgaaaatatcccgcaaagggacggggaaccgtacctttcatttttgaaggaactcagggccggacttggaaataaaatgtttaccgtggcccttgccgcccgctcaaaaaaaatcgccgacgacgtgtatgactatgagaaaatcctgccgtttgtggaccgcatactggtaatggcctacgacgaacactggtcaggcagcgccgcgggctcaattgcgtcccttgcctggtgcaaaagggtcgcggactattcattgaaagttatcggaaaagaaaaactgattatggggctccccttttacggccgcggatgggcaaagccgagccattcgcaggcttatatatataccagcgttgaaagagtcatgaaagaaaacaacattaaaaacatacggcgtgaaaacggaataccggcgtttgattacgatgccacagtctcggttaaagtgtactatgaagacgagtattcgctgtcggcccgcatggagatgtatcggaacatgggcgtcaccgcgataggtttttggcggctaggccaggagacccccgcagtgtggccgctgttgaaactggggactggggactag

SEQ ID NO: 26190 - protein, 240 aa, Unknown
  Obtained from environmental sample
  DOMAIN (5)...(226): Glycosyl hydrolases family 18
  misc_feature (1)..(240): Xaa is any amino acid
MTDRRVRVRKVFKPFCAEHGSTERRSLIADLLAAAGDYDGLQIDFENIPQRDGEPYLSFLKELRAGLGNKMFTVALAARSKKIADDVYDYEKILPFVDRILVMAYDEHWSGSAAGSIASLAWCKRVADYSLKVIGKEKLIMGLPFYGRGWAKPSHSQAYIYTSVERVMKENNIKNIRRENGIPAFDYDATVSVKVYYEDEYSLSARMEMYRNMGVTAIGFWRLGQETPAVWPLLKLGTGD

SEQ ID NO: 26191 - DNA, 822 bp, Unknown
  Obtained from environmental sample
  misc_feature (1)..(822): n is a, c, g, or t
gtgtcggcggattccatgcaggtgtaccggggcatggatattggcacggcaaaaccttccccccaagagaggcaggcgcttccccatcatctcattgacatacgcaatccagacgagcagttcaccgccggggattttgtccgcttggcgagagaagcaattgacgatattagcggcaggggctgtatccccatagtcgcgggcggcacgggcttttacctgagaaaccttgttttgggtctgcccgaagccccgccttccgatcccctaatccgcaagacgcttaaaaacgagcttcatgaaaaaggcgccgccgcccttatggaggagcttgcccgttttgatccggtaagcgcgggaaaaatccacctgaatgacgaataccgcctgctgcgcgccatggaagtacagcgcctctgcaaaaggcctttaagctccttcagtatgacgggcagtgacagtacgcaaaaatacgattttcgaatcatcggcatttcccgccccagggaagaactgtaccaaaggatcaacgcccgctgcgccgccatgtttaaacagggcttgcctgacgaggtacgcagcttgtacgaagcgggatacacccctcgcgatccgggcttgcgtgcaatcggttaccgtgaattttttgtggaagatccgccggcttccggcgtttaccgtctctcgcaggatattgccggagtacaggaattagttgccatgaacagccgccgttacgccaagcgacagataacttttttctcttcgctgccgggagcggagtggataaatccaaatgaacaattatcaattaacaattaa

SEQ ID NO: 26192 - protein, 273 aa, Unknown
  Obtained from environmental sample
  DOMAIN (6)...(266): IPP transferase
  misc_feature (1)..(273): Xaa is any amino acid
MSADSMQVYRGMDIGTAKPSPQERQALPHHLIDIRNPDEQFTAGDFVRLAREAIDDISGRGCIPIVAGGTGFYLRNLVLGLPEAPPSDPLIRKTLKNELHEKGAAALMEELARFDPVSAGKIHLNDEYRLLRAMEVQRLCKRPLSSFSMTGSDSTQKYDFRIIGISRPREELYQRINARCAAMFKQGLPDEVRSLYEAGYTPRDPGLRAIGYREFFVEDPPASGVYRLSQDIAGVQELVAMNSRRYAKRQITFFSSLPGAEWINPNEQLSINN

SEQ ID NO: 26193 - DNA, 489 bp, Unknown
  Obtained from environmental sample
  misc_feature (1)..(489): n is a, c, g, or t
atggatacggatgccatcgtcaacgccgccaattcaagcctcatgggcggcggcggagtggacggggcaatacataaagcagccggaccggaactgcttgaagaatgtaaaaggatagcgagggacaggcgtggcatccccaacggcccctgccccacaggcgacgcggttattaccggagcggggcgcctcccctgcaaaaaggtgatacatacagtgggtccggtttggcgcggcggaagctccggtgaagcggaactgcttgcttcctgctaccaaaaaagcctcttgcttgccgaagaggccggcttaaaaagcatagcctttccgaatatcagcaccggtgtctacggataccccagggaaaaggcggcaagcgtcgcggtggaagcggtgcgtaaaacattggagcaaacgccgggcattgaaagggttgtctttgtctgttttgacgatgagaattacaggctttacagtgaaaggctatga

SEQ ID NO: 26194 - protein, 162 aa, Unknown
  Obtained from environmental sample
  DOMAIN (7)...(128): Appr-1-p processing enzyme family
  misc_feature (1)..(162): Xaa is any amino acid
MDTDAIVNAANSSLMGGGGVDGAIHKAAGPELLEECKRIARDRRGIPNGPCPTGDAVITGAGRLPCKKVIHTVGPVWRGGSSGEAELLASCYQKSLLLAEEAGLKSIAFPNISTGVYGYPREKAASVAVEAVRKTLEQTPGIERVVFVCFDDENYRLYSERL

SEQ ID NO: 26195 - DNA, 1125 bp, Unknown
  Obtained from environmental sample
  misc_feature (1)..(1125): n is a, c, g, or t
ttgactattgatgaatttgacagaatcattaacaatgaattcatgttgtccgccaaaagcgccatggagctgggcctggttgacagcgccggcagaagggaggcggtgcgggcggccgtcagggaaatttctgacggcaacgcggcgggaatgtctttactgtacggggacgcggaatcaagcttaacaggcagtaaatttccctataaattaaataaagcgggaagctcattttccaggccgcaggtaatagccgtgataaacgccaacggcgtaacagatatggagcggggcatggccgcgtggaccttatccaaaacaatcagggaactgtcagaaagaaggcgggtcagggcgattgtactgcggattaactccccgggcggaagcgccgaagccgcagactatgtggccgaagcggtaaaagccgccagagagcgggttccggtggtggtatccatgggatcagtcgccgcttccggcggttattgggcgagcatgaccgccagccacattgttgccgccccaatgactcttacaggttccataggcgttatcgcgagttggttctacgacaaaggccttaacagcaagctgggcctgtcggtcgacctcatgcagaggggggcccacgccgatatgaccagcggaatgatcctgccgcacagggatcttaggcccgaggaggaggcccgttacaaagagttcatactcgatctgtactcggggttcacccgcagggtcgcggcgaaccgcaatatggacattgggcgcgtggaagagcttgcccagggcagggtctattcggggcttggcgcgttaaacgcgggccttatcgacagcataggcggcattgacgacgctatcagcatcgcgagggaactggcaaacatacccgaggacagaagaatatccgtcgttgaatatcccaagccaaaattcttcgacaagatgctggaatacctgttcacgtcaaggggtaacagttcggcaaaaacatccgccatcgacgcggcggcggaacttttattccccgctccgtcaggagcgcttcagcttatggaagacctgcgcttcagaatggcgcataacggtcaggcgatgcccatactgccgctggattaa

SEQ ID NO: 26196 - protein, 374 aa, Unknown
  Obtained from environmental sample
  DOMAIN (142)...(299): Peptidase family S49
  misc_feature (1)..(374): Xaa is any amino acid
MTIDEFDRIINNEFMLSAKSAMELGLVDSAGRREAVRAAVREISDGNAAGMSLLYGDAESSLTGSKFPYKLNKAGSSFSRPQVIAVINANGVTDMERGMAAWTLSKTIRELSERRRVRAIVLRINSPGGSAEAADYVAEAVKAARERVPVVVSMGSVAASGGYWASMTASHIVAAPMTLTGSIGVIASWFYDKGLNSKLGLSVDLMQRGAHADMTSGMILPHRDLRPEEEARYKEFILDLYSGFTRRVAANRNMDIGRVEELAQGRVYSGLGALNAGLIDSIGGIDDAISIARELANIPEDRRISVVEYPKPKFFDKMLEYLFTSRGNSSAKTSAIDAAAELLFPAPSGALQLMEDLRFRMAHNGQAMPILPLD

SEQ ID NO: 26197 - DNA, 669 bp, Unknown
  Obtained from environmental sample
  misc_feature (1)..(669): n is a, c, g, or t
atgtcacaagctttttacagcaaatttgatcgtcactcaaatggcgagggcctaaagggcaacgccacacactactgcccagggtgcggccacggcttggtccacaaatatttggcagaagccatcgcagagcttggcctcaaggacgacaccgtgctagtcagccctgttggctgttctgttttcgcctactattacattgacgttggcaacacacaggccgcccacgggcgcgccgctgcggtcgccatcggacataaactggctaaccctgacgcaactgtgatagcctaccaaggcgatggagacctagcctccataggcctagccgaaaccatcgccgcagcccagctcggcacgccgatcacgatcattttcatcaacaacgccatctatgggatgaccggaggccagatggcccccaccactctgatggggcagcccacctcaacgagtccagagggcagaaaacagatcaacggccagccgataaagatggccgagcagatcgcgcttctggacggtgccatctatgtcgagagagtggcgcttttcagccccgccgaaagaactagggccaaaaaagccatcaaaaaggccatccagcttcaaaaagagggacgcggctacacattcgttgaagtgctggccgaatgtccaacccactaa

SEQ ID NO: 26198 - protein, 222 aa, Unknown
  Obtained from environmental sample
  DOMAIN (56)...(215): Thiamine pyrophosphate enzyme, C-terminal TPP binding domain
  misc_feature (1)..(222): Xaa is any amino acid
MSQAFYSKFDRHSNGEGLKGNATHYCPGCGHGLVHKYLAEAIAELGLKDDTVLVSPVGCSVFAYYYIDVGNTQAAHGRAAAVAIGHKLANPDATVIAYQGDGDLASIGLAETIAAAQLGTPITIIFINNAIYGMTGGQMAPTTLMGQPTSTSPEGRKQINGQPIKMAEQIALLDGAIYVERVALFSPAERTRAKKAIKKAIQLQKEGRGYTFVEVLAECPTH

SEQ ID NO: 26199 - DNA, 840 bp, Unknown
  Obtained from environmental sample
  misc_feature (1)..(840): n is a, c, g, or t
ttggcagcattgccaatatttttcggttttttttgcacagtagctaacattttaatctcctgtgagaaatatagaaaattttgctggaggttcagacaatttctatattcggtgtatatgacccccctgatgaaacaatactacgatgtgaaagcggctcacccgggttgcgtgttgttttttagaatgggagatttttacgaactctttgaaaacgatgcggttgtggcttcaaaaattctaggaataacgctcacaagccgcaacaatggtggcgcaaaagagcaggctctttgcggatttccctaccacgccgcagaacgatatgttcccaaaatgctctcggctggttatcgggtggcaatttgcgaacaaatggaagacccaaaactcgcaaaaggcatagtcaaaagagaggttgtggaagtaatatctgcgggaactagcttttccgaaaataatttggaggcaaaacaatccgcatatataatggcatttttcccaaacacggctcttgcaatagcagacataagcacaggttattttgccgttggggaatcttcaataacaaatattgaaagcgaaattgcaaggcgaagcccaaaggaaattcttgtgccaagcggtgcggaaatatccgcaaacattcaagcccttatcaaccacgacaaaataatgctcacggaactgccgagaaaacaatttgaacctgaattttgcaacagcgttttggaaaaacattttagaacacaaaacgaactctccaacctaagcatctccgcaagcggtgcattgctcttttatcttttggagcaaaaaaatctggactcagccacataa

SEQ ID NO: 26200 - protein, 279 aa, Unknown
  Obtained from environmental sample
  DOMAIN (161)...(279): MutS domain II
  misc_feature (1)..(279): Xaa is any amino acid
MAALPIFFGFFCTVANILISCEKYRKFCWRFRQFLYSVYMTPLMKQYYDVKAAHPGCVLFFRMGDFYELFENDAVVASKILGITLTSRNNGGAKEQALCGFPYHAAERYVPKMLSAGYRVAICEQMEDPKLAKGIVKREVVEVISAGTSFSENNLEAKQSAYIMAFFPNTALAIADISTGYFAVGESSITNIESEIARRSPKEILVPSGAEISANIQALINHDKIMLTELPRKQFEPEFCNSVLEKHFRTQNELSNLSISASGALLFYLLEQKNLDSAT

SEQ ID NO: 26201 - DNA, 768 bp, Unknown
  Obtained from environmental sample
  misc_feature (1)..(768): n is a, c, g, or t
ttgcctttgaatttgaaaaggcggataagccggaaccccaacacagccaaaatactaatatataacttgagcaaagaaacccccgacaaaatatctgtcgcggaaaaccattgtactttaaaggcgggatatgcagatgaaaccgtcacggccatctttttcggcgatgtcgtaaagggaacgcgaaagaaatcaggcacagaatatgtatcggaaattgaagtcaaggatggccgcgttgcagttcagtcagggcaagtttctgtctcgtatgaaaaaaatactgacgcgctgactattgttcaggaaatgattgatgccatcggaatgccgtcaaaagggacggagctaattccagcaggcgcaaaataccccggcgcattttccgatataggccaggccgccgatatcctgcgcgaagttctgaacaaatacgaactgaattacacgattcagaatgaaatgatttatatcctcaaagaaggagaagcttccgaatccacagggctgttattgactaccgagacagggcttcttactaccccgcagccggtatcggataagaccgaggagacggatacaacaaaagaggcggcgaatagatgggaatttaagacaatgcttttcccgcaattaattcccggagcggcgtgtaaagttgaatcgtctaccatcacaacggaaatgaaaattgcaacgtcaagattcaccggagataattggctgtccgattttgcaatcgatattgaagcggaggtattggcataa

SEQ ID NO: 26202 - protein, 255 aa, Unknown
  Obtained from environmental sample
  misc_feature (1)..(255): Xaa is any amino acid
MPLNLKRRISRNPNTAKILIYNLSKETPDKISVAENHCTLKAGYADETVTAIFFGDVVKGTRKKSGTEYVSEIEVKDGRVAVQSGQVSVSYEKNTDALTIVQEMIDAIGMPSKGTELIPAGAKYPGAFSDIGQAADILREVLNKYELNYTIQNEMIYILKEGEASESTGLLLTTETGLLTTPQPVSDKTEETDTTKEAANRWEFKTMLFPQLIPGAACKVESSTITTEMKIATSRFTGDNWLSDFAIDIEAEVLA

SEQ ID NO: 26203 - DNA, 867 bp, Unknown
  Obtained from environmental sample
  misc_feature (1)..(867): n is a, c, g, or t
atgtccgatgataaaaacaacgcaaattgcccgtgcaacggcagttgcgccgtaaaagccaagatccatcctaccgccatcattgaccccggcgctcaaatcggcgctaatgtcgccgtcggcccgtacgcagtcatagagagcgacgtggtaatcggcgacggctccgagatcggcccgcatgctatgatcggcaacggcacccgcctcggcgaacgttgccgcgtttttctcggcgccgccgtcggcctcgaaccgcaagacaaaaaatacgccggcgaaaagacgctgaccctcatcggcgacgacactctcattcgcgagtacgtgaccatcaaccgcggcaccagcgcgaccggcgcgacgcgcgtaggcgctcggggctggatcatggcctactgccacatcgcccacgattgcgtagtcggcgacgacgtgaccatctccaacgccctcgccatggccggccacgtgacggtcggcgaccacgtgaccatcgccggaatagtctccatcaaccaattctgccggataggcgaccacgctatggtcggagcgcgggcgcgggtctcatccgacatagtcccctacgccctgataggcaccgagccgctgcgggtcgtctccatcaataaaatcggcttggagagatgcggctntacgtcggaacagataaacaacctgaaacgcgcctacaaaatactcttccgcgacggactcccgctaaacgacgcgttagaaaaaatcgacaccgagtttccgggcgacgccgcgataaaaactctgactgattttgtgcgaggcagcgaaaaaggctttctgagaatggccacggaagcgcccaatgccccggccaacaatctatag

SEQ ID NO: 26204 - protein, 288 aa, Unknown
  Obtained from environmental sample
  misc_feature (1)..(288): Xaa is any amino acid
MSDDKNNANCPCNGSCAVKAKIHPTAIIDPGAQIGANVAVGPYAVIESDVVIGDGSEIGPHAMIGNGTRLGERCRVFLGAAVGLEPQDKKYAGEKTLTLIGDDTLIREYVTINRGTSATGATRVGARGWIMAYCHIAHDCVVGDDVTISNALAMAGHVTVGDHVTIAGIVSINQFCRIGDHAMVGARARVSSDIVPYALIGTEPLRVVSINKIGLERCGXTSEQINNLKRAYKILFRDGLPLNDALEKIDTEFPGDAAIKTLTDFVRGSEKGFLRMATEAPNAPANNL

SEQ ID NO: 26205 - DNA, 417 bp, Unknown
  Obtained from environmental sample
  misc_feature (1)..(417): n is a, c, g, or t
ttgccgcgtttttctcggcgccgccgtcggcctcgaaccgcaagacaaaaaatacgccggcgaaaagacgctgaccctcatcggcgacgacactctcattcgcgagtacgtgaccatcaaccgcggcaccagcgcgaccggcgcgacgcgcgtaggcgctcggggctggatcatggcctactgccacatcgcccacgattgcgtagtcggcgacgacgtgaccatctccaacgccctcgccatggccggccacgtgacggtcggcgaccacgtgaccatcgccggaatagtctccatcaaccaattctgccggataggcgaccacgctatggtcggagcgcgggcgcgggtctcatccgacatagtcccctacgccctgataggcaccgagccgctgcgggtcgtctccatcaataa

SEQ ID NO: 26206 - protein, 138 aa, Unknown
  Obtained from environmental sample
  misc_feature (1)..(138): Xaa is any amino acid
MPRFSRRRRRPRTARQKIRRRKDADPHRRRHSHSRVRDHQPRHQRDRRDARRRSGLDHGLLPHRPRLRSRRRRDHLQRPRHGRPRDGRRPRDHRRNSLHQPILPDRRPRYGRSAGAGLIRHSPLRPDRHRAAAGRLHQ

SEQ ID NO: 26207 - DNA, 1164 bp, Unknown
  Obtained from environmental sample
  misc_feature (1)..(1164): n is a, c, g, or t
ttggtcaatttttaccagttaaacatagattatcttaaccttgaacgcataaagcggattgtaggacttgtccgttatgtagactgggttggcttttcgcccgattcccagtctttaatgactaaatcggtcgctgaaattaccactaatgcaaaagccggcgttgatccgcttaccctcagtattataggtgaaagtctttctaaacttgctaaaaaaactgccaccgcaatggccaccttgaaggatcttaacacctactacagggaagattataaactcagtgtccgtctaaatataaccaaagatatgtccgccggtgaagctaccttggaaaacatcaagaaaaagatgcactctgggatgccgggggcgccattttataaagagttagtggatgaacttatcaaggaagattattccagtagcggtccggatcttagagagactgtattaaacaccttaaaggttgcggaaaccaagcaaaaagcggcaaaagcccccgttaattttaaaaacatccttcttgacggaattatcattattggcggcgcggcggctcaacttaccgaaatcagccaaaaattgaatgataaccaggcggtaatggacagccgtaaaaaatcattttttgagatgataaaggagttaatcaggcaaattacaaatgctgaaaaggaagaagttatctatactgtggactgtatggataataccaaaggcgctccggttaaggaaaaggtaaattttcatcaattgatggacgagatagataaaaaaatcaggattttaagcagttttgtccggggaccagcgtataataaactttccgccatgaccgaagagcagatcatcagctaccttgaaaagaatattaaagacgtgcaaagttatcacagaatcttaagcgctattgatgattattttaaaacaaatgtgcggcaggaagaacggcctaaaattaaaggaattaaacctgaattatccgctttaaagaatacttatataaagggcaaccagatgaggtatgaatacagcgctcaaaaagaagcggaagaacagatgaaacggcttggcgttacaacaggcgctcccgctcctgtaccgggggccgctcccgcctcaggcgcagcccaggccgctccgccggccccttcggcataa

SEQ ID NO: 26208 - protein, 387 aa, Unknown
  Obtained from environmental sample
  misc_feature (1)..(387): Xaa is any amino acid
MVNFYQLNIDYLNLERIKRIVGLVRYVDWVGFSPDSQSLMTKSVAEITTNAKAGVDPLTLSIIGESLSKLAKKTATAMATLKDLNTYYREDYKLSVRLNITKDMSAGEATLENIKKKMHSGMPGAPFYKELVDELIKEDYSSSGPDLRETVLNTLKVAETKQKAAKAPVNFKNILLDGIIIIGGAAAQLTEISQKLNDNQAVMDSRKKSFFEMIKELIRQITNAEKEEVIYTVDCMDNTKGAPVKEKVNFHQLMDEIDKKIRILSSFVRGPAYNKLSAMTEEQIISYLEKNIKDVQSYHRILSAIDDYFKTNVRQEERPKIKGIKPELSALKNTYIKGNQMRYEYSAQKEAEEQMKRLGVTTGAPAPVPGAAPASGAAQAAPPAPSA

SEQ ID NO: 26209 - DNA, 594 bp, Unknown
  Obtained from environmental sample
  misc_feature (1)..(594): n is a, c, g, or t
atgcttgaaacaaaggcgattacattgttgcgggagtcgggggccatgctggaggggcattttcttctgacatccggccgccattcaaaccgttactttcaatgcgccaaactgctggagtacccggacaaagcggcaatagcccttgcggaagtggcgcggaaaatcagggccgatttggatgccggaaagcttgaactggacgcggttgtggggcccgctatagggggcattatcgtagcctatgagttgggcaggcagttggggcttccggccttttttaccgaacgggacgattcgggagcgatgatcctgcgccggggttttgaagttaagcccggccaaaaactgctcattgccgaggatgtggttactacagggaaatcttccggggaatgtgccgcggcggtacaggctcagggggcgtcaatcgcggccctggcctgcattgtggaccgccgggccggcggggaagttatggaatggcccatgtacaaggcgatcaccgtgcaggcggaaaattgggatgcggataactgcgcgctctgtaaaaaaggtattccggcggtcaagccgggctccagaaaagtttga

SEQ ID NO: 26210 - protein, 197 aa, Unknown
  Obtained from environmental sample
  DOMAIN (34)...(160): Phosphoribosyl transferase domain
  misc_feature (1)..(197): Xaa is any amino acid
MLETKAITLLRESGAMLEGHFLLTSGRHSNRYFQCAKLLEYPDKAAIALAEVARKIRADLDAGKLELDAVVGPAIGGIIVAYELGRQLGLPAFFTERDDSGAMILRRGFEVKPGQKLLIAEDVVTTGKSSGECAAAVQAQGASIAALACIVDRRAGGEVMEWPMYKAITVQAENWDADNCALCKKGIPAVKPGSRKV

SEQ ID NO: 26211 - DNA, 636 bp, Unknown
  Obtained from environmental sample
  misc_feature (1)..(636): n is a, c, g, or t
atggcccccgactcccgcaacaatgtaatcgcctttgtttcaagcatggtttattatggtaaaatctataacgatgaaaatcaaccgtacagaccgggaacaacgcgtatgaaactcctccttcatgtgtgctgcgctccctgttcggtggcgtgtatcgccgccctgcaaaaagaagggatagaggcgtccctctactggtacaacccgaacatccatccccgcgcggaatatgtaaaacgcagggacgctttggttcagtatgcccaaagccttggcgtatcccctattatggaagatgaatacgggttgcggcagtttatcgccgccttgccggaggcggaagaggaacgagggaactcagcgctttcccgctttgacgctcccgttcgctgcgcctcctgttaccgtttacgaatggaaagaaccgcccggacggcgaaagaaaaaggctttgacgccttttgtaccacgctctttatcagcccttaccagaaccatgaactgcttgcggagcaggcggaagcggcggcacaacaatacgatgtaacctttctttacagggatttcaggccccttttccgggaaggccgggcggaggcccggcggctgggcctttacatgcaaaagtactaa

SEQ ID NO: 26212 - protein, 211 aa, Unknown
  Obtained from environmental sample
  DOMAIN (39)...(211): Uncharacterized BCR, COG1636
  misc_feature (1)..(211): Xaa is any amino acid
MAPDSRNNVIAFVSSMVYYGKIYNDENQPYRPGTTRMKLLLHVCCAPCSVACIAALQKEGIEASLYWYNPNIHPRAEYVKRRDALVQYAQSLGVSPIMEDEYGLRQFIAALPEAEEERGNSALSRFDAPVRCASCYRLRMERTARTAKEKGFDAFCTTLFISPYQNHELLAEQAEAAAQQYDVTFLYRDFRPLFREGRAEARRLGLYMQKY

SEQ ID NO: 26213 - DNA, 741 bp, Unknown
  Obtained from environmental sample
  misc_feature (1)..(741): n is a, c, g, or t
gtggactatctcttgatttcagccgccgatgctaatggttgggatagtgtgctgcaagatgccaagaaagcgggcgttaaagtattcctgtttgaccgtatgatcaatactgatccgagcaattatgaggccgctgtcatttccgatatggaaaaccagggtaaaaatgccgtcgcatggctgaagtcattaaaccttcccgcttacaatatcatccacattcaaggtcagattggctccgccgcccagattggcagaacaaaacctcttgatgaagcggttaaagccagtcccaatacatggaagatagtgcgccgcggtactggcggtgacacatggagccccgatgaagcgaagaaaattgtagaagccgccatcgcagcaaaagaaaattttaacatcatttatgccgaaaacgacggtatggccgaaggcgcgatgaaagcgcttcaggcggccggcaagacctatggcgttaagggagatgtcaagatcatgggctttgactgcaacaagttcgcccttaggtatgtccttaaaggtgactggaactttgacggtcaatgcagtcctttccaagcggacaaaattcatgaatttatacagaaactccagtccggtcaatctctgggccttaccaacaaagttgttatcaatccggagacatactttgccaatcccaatcccggtggaaaggttattacccaggcggacattgacaagtacggtctcggtgactaa

SEQ ID NO: 26214 - protein, 246 aa, Unknown
  Obtained from environmental sample
  misc_feature (1)..(246): Xaa is any amino acid
MDYLLISAADANGWDSVLQDAKKAGVKVFLFDRMINTDPSNYEAAVISDMENQGKNAVAWLKSLNLPAYNIIHIQGQIGSAAQIGRTKPLDEAVKASPNTWKIVRRGTGGDTWSPDEAKKIVEAAIAAKENFNIIYAENDGMAEGAMKALQAAGKTYGVKGDVKIMGFDCNKFALRYVLKGDWNFDGQCSPFQADKIHEFIQKLQSGQSLGLTNKVVINPETYFANPNPGGKVITQADIDKYGLGD

SEQ ID NO: 26215 - DNA, 522 bp, Unknown
  Obtained from environmental sample
  misc_feature (1)..(522): n is a, c, g, or t
atgaagaataaaattggctatctgccggnggatcgcaaaaacgacggcatcattgccgatttgtcggtgcgggataatattattcttgcattgcaagttatgaaaggcttttttaagcccttttccagacttgaggcaaaagcttttgccgacgaatatataaagatgttggggatcaaaaccccttccataaataccccgatcaaatccctttcgggaggaaaccagcaaaaggtcattgtcgcccgatggctgttaacgcacccggaataccttatattggacgaacccacacgtggcatagacgtaggcacaaaggtggagatacaaaagcttgtattgaaactcgccgaagaaggtatgagcattacttttatctcgtcagaaattgaagaaatggtgcgcacttgttcgcgactcatcgtcatgcgggacagaaacattgtgggcgaactacgcggcggcgaagtcacgcaggataacattatgcacacgattgcaggggggagcggacgaaaatga

SEQ ID NO: 26216 - protein, 173 aa, Unknown
  Obtained from environmental sample
  DOMAIN (2)...(146): ABC transporter
  misc_feature (1)..(173): Xaa is any amino acid
MKNKIGYLPXDRKNDGIIADLSVRDNIILALQVMKGFFKPFSRLEAKAFADEYIKMLGIKTPSINTPIKSLSGGNQQKVIVARWLLTHPEYLILDEPTRGIDVGTKVEIQKLVLKLAEEGMSITFISSEIEEMVRTCSRLIVMRDRNIVGELRGGEVTQDNIMHTIAGGSGRK

SEQ ID NO: 26217 - DNA, 621 bp, Unknown
  Obtained from environmental sample
  misc_feature (1)..(621): n is a, c, g, or t
gtgcgtaccgtagtagccgaaaatccactgcgggagtcggtcaggaactccaatattattatggaaagagaatcgcataacgaagtggccgggtttggggaaggtctcgaagaggatattttaagttttacaaaccaatcaagttcaagttatgagccgattataaagggaagaaggcaacttgccgaagagatactcgctcgctcgcaacgtatggttcctgagtatggtattgagcttattgacgtagtaacgcggcaaataagttattcgcccgaattaacgccgagcgtttacgcccgtatgataagggaaagaaaccagatagctatggctttccgttcccaaggcgaagggcggaaagccgagtggttgggaagaatggacaatgataagcgttctattctttccgccgcttacactcaagcccaaactattatgggaaacgcggacgcgagagcgacgaggatttacgccgacgcgtataaccaggacagagacagacagattttttatgattactggagagcgattgaatcgtatcgtcagaccatgccgaaatttaacaaaacgcttacaacagacatggattatttccggtatctttactcgacaagatga

SEQ ID NO: 26218 - protein, 206 aa, Unknown
  Obtained from environmental sample
  misc_feature (1)..(206): Xaa is any amino acid
MRTVVAENPLRESVRNSNIIMERESHNEVAGFGEGLEEDILSFTNQSSSSYEPIIKGRRQLAEEILARSQRMVPEYGIELIDVVTRQISYSPELTPSVYARMIRERNQIAMAFRSQGEGRKAEWLGRMDNDKRSILSAAYTQAQTIMGNADARATRIYADAYNQDRDRQIFYDYWRAIESYRQTMPKFNKTLTTDMDYFRYLYSTR

SEQ ID NO: 26219 - DNA, 813 bp, Unknown
  Obtained from environmental sample
  misc_feature (1)..(813): n is a, c, g, or t
atgatcagatcggccgaggcatttttctttcagggtgatactatgcttttcccggcggatttctccgataccgacgttatcgaaggtacaggggttccttgtgaatttgccggagtttttgagaatactgaaatttttgaaatcccgtcaatagagcctgattctgcgtcttctgtaataactgtagtgtctgttttaaaagaagaaccgcttgaaaactggaaaggtattccttttcgccaggttctttcgatgttaagttcaggcgggaagctcccctatgccggagacatgatccgagcctgtcacattgcgcaatggcggcaggaatcacgtttttgcggaagctgcggcgctgaaaacatcaataatccggcggtagctgagcgtcattgccccaaatgcggaagaatcgagttcccgagaatttgccccgctgtcattgtcattattacagatgataacaacagaatccttcttgcacataacaaaaaattcaagacaggcatgtacagcctcattgcgggatttaacgaagcgggagaatctttggaagcgacagtagagcgggaaatttacgaagaaataaatattaaaataaaagatgtttcttatgtaagatcacagccatggccgtttcccaattcacttatgctgggttttaaagcgcgttatttatcgggaacaatccgtcctgacgatattgaaattgaagatgcggcgtggtttacaaaagacaatctgccgactcttccaggagaaggctctctttcccgctttttaattaatctttggcttaataattctttgtaa

SEQ ID NO: 26220 - protein, 270 aa, Unknown
  Obtained from environmental sample
  DOMAIN (143)...(267): NUDIX domain
  misc_feature (1)..(270): Xaa is any amino acid
MIRSAEAFFFQGDTMLFPADFSDTDVIEGTGVPCEFAGVFENTEIFEIPSIEPDSASSVITVVSVLKEEPLENWKGIPFRQVLSMLSSGGKLPYAGDMIRACHIAQWRQESRFCGSCGAENINNPAVAERHCPKCGRIEFPRICPAVIVIITDDNNRILLAHNKKFKTGMYSLIAGFNEAGESLEATVEREIYEEINIKIKDVSYVRSQPWPFPNSLMLGFKARYLSGTIRPDDIEIEDAAWFTKDNLPTLPGEGSLSRFLINLWLNNSL

SEQ ID NO: 26221 - DNA, 834 bp, Unknown
  Obtained from environmental sample
  misc_feature (1)..(834): n is a, c, g, or t
ttggaattcaaaggacttgaagccggtatttaccgcgtaaacaaagtagtcgaaggagagacaccgcttgatattctctgctcatcggaaaaaaagagcttggaacttcccgaaggttatgtgcaatatcaaccaaagcccagagaatacactctcaactcaatttctacaattatcaacgtagataccgccgtagaagatgttttttcttcgccatacgatcagacaaaagaacaattacatctggcgattgaaagtttgcgcgaacggcaggaaagccaactcatcaataacgatgattacggcttgttgaaaaatatttccgacaaccagcgcataagacccggaaacaaagccggttcacccatgcccgatgatttagacgaattactttcaaaagtgtggaaagagcccgcgttcttcttggcacacccgcgcgctatcgcggctttccagcgcgaatgcacgcgcaggggcgttccgccttcaaccacgtcgctctttggcggcaattttattctgtggcgcggtattccaattatcccgacagacaaactgtttgtggacggcttgaaaaacccaaagagcaagggcggaaaaaccaatattctgctggtgcgtaccggagaggcaaaacgcggagttgtcggcttgtaccagacaggcttgcagaatgaacaaggcagaggactttccgtgcgtttcaggggagtggacaacaagggactggcgtcatacctcctgtcgctgtactgctcggccgcaattctttcagatgacgccattgccgttcttgaggatgtggaagtaggtaactactatgattacacctaa

SEQ ID NO: 26222 - protein, 277 aa, Unknown
  Obtained from environmental sample
  misc_feature (1)..(277): Xaa is any amino acid
MEFKGLEAGIYRVNKVVEGETPLDILCSSEKKSLELPEGYVQYQPKPREYTLNSISTIINVDTAVEDVFSSPYDQTKEQLHLAIESLRERQESQLINNDDYGLLKNISDNQRIRPGNKAGSPMPDDLDELLSKVWKEPAFFLAHPRAIAAFQRECTRRGVPPSTTSLFGGNFILWRGIPIIPTDKLFVDGLKNPKSKGGKTNILLVRTGEAKRGVVGLYQTGLQNEQGRGLSVRFRGVDNKGLASYLLSLYCSAAILSDDAIAVLEDVEVGNYYDYT

SEQ ID NO: 26223 - DNA, 792 bp, Unknown
  Obtained from environmental sample
  misc_feature (1)..(792): n is a, c, g, or t
gtggacgctacaataatcctgtatttctttgggcttttaggggtaaacggccccatgccgctggaatttaccagctatgtattccgccgttcccataaccattttgacaatacctggcggcgttttctggatataatcaaccaccgttttaccacgtttttctaccgttcttatgccgcgggccagcaggcgatgagctttgaccggtctgatgatgatccgttttccttcattattaaaaacctggccggattttccgccacgccgaatcatcaggaacggttaatcctgaaatcggccctccggttctctttcctcgcgaaaacccgccaggggctggaagatatgctgcgccgcctttttcattttcccattgagatccgcgattatatcccttcatcacgggatattccccatgaaagccgcgttattttggggaggaaaaacaacactctgggtctggatatgcagatagggagaacctatacaagcatcacggggaaatttgagatacgcataggccccatttcctatgaggattaccatgtttttatatccggccgcaacggctgccagttccttgtcgaggctgtctccctgtacatggaccggcccctgaactattcgatgctgtttattatccgccgggataccattcctccggcgcgcctgggctttgatctggctgagggccgctgggacgccgcccggctgggttatacctgctggattggcactgctaaagaaaaatttacgacgctgagtaggaataggggaaagagcaatgagtaa

SEQ ID NO: 26224 - protein, 263 aa, Unknown
  Obtained from environmental sample
  DOMAIN (1)...(246): Protein of unknown function (DUF1305)
  misc_feature (1)..(263): Xaa is any amino acid
MDATIILYFFGLLGVNGPMPLEFTSYVFRRSHNHFDNTWRRFLDIINHRFTTFFYRSYAAGQQAMSFDRSDDDPFSFIIKNLAGFSATPNHQERLILKSALRFSFLAKTRQGLEDMLRRLFHFPIEIRDYIPSSRDIPHESRVILGRKNNTLGLDMQIGRTYTSITGKFEIRIGPISYEDYHVFISGRNGCQFLVEAVSLYMDRPLNYSMLFIIRRDTIPPARLGFDLAEGRWDAARLGYTCWIGTAKEKFTTLSRNRGKSNE

SEQ ID NO: 26225 - DNA, 720 bp, Unknown
  Obtained from environmental sample
  misc_feature (1)..(720): n is a, c, g, or t
gtgtcgcgcacgcgtatgataccggagggcagcgatgcgatatcgcccgcgccgcatcacgacatatattccattgaagatttgcgtcagcttgtattttcgttaaaggaagccacggattataaaaaacctgtaattgttaaaatcgcggctgttcacaacgttaccgccattgccagcggcatagccaggagcggggcggatataatcgccatagacggctttcgcggcggcaccggcgcagcgcccacgcgcatacgcgacaatgtgggcataccgatagagcttgcacttgccggcgttgacaagcgcctgcgcgacgaggggattcgcgacaatgtttccattgtcgttggcggcagcatacgttccagcgccgatattgtaaaagccgtggcgctgggcgcggactgcgtatatatagcgacagcggcgctgatggcgctgggctgtcatctgtgcagaagctgtcattccgggaaatgcaactggggcatcgccacacagataccagagctggtcagacggcttaacccagacgttggatacaaacgcctggtaaatctgcttacggcgtggcagcatgaaattaaagaaatgatgggcggcatgggcattaattccattgagagtctgctgggaaaccggcttatgctgcgcggcgtcgggcttaatgaaaaagagcttgaaatattgggcatcaaacacgctggggagtga

SEQ ID NO: 26226 - protein, 239 aa, Unknown
  Obtained from environmental sample
  DOMAIN (1)...(207): Conserved region in glutamate synthase
  misc_feature (1)..(239): Xaa is any amino acid
MSRTRMIPEGSDAISPAPHHDIYSIEDLRQLVFSLKEATDYKKPVIVKIAAVHNVTAIASGIARSGADIIAIDGFRGGTGAAPTRIRDNVGIPIELALAGVDKRLRDEGIRDNVSIVVGGSIRSSADIVKAVALGADCVYIATAALMALGCHLCRSCHSGKCNWGIATQIPELVRRLNPDVGYKRLVNLLTAWQHEIKEMMGGMGINSIESLLGNRLMLRGVGLNEKELEILGIKHAGE

SEQ ID NO: 26227 - DNA, 888 bp, Unknown
  Obtained from environmental sample
  misc_feature (1)..(888): n is a, c, g, or t
atgatcagatcggccgagcggtttttctccgtattatttctgccggatttttcatgcggagttgggacttccattatggaatatgtcaggaacaggcggcttgcctatgccgcttccgaacttaattcaggacgaaaaatactcagcatagcggtagattacgggtttgaaacacattcggggttttcaaaagcgttccggcgttattttgggtgtccgccggagatataccgcgcttacgcgacattcgatgttccaaagatacccgatctgtcaaaatctaatcaatttatttccgaatttgttatagagccaaaaataatagcgaagaaaggatcttttaaggtagcgggtttcgcttttaaaataaaactgcccatacatatttcgtcctcggttccgcattatttagaccctcaaagccctgttattgatattgacgatggaagaaagccccttaataaacttcaggagctatgggaagaatgcagggctgacggaagactggaaaaattacacaaggaatcatttcttaaattccatgcggaatacggagcttgttttttcaaggataatgactctgaagaaaaatccgtatatcttatcggagtagaagcgaaatcaaaggtaaatattccgtttgggtatgatgtttatacgatacccgaagccttatttgcggttttctcaacgcctccgtctaatgaggattatttttcattaatacttaaaaatacctggaaatttattttttccgaatggtttcccaattcaggttatgaatttgacgataactcaattgcgtttgaactttacgatgaacgcagtatgggtgacactgataaagtttgtaatatatatattcctattgtaaacaggcagttgtga

SEQ ID NO: 26228 - protein, 295 aa, Unknown
  Obtained from environmental sample
  DOMAIN (142)...(291): Bacterial transcription activator, effector binding domain
  misc_feature (1)..(295): Xaa is any amino acid
MIRSAERFFSVLFLPDFSCGVGTSIMEYVRNRRLAYAASELNSGRKILSIAVDYGFETHSGFSKAFRRYFGCPPEIYRAYATFDVPKIPDLSKSNQFISEFVIEPKIIAKKGSFKVAGFAFKIKLPIHISSSVPHYLDPQSPVIDIDDGRKPLNKLQELWEECRADGRLEKLHKESFLKFHAEYGACFFKDNDSEEKSVYLIGVEAKSKVNIPFGYDVYTIPEALFAVFSTPPSNEDYFSLILKNTWKFIFSEWFPNSGYEFDDNSIAFELYDERSMGDTDKVCNIYIPIVNRQL

SEQ ID NO: 26229 - DNA, 885 bp, Unknown
  Obtained from environmental sample
  misc_feature (1)..(885): n is a, c, g, or t
ttgtttgagagcgttgtgtctatttttgggcaagaaagcaatcagacaacttggcgatggtgcaagatgaaccttgccttacgtgggatctacagttccgatgtgaaatggaataacgaaggttctttccttaacgatgctcatcccgatcttaaagcagattttgttattgccaatccgccgttcaatgacagcgactgggcaggcgatgtgctccatacggatggccgctggcagtacagccgtgaaacgccgccgccttcgggtaacgcaaactatgcatggatacagcacttcgtctatcatttgagccctaagggttctgccggatttgttcttgccaagggatcgctttcatcaaagacaaatggtgaagataaaattcgcaaggctctaattgacgaagggcttgtggattgtattgttaatttgccgaccaagctgtttctcaatacacagatacccgcttgcctatggtttctttgccgcgctaaggagagtgacaaaaaacacccgagacgtgataagattctgtttatcgacgcgcggaatatgggttcgctcatcagccgaagaacacgcgaactaaccgaaaaggatattcgcacaatagcggacacttaccatacatggaaatccggcaaaggttataatgatataccgggattttgcaagtccgcgcttgtcaccgaagtcgccgcccttgattatgtcctcacgccgggacggtatatcggcttacccgatgacgaagacgatttcgactttgcggaacgtgtgaaaactttgaccgcagaactggaagctcaaatgaaggaaagcgttttacttgacaagcgtatccgtgacaatctggcgaaagtgggaacggcaggtaatgaataa

SEQ ID NO: 26230 - protein, 294 aa, Unknown
  Obtained from environmental sample
  DOMAIN (1)...(253): N-6 DNA Methylase
  misc_feature (1)..(294): Xaa is any amino acid
MFESVVSIFGQESNQTTWRWCKMNLALRGIYSSDVKWNNEGSFLNDAHPDLKADFVIANPPFNDSDWAGDVLHTDGRWQYSRETPPPSGNANYAWIQHFVYHLSPKGSAGFVLAKGSLSSKTNGEDKIRKALIDEGLVDCIVNLPTKLFLNTQIPACLWFLCRAKESDKKHPRRDKILFIDARNMGSLISRRTRELTEKDIRTIADTYHTWKSGKGYNDIPGFCKSALVTEVAALDYVLTPGRYIGLPDDEDDFDFAERVKTLTAELEAQMKESVLLDKRIRDNLAKVGTAGNE

SEQ ID NO: 26231 - DNA, 384 bp, Unknown
  Obtained from environmental sample
  misc_feature (1)..(384): n is a, c, g, or t
atgactttgaagcaaatttttattcgaaatctcaaggaattccgtaagagagaaggcatttcccaaatgaaactggctgagtattgcggcacttccgccagttatattggagaaattgagattggacggaaatttccttctacagagatgatagagaaaattgccaaaattttgagaattgaaccttacctttttttcaaaagcatgacagaacatagcgttttatctaacattgaaaatcaaaagcccagaatgtcatattcttcaaaaaagcaacttcaaaaacaagttaaatcctatattaagaaacagattaaccagtctacaagcaaaacattgaggcaaatccttagcaacgtaaatgagattatagaagaatattga

SEQ ID NO: 26232 - protein, 127 aa, Unknown
  Obtained from environmental sample
  DOMAIN (11)...(65): Helix-turn-helix
  misc_feature (1)..(127): Xaa is any amino acid
MTLKQIFIRNLKEFRKREGISQMKLAEYCGTSASYIGEIEIGRKFPSTEMIEKIAKILRIEPYLFFKSMTEHSVLSNIENQKPRMSYSSKKQLQKQVKSYIKKQINQSTSKTLRQILSNVNEIIEEY

SEQ ID NO: 26233 - DNA, 324 bp, Unknown
  Obtained from environmental sample
  misc_feature (1)..(324): n is a, c, g, or t
ttggacattcgtaatttttcagtttccgatctttttaaaaaatacaagcacgaatattccggcgccgatcttgaagccgtccttgtgcgcgcgaaactgcttgcggcaatggatgatcgcgtttttgtaaagcgcgaagacatggaagacgcaatgagcgactttgttccggcggcatacccgcatgaggtggaactgcaaaatcttgttgctgttttggaatgtacttcccgggaaatgatcccaaagcaattccaaaaactgccccgcagcaagattatcagcgacattcaggaactaaaagcgttacttggcgagagatag

SEQ ID NO: 26234 - protein, 107 aa, Unknown
  Obtained from environmental sample
  misc_feature (1)..(107): Xaa is any amino acid
MDIRNFSVSDLFKKYKHEYSGADLEAVLVRAKLLAAMDDRVFVKREDMEDAMSDFVPAAYPHEVELQNLVAVLECTSREMIPKQFQKLPRSKIISDIQELKALLGER

SEQ ID NO: 26235 - DNA, 762 bp, Unknown
  Obtained from environmental sample
  misc_feature (1)..(762): n is a, c, g, or t
gtgtgtggaacaagcggctacgaagaagcggcagcacagggcataatcgcaggcataaatgccgctttgaaaataaaaggcaaagaaccctttatactttcaagggcagagagctatattggtgttttgatagacgacatcacaggaatggaatggaacgaaccctaccgaatgtttactagccgagcggaatatcgtttatttttaagagcggataattcagagcaaaggctttgcgaaaaagcacacaaggcgggaatgttgagcggcgaggaatggaaaaattacgaggaagaaaagagcagggtagaggaggctagaaaatttttgagcgaaaattcaggagagccagagcaaatcgcacccattttggcagagagcggtcaagcatcggtagcggaaaagacaagatggatttcggtgttgaaaagaccgggagtgaaagcggaaaccttttttgaaatagcagctccgcacattcctttgacgagaaaagaaaaatggcatttgctttctgaagagctttacagcggtttttttgtaagggcaaaagaggaaatagcaaatttgcaaaaaatggcaaatctaaaaattccagaaaatattgactattcaaaaataagtgctttgagcattgaggcaaggcaaaaactaagtgcggcaaagccattgactttgggtgccgccgccaaagttgcgggggttagagcgggggatattgcggtgcttaggtttttattaaacacagacaaccgcatataa

SEQ ID NO: 26236 - protein, 253 aa, Unknown
  Obtained from environmental sample
  misc_feature (1)..(253): Xaa is any amino acid
MCGTSGYEEAAAQGIIAGINAALKIKGKEPFILSRAESYIGVLIDDITGMEWNEPYRMFTSRAEYRLFLRADNSEQRLCEKAHKAGMLSGEEWKNYEEEKSRVEEARKFLSENSGEPEQIAPILAESGQASVAEKTRWISVLKRPGVKAETFFEIAAPHIPLTRKEKWHLLSEELYSGFFVRAKEEIANLQKMANLKIPENIDYSKISALSIEARQKLSAAKPLTLGAAAKVAGVRAGDIAVLRFLLNTDNRI

SEQ ID NO: 26237 - DNA, 591 bp, Unknown
  Obtained from environmental sample
  misc_feature (1)..(591): n is a, c, g, or t
atggataaaaaaaaactaatctggaaagaagaaagccgcaaaaaaatttttgactgccgggtgttttccgtccgggaaagcgtctgcagggcgcctgacgatcaaaccggggttttctcggttatagaggcggcggactgggcaatagtggtgccggtgcttgaaaccccgccagaaaaaaagtttttaatggtttggcagtggcgtcacggctgtctggatttaagccttgagttccccggcggtgtttttgaacccggcgagaatcccgaggaagccgcgtccagggagcttcttgaggagaccggctacaaagcggggaaaatccgcaaactgggcgagttcagccccaacccggcgattatgtcaaataaagtgcatttttttctcgccgaagatcttgtcgacaccggcaagcagggccttgacgcggatgaatttgtggaagtggaagccgttgacgttgacgttgtatgcaaaggcatgggaaaaccgccgtatattcacgcgcttatgggaacggcgctggcgatgtacttaacaatgagcaatggaagagaagacctctgcgcctccgcgagctctgcgtga

SEQ ID NO: 26238 - protein, 196 aa, Unknown
  Obtained from environmental sample
  DOMAIN (47)...(174): NUDIX domain
  misc_feature (1)..(196): Xaa is any amino acid
MDKKKLIWKEESRKKIFDCRVFSVRESVCRAPDDQTGVFSVIEAADWAIVVPVLETPPEKKFLMVWQWRHGCLDLSLEFPGGVFEPGENPEEAASRELLEETGYKAGKIRKLGEFSPNPAIMSNKVHFFLAEDLVDTGKQGLDADEFVEVEAVDVDVVCKGMGKPPYIHALMGTALAMYLTMSNGREDLCASASSA

SEQ ID NO: 26239 - DNA, 669 bp, Unknown
  Obtained from environmental sample
  misc_feature (1)..(669): n is a, c, g, or t
atgaaaattttttacttgcntgagacaataaaggcccttgcttntgatatggacctaactctgtataccaacgacgaatacggccgctaccagatagacaaactggtagaaaaactgggacagttgaaaggcttttcttttgaggaaatgagtagccaggtaaaggaaaaacggaaggcctgggctttttcccacgagggaaaagaggcaagtctttccaacattctaacgggttacggaatcggcatggaagaaataattaagtggcgggaagagctttatgaaccggctctttttatcaaagaggatgaaaagctaaaagcggctttggaaaagttgtccggaaattttattttgggagtcgttacaaacaacccggttttggttgcccgcaaaacattggcggcgttgggcgtagaagcttatttccagtttataattgggctggatacctgcatgacctccaaaccccacaagttaccttttgaaaaattttcagagttttcccgctgtcctcttgaaacctgcgtttccgtcggtgaccgctacgatatagacttggacattccgctaagtatgggaatgggagggatactcgttaacggtgttgaagatgtatactgtcttccagaacttctttatagcaaggatgataatcatggcgtttga

SEQ ID NO: 26240 - protein, 222 aa, Unknown
  Obtained from environmental sample
  DOMAIN (10)...(203): haloacid dehalogenase-like hydrolase
  misc_feature (1)..(222): Xaa is any amino acid
MKIFYLXETIKALAXDMDLTLYTNDEYGRYQIDKLVEKLGQLKGFSFEEMSSQVKEKRKAWAFSHEGKEASLSNILTGYGIGMEEIIKWREELYEPALFIKEDEKLKAALEKLSGNFILGVVTNNPVLVARKTLAALGVEAYFQFIIGLDTCMTSKPHKLPFEKFSEFSRCPLETCVSVGDRYDIDLDIPLSMGMGGILVNGVEDVYCLPELLYSKDDNHGV

SEQ ID NO: 26241 - DNA, 945 bp, Unknown
  Obtained from environmental sample
  misc_feature (1)..(945): n is a, c, g, or t
atgcggaagcgcccaatacaacttaaagcctttggctcggtagaagaaatggtaaacagcggcgagattgacatagtgcttaacattacgccgccaaaattacactacgaagtggctcttaccgcgataaacgccggcaagcatgtatacaacgaaaaaccgatttgctcaaaacgggaagaagctgcgcagttgataaaaaccgccgcggaaaaaggagtgagactgggcggagcgccggatactttcatgggagccggtctccaaacctgccgcaaacttatcgacgacggctggattggcgcgcccgtagcggcgacggcggcaatgatgaaacgcggcccggaacattggcaccccgatccggaatttttctacaaagaaggcggcggcccgatgttcgacatgggaccgtactacataaccgcgctggtcagtcttttagggcctgtttccagagtttccggcagcgcaaaaattacttccccggttcgtactatcaaaaacaagcaacaatacggcgatattattaacgtggaagttcccacgcacattgccggcgtccttgacttcgcaagcggcgcggtcggcactattgtaacaagtttcgacgtacattcgcataccttgcccttcatagaaatttacggcaccgaaggcacgcttaaagtccccgatcccaacaccttcggcggccctgtaattgtcaggcgtttcaatgacgaagaatggtacaaaataccgctgttaaaggcgtatcctgaaaattccagaggactgggaattaccgacatggcggaagcaattgaagaaaaccgcccccaccgcgcctgtgccgagatggcttaccatgtactggacataatgcacggcatacatgacgcctcatctgccggaaagcacattaaactaaaaagcaaatgcaaacgccccgccgcgtgctaa

SEQ ID NO: 26242 - protein, 314 aa, Unknown
  Obtained from environmental sample
  DOMAIN (1)...(80): Oxidoreductase family, NAD-binding Rossmann fold
  misc_feature (1)..(314): Xaa is any amino acid
MRKRPIQLKAFGSVEEMVNSGEIDIVLNITPPKLHYEVALTAINAGKHVYNEKPICSKREEAAQLIKTAAEKGVRLGGAPDTFMGAGLQTCRKLIDDGWIGAPVAATAAMMKRGPEHWHPDPEFFYKEGGGPMFDMGPYYITALVSLLGPVSRVSGSAKITSPVRTIKNKQQYGDIINVEVPTHIAGVLDFASGAVGTIVTSFDVHSHTLPFIEIYGTEGTLKVPDPNTFGGPVIVRRFNDEEWYKIPLLKAYPENSRGLGITDMAEAIEENRPHRACAEMAYHVLDIMHGIHDASSAGKHIKLKSKCKRPAAC

SEQ ID NO: 26243 - DNA, 1209 bp, Unknown
  Obtained from environmental sample
  misc_feature (1)..(1209): n is a, c, g, or t
ttggcaattttctaccttaccaccatgactattggcagatttggcattcacggcgggcagtatattccagaaactttgatgaacgagattcagcatcttgagaaagtgtatttgcattacaaagaagataaggattttaatgcggaactcacatatcttttggataactatgccggacgaccctctttgctctattatgcggagaaaatgagccgagatttgagcggggcaaaggtttatttgaaaagagaagatttaaaccacaccggttcgcataaaataaacaatgtgctgggacaggttcttttggcaaagaaaatgggcaaaacccgcgttattgcagagacaggtgcagggcagcacggcgttgcttgtgcaacggcggcggctttgctagatttggaatgtgaaatttttatgggcaaggaagataccgagcggcaaaaattgaatgtttacagaatggaattattaggtgcaaaggtaaatgcagttgaaagtggaacccaaacattaaaagatgcagtgaacgaaacaatgcgggaatgggtttccagaatagcagacactcattatgtgcttggcacagttatgggacctcatccctttccgatgattgttagggattttcaaagcgttataagccgcgaagccagagcgcaaattttggaaaaagagggcaagctgccagcggcggttattgcttgcgtgggcggtggctcaaatgcaatgggaattttttatcattttatagaagacaaatccgtggagctgataggttgcgaagcggcagggcttggcattgaaacaggcaaacacgcagctacaataacaaaaggcgcaatcggaattttccacggaatgaaatcttatttttgccaagattcggaggggcaaatagctcctgtgtattcaatttctgctggcttggattacccaggcattggtccagaacacgcacatttgtacgatattggtagggcaaaatatgttcctgttacagacgaagaagctgttttggcttttgagtatttggctcgcacagaaggaattatcgctgccatagagagttctcacgccattgcttatgcgagaaaaatcgtgccgagtttgccaaaaacagaaagcgttattatttgcctttccggtcgcggtgacaaagatgttgcttcaatagcaaagtatagaggagttaatttgcatgagtaa

SEQ ID NO: 26244 - protein, 402 aa, Unknown
  Obtained from environmental sample
  DOMAIN (55)...(384): Pyridoxal-phosphate dependent enzyme
  misc_feature (1)..(402): Xaa is any amino acid
MAIFYLTTMTIGRFGIHGGQYIPETLMNEIQHLEKVYLHYKEDKDFNAELTYLLDNYAGRPSLLYYAEKMSRDLSGAKVYLKREDLNHTGSHKINNVLGQVLLAKKMGKTRVIAETGAGQHGVACATAAALLDLECEIFMGKEDTERQKLNVYRMELLGAKVNAVESGTQTLKDAVNETMREWVSRIADTHYVLGTVMGPHPFPMIVRDFQSVISREARAQILEKEGKLPAAVIACVGGGSNAMGIFYHFIEDKSVELIGCEAAGLGIETGKHAATITKGAIGIFHGMKSYFCQDSEGQIAPVYSISAGLDYPGIGPEHAHLYDIGRAKYVPVTDEEAVLAFEYLARTEGIIAAIESSHAIAYARKIVPSLPKTESVIICLSGRGDKDVASIAKYRGVNLHE

SEQ ID NO: 26245 - DNA, 573 bp, Unknown
  Obtained from environmental sample
  misc_feature (1)..(573): n is a, c, g, or t
atggaaatttccctgtacgaaaaagacgctgaggctttcagaacatatttgaacaaggcgcagaaaaaatggaaggaagaccgctatgaatttttatccaaacttacaaaacaggatgaaatccccaagccttgcaacgaacatctggaaacaatcttcgctttgctgacaggcttttcaacataccaatacaacttgagttatactgataatcttaacgtagaaatgataaaagatttccttttaaccaacgcggaaggcgattgcgtcgaattttccaattcgctcgctttgctcgggcggctcgcgggcattccgtcgcgtgttgttacaggttatcttgcggcggaagaactgcaaactcaggcgcaccttcgcggtcttgccaatctgcgaaccaagattccgtatttgcagcagttccctcttaataatttatttttggtaaccaatcttcacgcccattcatggacgcagttctacattcccgaattcggctggctggacttcgaggcgaccatgttcgctattcctccggaaggcgagggcgatttcagcacatgggacgtgtaa

SEQ ID NO: 26246 - protein, 190 aa, Unknown
  Obtained from environmental sample
  DOMAIN (84)...(173): Transglutaminase-like superfamily
  misc_feature (1)..(190): Xaa is any amino acid
MEISLYEKDAEAFRTYLNKAQKKWKEDRYEFLSKLTKQDEIPKPCNEHLETIFALLTGFSTYQYNLSYTDNLNVEMIKDFLLTNAEGDCVEFSNSLALLGRLAGIPSRVVTGYLAAEELQTQAHLRGLANLRTKIPYLQQFPLNNLFLVTNLHAHSWTQFYIPEFGWLDFEATMFAIPPEGEGDFSTWDV

SEQ ID NO: 26247 - DNA, 939 bp, Unknown
  Obtained from environmental sample
  misc_feature (1)..(939): n is a, c, g, or t
ttgacgggtatggcagggcacttcatacgcgtacaacgagttgggaaagtagcggaggtaatttttgccgacaacgcggcagaagactacgaatacgatcacatggggacctccagggaaatccgcgacgccgttgggatttcctggacaggggaatacgaccaggccggacgcttatcgaaagaaacaggacggcccggaatagacagggaatacaagtacgacgccataggccgaatagttgaagtgaaaagcggcggggaagttgtggagcgctatagctattcaaaccgcgggcgtgaagcggtgtttaccgatggggcaggaaaggattttaccctgcaaaagaatgcctttggagaacttacaggcgaggtaaaccggcttgctgacagtcagaggtatgcctacgacagcgaagggcggataacggcaaataccgcctattcaggcaagcagaccagggttgaataccgcgatgatgaagggataacaatcaccacttacagcgacggaaaacaaagcctcattgagcgggacatgctggggaacataatacgcgcggcaaatgagacaggaacgataaggtataagtacgatgcgggcgggaagttaatagaacaaaacgacgagggcgcaggggaaataactcgttacgtatataacaaatcaggacagcgtatcaggatgcaaagcggaaacagagatataatttacagatacggaaagaacggtgaacttttgaaggtaactgacaacagccagaggctggaagtaagctatgagtacgacagcaggggccgcgaaatcaggcgggtatacgggaacggtgtgcggcaggagaccctgtacgatcagatcggcagaaccagtctgattagggaaacagacttcaggggcgctctgcttcgcgccgagggctattctcggccgatctga

SEQ ID NO: 26248 - protein, 312 aa, Unknown
  Obtained from environmental sample
  DOMAIN (199)...(237): RHS Repeat
  misc_feature (1)..(312): Xaa is any amino acid
MTGMAGHFIRVQRVGKVAEVIFADNAAEDYEYDHMGTSREIRDAVGISWTGEYDQAGRLSKETGRPGIDREYKYDAIGRIVEVKSGGEVVERYSYSNRGREAVFTDGAGKDFTLQKNAFGELTGEVNRLADSQRYAYDSEGRITANTAYSGKQTRVEYRDDEGITITTYSDGKQSLIERDMLGNIIRAANETGTIRYKYDAGGKLIEQNDEGAGEITRYVYNKSGQRIRMQSGNRDIIYRYGKNGELLKVTDNSQRLEVSYEYDSRGREIRRVYGNGVRQETLYDQIGRTSLIRETDFRGALLRAEGYSRPI

SEQ ID NO: 26249 - DNA, 1092 bp, Unknown
  Obtained from environmental sample
  misc_feature (1)..(1092): n is a, c, g, or t
atggaaaccaatcaaaaagaagccgcaatctcaaataaatcctctttatcacgcgtctatcgatctataggatattttttttatcacctactgcgatcaaaagcgcttaaatatcaggtttggaagttaactagagtttataaaattttcaagtcttcaggtttaaatttgccgcgttatttcatggacgcgtcttacaaaaaatcattcgccgctaaaagaccaaccgatttcccaaattatctgtccgccgtagtaatagttaaaaatgaaacgttgtacattgaggaatggcttgaatatcatttattgatgggggttcaaaaattttatatttacgataacgaatcaaacgataatttaaatgagattctacagccgtacataaagagcggtattgtagaatataagtatttccccggtattgaaaagcagctcgccgcttacaacgatgttttgcagaaggccaaaaatgaaacatattggcttgcggccatagatattgacgagtttatagttccaataaaagatgagactatagccgattttttgagagattttgaacaatacgcgggggtggagataaattggttaatgtatggcagttccggtgaaagacattggagagacggacttgtaattgaaagatttaagtcgcacgggaaaataggcggagttttttacggcaggggcataataaaaacaatttgcaatccaagggctgtttttaagatggatgttcacgcgcctttttattttcgtttcgctaaaaccgtaaatccggataaaaagatacgaaagggtcattatgaaaatgtaatatcggtatatgacaaaataagaattaaccattacttcacaaaatcttatgatgaaaatctattgaaattcagaaggggtaaagcggataggaaaagcaaatacgacccgttgatttttgaatatggagatgtaaacgacgagtatgacgagataatggataaatatatcccgaaggtgtcggaaaacgtaaaaaaaagacgcgagcgaagagagttacctcaaacgcaaaaatcaacaccgatatcgacatcacatcaatcagagagttga

SEQ ID NO: 26250 - protein, 363 aa, Unknown
  Obtained from environmental sample
  DOMAIN (80)...(328): Domain of unknown function
  misc_feature (1)..(363): Xaa is any amino acid
METNQKEAAISNKSSLSRVYRSIGYFFYHLLRSKALKYQVWKLTRVYKIFKSSGLNLPRYFMDASYKKSFAAKRPTDFPNYLSAVVIVKNETLYIEEWLEYHLLMGVQKFYIYDNESNDNLNEILQPYIKSGIVEYKYFPGIEKQLAAYNDVLQKAKNETYWLAAIDIDEFIVPIKDETIADFLRDFEQYAGVEINWLMYGSSGERHWRDGLVIERFKSHGKIGGVFYGRGIIKTICNPRAVFKMDVHAPFYFRFAKTVNPDKKIRKGHYENVISVYDKIRINHYFTKSYDENLLKFRRGKADRKSKYDPLIFEYGDVNDEYDEIMDKYIPKVSENVKKRRERRELPQTQKSTPISTSHQSES

SEQ ID NO: 26251 - DNA, 558 bp, Unknown
  Obtained from environmental sample
  misc_feature (1)..(558): n is a, c, g, or t
atgaacgagcgataccgtttccttttctccggctccggcgggcagggggtcatcagcatgggcatcctgctggcggaagccgcagtgctgcatgacaatctcatcgccgtgcagacgcagtcatacggccctgaagcccgcggcggggcgacgcgttgcgatgtcgtcgtttccaacggccccatccattttcccaaagtgcttcagcccaatgtgctgatcgccctgacgcaggaagcctgctcgaagtatctttctctcttgcggcccggcggcctgttcatcagcgacactcgtttcgtcgcgctcggcaagcgtgtagacgcccgccacaaggcgttgcccatgtatgaaacccttatggaacgcggcggcaagccccaggccttcaatatttgcgtactgggcgccgtcaaccactttaccaagctggtgcgcacgagttctctggaaaaggtgctggcgtcgcgctttgccccggccttccgcgaggcgaacctcacggccctgcgcattggggaggaactggcggcccccctggaggacaaggacgaataa

SEQ ID NO: 26252 - protein, 185 aa, Unknown
  Obtained from environmental sample
  SIGNAL (1)...(25)
  DOMAIN (13)...(175): Pyruvate ferredoxin/flavodoxin oxidoreductase
  misc_feature (1)..(185): Xaa is any amino acid
MNERYRFLFSGSGGQGVISMGILLAEAAVLHDNLIAVQTQSYGPEARGGATRCDVVVSNGPIHFPKVLQPNVLIALTQEACSKYLSLLRPGGLFISDTRFVALGKRVDARHKALPMYETLMERGGKPQAFNICVLGAVNHFTKLVRTSSLEKVLASRFAPAFREANLTALRIGEELAAPLEDKDE

SEQ ID NO: 26253 - DNA, 549 bp, Unknown
  Obtained from environmental sample
  misc_feature (1)..(549): n is a, c, g, or t
gtgttcgtgcccatgggtgacggcgatggcttggccatcggcggcaaccacttcatccacgctgcccggcgcaacatcgacatgaccgccattctgctcaacaaccgtatttacggcatgaccggcggccagttttcccccctttccggacggggaatcagcgccactaccgcgccttacaaaagcatcgacccggactttgataccgtgaaactggctctgggggccggggcgagcttcgtggcccgcagcacgaccttccatgtgaaggaaatgaccggccttctgaaacaagccatccagcataaaggtttttcgctggtggaggttctttcccagtgcccgacctatttcggacgccgcaaccggatgggcgatgccgtggagatgatggaatggttccgcgataatacggcgaagatcggttcgaagaagttggaagaaaatcccaagcttctgccgcgcggcgttttcgccgaaaacgataccccggaatactgcgctgaatacgcgcgcatgtcggcacgcgccagggagggccggatatga

SEQ ID NO: 26254 - protein, 182 aa, Unknown
  Obtained from environmental sample
  DOMAIN (1)...(110): Thiamine pyrophosphate enzyme, C-terminal TPP binding domain
  misc_feature (1)..(182): Xaa is any amino acid
MFVPMGDGDGLAIGGNHFIHAARRNIDMTAILLNNRIYGMTGGQFSPLSGRGISATTAPYKSIDPDFDTVKLALGAGASFVARSTTFHVKEMTGLLKQAIQHKGFSLVEVLSQCPTYFGRRNRMGDAVEMMEWFRDNTAKIGSKKLEENPKLLPRGVFAENDTPEYCAEYARMSARAREGRI

SEQ ID NO: 26255 - DNA, 942 bp, Unknown
  Obtained from environmental sample
  misc_feature (1)..(942): n is a, c, g, or t
atgacaaatcggccgagcagaagacattacatggaatggtttgttaccgccgaagaatataaaaaaatactggatgaattatacctgcgggattatgtattggtcgatatcaaggaattctatactgtaaaatatacaaataatataaaaacgattgaagtaaaacaattcatggttcccaaaggaaaaaaaccagtcattttatccattgacgatctgtcttattacgaaaccaacaggagaaacgggacagtgcataaacttgtaattgatcagaacggcaatatcgcggcatggacaaacaccccgtccggaggcggcgcctcctttggaggcggcgcctcctttggaggcgagatctcctacgatcaggatattatcaccattacggaagattttattaaacagcatcccgatttttcaatccggggcgcaaaaggcattatagctcttaccggattcgaaggcgtattggggtataggacccaggccgaaagatcaaaaacccaggggtaccaaaaagaagtggcagacgctattgtaatagcaaacaaattaaaagatctgggatggcgttttgcgtcacacagttacaggcatttggatatgccaaaagtatccatgtcatcgtttatcaatgacaataaattatggaacaatgaagtaaaacccattctgggcgaaactgatctttacgtttacccctatggcgcgtcattggaaaaaattgaagaaaagcaccggatacttcgcggcatgaatttcaatttgtttttcggcgttggctatggctacggctacagaatggggccgaaatcggaatatgtttatttatcccgcttggctatagacggacggtatttcaggcaattcagaaacaacgcgggcagattgtttgacattgataaagttatggacaaaaagaacagaggcgtcaaatag

SEQ ID NO: 26256 - protein, 313 aa, Unknown
  Obtained from environmental sample
  misc_feature (1)..(313): Xaa is any amino acid
MTNRPSRRHYMEWFVTAEEYKKILDELYLRDYVLVDIKEFYTVKYTNNIKTIEVKQFMVPKGKKPVILSIDDLSYYETNRRNGTVHKLVIDQNGNIAAWTNTPSGGGASFGGGASFGGEISYDQDIITITEDFIKQHPDFSIRGAKGIIALTGFEGVLGYRTQAERSKTQGYQKEVADAIVIANKLKDLGWRFASHSYRHLDMPKVSMSSFINDNKLWNNEVKPILGETDLYVYPYGASLEKIEEKHRILRGMNFNLFFGVGYGYGYRMGPKSEYVYLSRLAIDGRYFRQFRNNAGRLFDIDKVMDKKNRGVK

SEQ ID NO: 26257 - DNA, 639 bp, Unknown
  Obtained from environmental sample
  misc_feature (1)..(639): n is a, c, g, or t
gtgcagacgggcggcccgtccggcggcatccttaccgaaaaatcgcttgatcttcccatcgactttgacacattgacagctaacggttcgatgatgggctcgggcggcatgatcgtcatggacgaggacgactgcgttgtagacgtatcgcgcttctacatggaattctgcgtcgatgaaagctgcggaaaatgctccccgtgccgtatcggaacaactcaaatccttaaacttcttgaaaaaatcgcggaaggcaagggagaagacgcggacataacaaaacttgaggaaataggaaccgcaatgacccgcgcttctctttgtatgctcggctgtaccgcggcgaatcccgtattatccacaatcaagaatttccgcgaagagtatatggagcatattcacgacaaaaagtgccgctcgggcaaatgcaaaaaacttgtctgcttcaaaattgacgccgccaagtgcataggctgcggcgcgtgcgcgaaaaaatgcccgggcaactgcattgttcaggaagaagcggcaaaatatcccgacaagaaacggcctccgtacatgatcaatcaaaaggattgtttaaagtgcggtgaatgtatgcatacctgtaaattcggcgcgatatttaagagttag

SEQ ID NO: 26258 - protein, 212 aa, Unknown
  Obtained from environmental sample
  DOMAIN (187)...(210): 4Fe-4S binding domain
  misc_feature (1)..(212): Xaa is any amino acid
MQTGGPSGGILTEKSLDLPIDFDTLTANGSMMGSGGMIVMDEDDCVVDVSRFYMEFCVDESCGKCSPCRIGTTQILKLLEKIAEGKGEDADITKLEEIGTAMTRASLCMLGCTAANPVLSTIKNFREEYMEHIHDKKCRSGKCKKLVCFKIDAAKCIGCGACAKKCPGNCIVQEEAAKYPDKKRPPYMINQKDCLKCGECMHTCKFGAIFKS

SEQ ID NO: 26259 - DNA, 600 bp, Unknown
  Obtained from environmental sample
  misc_feature (1)..(600): n is a, c, g, or t
atgaaggattattatctggcaattgatttgggtgcctccggagggcggcatattcttggctgtgtcgaagatgaaaaactccaattgaatgaaatttaccggtttaagaacgcccccgttaaaaaggacaactcttttctatgggatatagatttaatttcaggcgaaataattgccggccttcaagcatgttcgcaatggataaaagaaaagcagcagggcggaattctgcgctctttgggcatcgatacatggggtgtcgattatgttttgctggataaggatggaaatgccattaaaccggttttttcttaccgcgattcaaggactgaggctttcatgaaaaattcaatgccctttgaagatcggtacaggataacaggtatcgccgatatgccttttaatactatttaccagattcttgccgataaagccgcaggcagactccagaaagcggaatatatgctgcagctcccggaatatttttcgcagctccttgcgggagatctccttaacaagcagtacaacgaatacacgatggcctcgaccaccgcccttttggatgcgaagagaaaaacctgggccgaagaaattttttaa

SEQ ID NO: 26260 - protein, 199 aa, Unknown
  Obtained from environmental sample
  DOMAIN (4)...(199): FGGY family of carbohydrate kinases, N-terminal domain
  misc_feature (1)..(199): Xaa is any amino acid
MKDYYLAIDLGASGGRHILGCVEDEKLQLNEIYRFKNAPVKKDNSFLWDIDLISGEIIAGLQACSQWIKEKQQGGILRSLGIDTWGVDYVLLDKDGNAIKPVFSYRDSRTEAFMKNSMPFEDRYRITGIADMPFNTIYQILADKAAGRLQKAEYMLQLPEYFSQLLAGDLLNKQYNEYTMASTTALLDAKRKTWAEEIF

SEQ ID NO: 26261 - DNA, 393 bp, Unknown
  Obtained from environmental sample
  misc_feature (1)..(393): n is a, c, g, or t
ttgcntgagccagagtattnagaggataaaaaaccgtctccacctcctacaaggaaatcatttttttctgacaagcaaatagcgtctatcaggaaaaccggtgcagccgtagacgaaattactcggcaacgtcttgaagctgaaagaatcgcagaggaaaaaagaaaagaagaagaaagaatcgcagaagagaaaagaaaagtcgaagaagctgaaagaaaacggaaagaagaagagcgtcagagacaaataagggaggcacaggctcgtaaagaagaactagaaagacggctccgtgccagaagctggcgttgcaacgcttatggtgtaacacatcccggtggcccgaatgaatgtggtgatccgtccatgggcggtcattatgtggactaa

SEQ ID NO: 26262 - protein, 130 aa, Unknown
  Obtained from environmental sample
  misc_feature (1)..(130): Xaa is any amino acid
MXEPEYXEDKKPSPPPTRKSFFSDKQIASIRKTGAAVDEITRQRLEAERIAEEKRKEEERIAEEKRKVEEAERKRKEEERQRQIREAQARKEELERRLRARSWRCNAYGVTHPGGPNECGDPSMGGHYVD

SEQ ID NO: 26263 - DNA, 1152 bp, Unknown
  Obtained from environmental sample
  misc_feature (1)..(1152): n is a, c, g, or t
atgaattatttcttgagcgaagagcagcaaatgattgttgataccgcccgtgatattgcgcagaagaagattttgccggttagggagaagtatgaccacgaggggatattcccttgggatgttgtgaaggctctctccgaggccgatatgtgcgggctctacattcctgaagagtacggcgggtacggcggcggtgtctttgacctgtgtttggccgttgaagaactctcgaaggtggacggtggcatttcgctcgctatggcggccacggcgctgggcacgttccccatactgctccacgcttccgaggagcagaagaagaagtaccttccgggtatcgccgccggcaagacaatcgcggcattcgggctcacggaggccaacgccggcagcgacgcgctcggtatgaggactacggccgtcctgcagggaaacgagtgggtgataaacggcaccaagcagtggatcacaaacggcgagaacgctcaggtctacacagtgttcgcgaagaccaaccccgccaaaggggctcgcggcatctcctgttttatcgtagagaaaggtacgcccggcttcacattcggcaagcacgaggacaagatgggaatccgcgcgtcaagcaccacggaactcgtcttccaagactgccgcatccccaaagaggccatcatcgccaaagagggtatgggctccatagtggccatccacacgttaaacaattcgcgccccggcgtgggttcgcaggccctcggcatagccgccggcgcccttgaggacgctataaagtactcgcgcgagcgtgttcagttcggcgccgccatatcgtccttccaagcggtccagcacatgctagccgacatggctacggaggttgaggccgcccgcgcgctcctttactccaccgcccgtatgatcgacgccggcgcgaagaacttcgccaaagagtcggccatgagcaaactcttctgttcggacgtcgccatgcgcgtgaccgtcgacgcgctgcaggtaatgggcggctacggttacatgagggagtaccctatggagaaacggatgcgcgacgcgaagatcacgcagatatacgagggtacgaatcagatacagaggaacgagatagcgctgcagctgatcaaagaagccgtggggtga

SEQ ID NO: 26264 - protein, 383 aa, Unknown
  Obtained from environmental sample
  DOMAIN (121)...(172): Acyl-CoA dehydrogenase, middle domain
  misc_feature (1)..(383): Xaa is any amino acid
MNYFLSEEQQMIVDTARDIAQKKILPVREKYDHEGIFPWDVVKALSEADMCGLYIPEEYGGYGGGVFDLCLAVEELSKVDGGISLAMAATALGTFPILLHASEEQKKKYLPGIAAGKTIAAFGLTEANAGSDALGMRTTAVLQGNEWVINGTKQWITNGENAQVYTVFAKTNPAKGARGISCFIVEKGTPGFTFGKHEDKMGIRASSTTELVFQDCRIPKEAIIAKEGMGSIVAIHTLNNSRPGVGSQALGIAAGALEDAIKYSRERVQFGAAISSFQAVQHMLADMATEVEAARALLYSTARMIDAGAKNFAKESAMSKLFCSDVAMRVTVDALQVMGGYGYMREYPMEKRMRDAKITQIYEGTNQIQRNEIALQLIKEAVG

SEQ ID NO: 26265 - DNA, 747 bp, Unknown
  Obtained from environmental sample
  misc_feature (1)..(747): n is a, c, g, or t
atgatcagatggccgagctcaaatcgcgttaatacaggttccgggcgcggcataggccgtgagatcgcccgtaaattggctcaggccggcgccgacgtcgtcataagcgatatcgatttggcgaccgcccaggccaccgctaacgagatcgccgccgaattcgggcgcaaaaccgtcgccctcgccgccgacgtttcaaaggccggcgacgtggcgaagatgttcgagggggcgctcgaggccttctccaaggtagacatcttggtcaacaacgccggaatcacccgcgacgggttgattatgcggatgaaggaagaggactgggacctcgttttgagcatcaacctgaagagcgcgttcctctgctgcaaggaggcgtccaggcctatgatgaaggcccgttgcgggaagatcataaatatcgcctccgtcgtggggctgatgggcaacgcggggcaggcgaactactcggcctcgaaggcggggatgatcggtttgacgaagacgctggcgcgggagttcgcgtcgcgttctataaacgtgaacgccatcgccccgggtttcatccgcacggccatgaccgacaagctgacggacgcggagaaggagaagctgtcgagccagatcccgatggcgaagctcggcgaaccgaacgacgtggccaacgcggcgctgttcctgagttcggatttggcggattacataacgggtcaggtgataacggttgacggcggattggtaatgtaa

SEQ ID NO: 26266 - protein, 248 aa, Unknown
  Obtained from environmental sample
  DOMAIN (12)...(175): short chain dehydrogenase
  misc_feature (1)..(248): Xaa is any amino acid
MIRWPSSNRVNTGSGRGIGREIARKLAQAGADVVISDIDLATAQATANEIAAEFGRKTVALAADVSKAGDVAKMFEGALEAFSKVDILVNNAGITRDGLIMRMKEEDWDLVLSINLKSAFLCCKEASRPMMKARCGKIINIASVVGLMGNAGQANYSASKAGMIGLTKTLAREFASRSINVNAIAPGFIRTAMTDKLTDAEKEKLSSQIPMAKLGEPNDVANAALFLSSDLADYITGQVITVDGGLVM

SEQ ID NO: 26267 - DNA, 600 bp, Unknown
  Obtained from environmental sample
  misc_feature (1)..(600): n is a, c, g, or t
ttggctcctttcaaagagtctttttggggtttatgttatgatatttatttacattaccaatccgccgtcaaccgttatcacctgacccgttatgtaatccgccaaatccgaactcaggaacagcgccgcgttggccacgtcgttcggttcgccgagcttcgccatcgggatctggctcgacagcttctccttctccgcgtccgtcagcttgtcggtcatggccgtgcggatgaaacccggggcgatggcgttcacgtttatagaacgcgacgcgaactcccgcgccagcgtcttcgtcaaaccgatcatccccgccttcgaggccgagtagttcgcctgccccgcgttgcccatcagccccacgacggaggcgatatttatgatcttcccgcaacgggccttcatcataggcctggacgcctccttgcagcagaggaacgcgctcttcaggttgatgctcaaaacgaggtcccagtcctcttccttcatccgcataatcaacccgtcgcgggtgattccggcgttgttgaccaagatgtctaccttggagaaggcctcgagcgccccctcgaacatcttcgccacgtcgccggcctttga

SEQ ID NO: 26268 - protein, 199 aa, Unknown
  Obtained from environmental sample
  misc_feature (1)..(199): Xaa is any amino acid
MAPFKESFWGLCYDIYLHYQSAVNRYHLTRYVIRQIRTQEQRRVGHVVRFAELRHRDLARQLLLLRVRQLVGHGRADETRGDGVHVYRTRRELPRQRLRQTDHPRLRGRVVRLPRVAHQPHDGGDIYDLPATGLHHRPGRLLAAEERALQVDAQNEVPVLFLHPHNQPVAGDSGVVDQDVYLGEGLERPLEHLRHVAGL

SEQ ID NO: 26269 - DNA, 603 bp, Unknown
  Obtained from environmental sample
  misc_feature (1)..(603): n is a, c, g, or t
ttgccggcatcgttcacgggttgtccgagtacccatggcgcgacaccggctggatggagaaccgctggaagtcgaattcgcacaccgcgcccatcagcgtcttcgaagtccacatgggctcttggcggcgcaagtgggacggctcgttccttacgtacaccgagcttgccaacgaactggtcccatacgtcaaggatctcggctacacgcacattcagttgctgcccatcaccgagcatcccctctacgcctcctggggctaccagccgctggggcttttcgcccccaccagccgctatgggcagcctgacgaattcaaggccttcgtggacgcggcccacgtggccggccttggggtgttcctggactgggtgccggcgcacttccccgaggacgaccacggtctcgcatttttcgacggcacgcacctttacgagcatgccgacccccgccaggggcgccatcaggactggggcacgctcatctacaactacggtcgcgaggaggtgcgcaactatctcatctccaacgcgctcttctggctggaccagtaccacttggacggtctgcgcgtggacgccgtcgcctcgatgctctacctga

SEQ ID NO: 26270 - protein, 200 aa, Unknown
  Obtained from environmental sample
  misc_feature (1)..(200): Xaa is any amino acid
MPASFTGCPSTHGATPAGWRTAGSRIRTPRPSASSKSTWALGGASGTARSLRTPSLPTNWSHTSRISATRTFSCCPSPSIPSTPPGATSRWGFSPPPAAMGSLTNSRPSWTRPTWPALGCSWTGCRRTSPRTTTVSHFSTARTFTSMPTPARGAIRTGARSSTTTVARRCATISSPTRSSGWTSTTWTVCAWTPSPRCST

SEQ ID NO: 26271 - DNA, 846 bp, Unknown
  Obtained from environmental sample
  misc_feature (1)..(846): n is a, c, g, or t
gtggcttatcctttggtggggccggcaattatgcgttttatacatttgagggaaaaatacggctcaaccgtgttctgggccataggtgacgatctcagccagcttgagcttttggggaaagctgctgtttcggaaaaccaaagcccaatcgacacgctaattgatgtaaatcttggaatggacaggacgggggtattgccggaaaaactggaagagttctaccttagcgcgataaaaattgaagggctcgttataaaaggcttccactgttacgacggccacctgacgataaaaaacctgaacgagcgccgttccgcggcttcttccgccgccgagtatttttggaaagtaaaagaatccctggagaaaaaggggaatgaaatcccggttgttgtaatgggcgggactcctactttctcctgccacagagaaacggaaggtgtctttctttcgcccggcactttcttcgtccaggataacggctattactcaaaatacgcggatctggattttacccctggagcggctattctgagccgtgttgtaagccacccgaaagagggctttttcaccctggacacaggcagcaaggccattgccacagacccggctgaacggggagtgattgccgatttgcctgaagcaaagccggtttttcaaagcgaggaacactgggtctggactcttgaggggagagaaccaccgccaaacggggaagtactctacatacttcctacccatatatgcccgacctcggctctgtaccccggtgtcgtggtggtaaaaaacggcaagcagatcgattattgggaagttggggcgcgaaacaggaagatttcggtgtag

SEQ ID NO: 26272 - protein, 281 aa, Unknown
  Obtained from environmental sample
  misc_feature (1)..(281): Xaa is any amino acid
MAYPLVGPAIMRFIHLREKYGSTVFWAIGDDLSQLELLGKAAVSENQSPIDTLIDVNLGMDRTGVLPEKLEEFYLSAIKIEGLVIKGFHCYDGHLTIKNLNERRSAASSAAEYFWKVKESLEKKGNEIPVVVMGGTPTFSCHRETEGVFLSPGTFFVQDNGYYSKYADLDFTPGAAILSRVVSHPKEGFFTLDTGSKAIATDPAERGVIADLPEAKPVFQSEEHWVWTLEGREPPPNGEVLYILPTHICPTSALYPGVVVVKNGKQIDYWEVGARNRKISV

SEQ ID NO: 26273 - DNA, 885 bp, Unknown
  Obtained from environmental sample
  misc_feature (1)..(885): n is a, c, g, or t
atgacggtggaagaaaacgtaaaaaaaataatcagcggaaaagttcgggaagtatacgaaatttctaacgaaatttcggacaaagtatcagacgacaaactggtcattgttacaacggacagaatttccgcttttgacgtagttttgtcaaagcctgtcgcaaacaagggaaaggtgctaaacgccatctccctttattggtttaatttcacgaaaggcatcatccacaaccatattatctcaagcgatcttaaagatatgcctgagtttttccaaaaggacgaattcgaggggcgcacagttctggtaaaaaagctaaaaatgctgccgtttgaatttatagtcaggggatatatgttcggcaatatgtgggaagcatattccaaaggcgaaaaattctgcggccaaaaaatagaaggcgattacaagcttgccgagaaactggccgtcccgctttttaccccttccacaaaagcgcgtgtcgggcatgacgagtatatctctgttcaacatgtcaaggacgtgattggcgcggagctggtcggcaggatagaaacagttagccaaaagctttacaacacctgctataactacgcttacaacaagaacataattatcgccgacaccaaatttgaattcggccttgatgagcataacagcctttatatcgcggacgaaatacttacgccggattcaagcaggttctggagccttttggattataaggcgggggtttctccaaaaagttacgacaagcaattggtaagggactggctcacggaaaacaaaataaacggcgagatgcaatttgacaacgtgagcgacgatgttctaagaaaaacatcggagatctacgcggagtgcctgagaaagataaccggatga

SEQ ID NO: 26274 - protein, 294 aa, Unknown
  Obtained from environmental sample
  DOMAIN (6)...(277): SAICAR synthetase
  misc_feature (1)..(294): Xaa is any amino acid
MTVEENVKKIISGKVREVYEISNEISDKVSDDKLVIVTTDRISAFDVVLSKPVANKGKVLNAISLYWFNFTKGIIHNHIISSDLKDMPEFFQKDEFEGRTVLVKKLKMLPFEFIVRGYMFGNMWEAYSKGEKFCGQKIEGDYKLAEKLAVPLFTPSTKARVGHDEYISVQHVKDVIGAELVGRIETVSQKLYNTCYNYAYNKNIIIADTKFEFGLDEHNSLYIADEILTPDSSRFWSLLDYKAGVSPKSYDKQLVRDWLTENKINGEMQFDNVSDDVLRKTSEIYAECLRKITG

SEQ ID NO: 26275 - DNA, 417 bp, Unknown
  Obtained from environmental sample
  misc_feature (1)..(417): n is a, c, g, or t
gtgaaaagggtttatgtaaatgagaaatggtgcctgggctgtcatttatgcgaatactattgcgcttttgcggggacaaccgaaagcgacatggcgcgggcactgaaaggaataaagatacgtccgagaatccatatagaaaaaaaagacgacataagtttcgccgtttcctgtaggcactgcaaagagccgtattgcgtcaagggttgcattaccggtgcattaaccattgacgacggcgtaattacgattaacaaggacaaatgcgtaagctgtttcacctgcattatgagctgtccatatggtgctgtagccccttcggaagacggcgcggtacagaaatgcgagttatgcgtaagcaccgccgcaggaacgccggcctgcgtaaagggctgtccgaacaacgccattttttga

SEQ ID NO: 26276 - protein, 138 aa, Unknown
  Obtained from environmental sample
  DOMAIN (82)...(105): 4Fe-4S binding domain
  misc_feature (1)..(138): Xaa is any amino acid
MKRVYVNEKWCLGCHLCEYYCAFAGTTESDMARALKGIKIRPRIHIEKKDDISFAVSCRHCKEPYCVKGCITGALTIDDGVITINKDKCVSCFTCIMSCPYGAVAPSEDGAVQKCELCVSTAAGTPACVKGCPNNAIF

SEQ ID NO: 26277 - DNA, 837 bp, Unknown
  Obtained from environmental sample
  misc_feature (1)..(837): n is a, c, g, or t
ttgccaaaaggggaataccttgttacgggcggatttccctgccaaccgcattcaaacgcggggcttaaaaagggggctgacgacaagcgcgatttatggcctgagtgccggagaatgttacgcgaattacgaccaagaatcgcattgtttgaaaacgtgccagggcttcttacctctccaggaagagagcagaaaggcgagttcttcaatggggttttgtcggacattcacgcctgcgggtacgcttgtgaatggcaaattatatcggctgcggacgtcggggcgccgcacctgcggaaacgggtgtggattgttgcctactcccagaaacaatacgggcccgtcgaaagaaaaaaaacacctatcgctggacggattagtgaaactttggccgacgccgaaagcgggcgacgcggttatgggaatgacggctcggacgaggggcaagccgatagaaaaatcaacgcatctacagacgcaggtatatcttgcggagaaaaaatgctggccgtcaccgacggcaaaggactacaaggacggctcggcagagtcttgcacgaatgttccggtgaacggcctgctgggacgtgctgttcatcaatatccgacaccgacaacgccgagacctcacgacagcgagaacacggcggggaaatatatgcctggacagaaacaaaaatctttggagggggcggtagcagcggctggtgggcagttgaacccgacgtgggtagagtggctcatgggataccctttagggtggacagacttaaaggactcgggaacaccgttgtccctgaatgcgtaaaaaggatcctactccctcccggcgtttga

SEQ ID NO: 26278 - protein, 278 aa, Unknown
  Obtained from environmental sample
  DOMAIN (3)...(278): C-5 cytosine-specific DNA methylase
  misc_feature (1)..(278): Xaa is any amino acid
MPKGEYLVTGGFPCQPHSNAGLKKGADDKRDLWPECRRMLRELRPRIALFENVPGLLTSPGREQKGEFFNGVLSDIHACGYACEWQIISAADVGAPHLRKRVWIVAYSQKQYGPVERKKTPIAGRISETLADAESGRRGYGNDGSDEGQADRKINASTDAGISCGEKMLAVTDGKGLQGRLGRVLHECSGERPAGTCCSSISDTDNAETSRQREHGGEIYAWTETKIFGGGGSSGWWAVEPDVGRVAHGIPFRVDRLKGLGNTVVPECVKRILLPPGV

SEQ ID NO: 26279 - DNA, 306 bp, Unknown
  Obtained from environmental sample
  misc_feature (1)..(306): n is a, c, g, or t
atgaataatacaaacaaacttgaaaacatcaaaaataagataagaaaacttcttgcgctctcaaaaagcggcaacgaaaatgaagtggccgccgccctggaaaaggccaataaactgatagaacaattcaggcttgataaagaagcgttacgttttgaatccgttcatgcaaaagcaaccaaaacttattcaaaatggcggacaatgctcagcggcaatatcgcctggttatacggctgccaccaatatcgtgatgttaatacgggtaaattgttttaccggcgaagacttctcggccgattctga

SEQ ID NO: 26280 - protein, 101 aa, Unknown
  Obtained from environmental sample
  misc_feature (1)..(101): Xaa is any amino acid
MNNTNKLENIKNKIRKLLALSKSGNENEVAAALEKANKLIEQFRLDKEALRFESVHAKATKTYSKWRTMLSGNIAWLYGCHQYRDVNTGKLFYRRRLLGRF

SEQ ID NO: 26281 - DNA, 357 bp, Unknown
  Obtained from environmental sample
  misc_feature (1)..(357): n is a, c, g, or t
atggtgcaacaggcggcggtacaagtattgcaaccgatattcgagcgtacattctcggactccagtttcggcttcaggccggggcggaacgcgcatcaggcgatagagcgtgcgaggaaatactatgaggaagggtatgcccatgcggtagaccttgacttggaaaaattctttgacacggtgaaccatgacattctgatgcagacggtgggggaaacggtgaaggaaaagcctgttacagcattgatacgcaagttcctgaagagcgggattatggtcgacgggctggcaagccaacgggaacaggggacgccgcagggcggaaaccgcgcatcgatgatgcgacgccgttattaa

SEQ ID NO: 26282 - protein, 118 aa, Unknown
  Obtained from environmental sample
  misc_feature (1)..(118): Xaa is any amino acid
MVQQAAVQVLQPIFERTFSDSSFGFRPGRNAHQAIERARKYYEEGYAHAVDLDLEKFFDTVNHDILMQTVGETVKEKPVTALIRKFLKSGIMVDGLASQREQGTPQGGNRASMMRRRY

SEQ ID NO: 26283 - DNA, 636 bp, Unknown
  Obtained from environmental sample
  misc_feature (1)..(636): n is a, c, g, or t
atgctggaagagcgcggccataagtttgtaaggtatgccgacgactgcaacatctatgtcaaaagcgccagagccgcggagcgggtaatggaagggcgcataaaatttcttgaagggaaacttagactgaaagtgaaccggaagaaaagcgcgaccggaagcccgctgaagttaaagtttctgggatttagtttataccggagcaaagaaggaatcaggatacgggtacatgagaaaccccttaaacggctgaaggaaaggcttaaggccgcaacgagccgganacgaagcgggaaggcagaacaaatactggaggaaataatcaggctaatgaacggctggttaggatactaccgtattgcggacataaagatgtatttgcaacgaataagcgaatggctgagacggaggatacgccaactctattggaaacgctggaaacgagtgcgaacgagatatgaaaatctgactaaattgggcgtacctcatgacatggcatggcaatgggcaaacacccggaaaagctactggtgtatagccgggagcttgatactgaccacgacaatgaataaccgttattttgaaacgcttggtttcccgaatatactagacaatatgaaggccccccgaaaatag

SEQ ID NO: 26284 - protein, 211 aa, Unknown
  Obtained from environmental sample
  DOMAIN (81)...(164): Group II intron, maturase-specific domain
  misc_feature (1)..(211): Xaa is any amino acid
MLEERGHKFVRYADDCNIYVKSARAAERVMEGRIKFLEGKLRLKVNRKKSATGSPLKLKFLGFSLYRSKEGIRIRVHEKPLKRLKERLKAATSRXRSGKAEQILEEIIRLMNGWLGYYRIADIKMYLQRISEWLRRRIRQLYWKRWKRVRTRYENLTKLGVPHDMAWQWANTRKSYWCIAGSLILTTTMNNRYFETLGFPNILDNMKAPRK

SEQ ID NO: 26285 - DNA, 831 bp, Unknown
  Obtained from environmental sample
  misc_feature (1)..(831): n is a, c, g, or t
atgagccatttcctctgcatcaaccccggcacggtcacgacagagctttccggcgaaaaaacggtcgaccccgccttcgggcttcccgctctgtgggtcaccgaagaccgccgcgacgaggcggaacgcgccggttataccgtggttgatcccccttcaatcattgctactcatcttactgagattatcaggcgtcattctgccgacatattaggtatgcaggatactcaggcaattctggatacactccgcaaagaataccccgccgtggtggacgaagtactgcggcctgagttgggtatgccggtgattaaaattcagaagatactccacggcttgctgcgggaacgggtgtccatccgcaacatggtcacgatactggaagctatcgccgaatacgcgccgctgtccaaaacggtctggttcctcaccgaaaaggcccgtcaggccctgggcagccagatatgccaccagtatgccgatgaaaagcaccatttgcgggtgctgaccattgcgccggaactggaacaaaaaattatcgaaagtaaatatgaaaccccttccggcgtgatatgcgcgctggatccgcccacgcagatggcatggatcaaagcggtgagcaaagccgccgccgcggtcaagagcagggggtttctgccggttatactctgctcagagcaggcgcgtttcctggtgcggaattccaccgaccgagagttgcccgatctggcggtcatttccgttcccgaaattacgccggatattgttcccgaagcggtcggcgttatcaggttggaaggcgccgcgccttccaaagatggcggggagtag

SEQ ID NO: 26286 - protein, 276 aa, Unknown
  Obtained from environmental sample
  DOMAIN (1)...(257): FHIPEP family
  misc_feature (1)..(276): Xaa is any amino acid
MSHFLCINPGTVTTELSGEKTVDPAFGLPALWVTEDRRDEAERAGYTVVDPPSIIATHLTEIIRRHSADILGMQDTQAILDTLRKEYPAVVDEVLRPELGMPVIKIQKILHGLLRERVSIRNMVTILEAIAEYAPLSKTVWFLTEKARQALGSQICHQYADEKHHLRVLTIAPELEQKIIESKYETPSGVICALDPPTQMAWIKAVSKAAAAVKSRGFLPVILCSEQARFLVRNSTDRELPDLAVISVPEITPDIVPEAVGVIRLEGAAPSKDGGE

SEQ ID NO: 26287 - DNA, 1569 bp, Unknown
  Obtained from environmental sample
  misc_feature (1)..(1569): n is a, c, g, or t
gtgatggcgagagccgccaagctttccgccgatgtcgaagaccttgtaaacaaaacgccgaagatttacggggaagcggcgcaggttttcttctctccagcattggcgaaggttttggcaaaagccgaagttgaggcttcggcgcttaaagacgaatatgtctccgccgagcatatcttaatcgccattgcggcgagcgagggcaaagcggcggaactgctgaaaaaagcgggtgtaagcaaggatgcgattctgggcgcgttgaaacacgtcaggggaaacgcccgcgtaaccgatcaaaacccggaagaaaaatatcaggcgttggatcgctactgccgtgaccttaccgctcttgcacgtcaggaaaaacttgatcccgtcatcgggcgtgatgaagaaatccgcaggtgtatgcaggttctgtcccgccgcacaaaaaataatcccgtcctcatcggcgaacccggcgttggaaagacggctatagtcgaagggcttgcccggcgcattgtggcgggcgatgtgcccgaaggcttgaaagggaaaaaacttctcgctctggatttaggcgctcttgtcgcaggcgcaaaattccgcggcgagtttgaggaacgtttaaaaacagttatccatgacgtgcaggcggaagacgggaaaataattctttttattgacgagcttcatactctcgtgggagccggagcagcggaaggagcgacagacgcctccaacttgcttaagccagcgcttgctcgcggggaactgcgctgtataggcgcgactactttggacgagtacagaaaacatatcgagaaggacgctgcgcttgaacggcgatttcagcaggtgtatacggcggaaccgtccgtggaagatacaattgcgattctgcgcggccttaaagaacggtacgaagtacaccatggagtgcggattaaagacgaggcacttgtggcggcggcaacattgtccagccggtacattacaagccgatttctacccgacaaggcgattgaccttgttgatgaagccgcaagcagacttaaaatggaattggacagcaggccaacggaacttgataaacttgagcgtaaacttttacagctttcgatagaaaagcaggctctttcgcgcgaagacgacgcggcttccaaagaccgcctgacaaaactggaaaaagaaatcgccgaccttacagccgagcgtaacacgatgaacacccgctgggaaaatgaaaaaattgacattcaaaagatccgtgaaattaaacaacggatagaagagttaaaaattgatgagacgcggtatgaacgcgaaggaaatctttcaaaggcggcggaagtaaaacacggaaaaattcccgaagcacaaaaacaacttgccgctcttacggatcaaatggagaaaaagagggagagcgcaaaaggaggcggagtttccgcgcttttacgcgaagaagtcagcgaagaggacattgctggtgtagtgtcaatgtggacgggtattcccgtatcaaagatgctctccggcgaattgcaaaaatatctagacctgaaaaagctctga

SEQ ID NO: 26288 - protein, 522 aa, Unknown
  Obtained from environmental sample
  DOMAIN (149)...(343): ATPase family associated with various cellular activities (AAA)
  misc_feature (1)..(522): Xaa is any amino acid
MMARAAKLSADVEDLVNKTPKIYGEAAQVFFSPALAKVLAKAEVEASALKDEYVSAEHILIAIAASEGKAAELLKKAGVSKDAILGALKHVRGNARVTDQNPEEKYQALDRYCRDLTALARQEKLDPVIGRDEEIRRCMQVLSRRTKNNPVLIGEPGVGKTAIVEGLARRIVAGDVPEGLKGKKLLALDLGALVAGAKFRGEFEERLKTVIHDVQAEDGKIILFIDELHTLVGAGAAEGATDASNLLKPALARGELRCIGATTLDEYRKHIEKDAALERRFQQVYTAEPSVEDTIAILRGLKERYEVHHGVRIKDEALVAAATLSSRYITSRFLPDKAIDLVDEAASRLKMELDSRPTELDKLERKLLQLSIEKQALSREDDAASKDRLTKLEKEIADLTAERNTMNTRWENEKIDIQKIREIKQRIEELKIDETRYEREGNLSKAAEVKHGKIPEAQKQLAALTDQMEKKRESAKGGGVSALLREEVSEEDIAGVVSMWTGIPVSKMLSGELQKYLDLKKL

SEQ ID NO: 26289 - DNA, 960 bp, Unknown
  Obtained from environmental sample
  misc_feature (1)..(960): n is a, c, g, or t
atgctggacatatacattgacgggcttgttgtaaaagatatacagaccgacatgaccgatctccgcagggcaggaccggaaaggcaaatcgctttcaagttcgatcttgaaacagcctacagtatactcagaaatgtgaatgggagcgaatcgggggcaacttacacgcccataggcattgttgatccagtgcggcttgcaggaactacggttcaaagggcgaatcttaataacccggatatgataaggtccatgggccttaaaataggctcggccgttgccgttgtaaagcgcggggaaattatccccaaaatagaggggcttgcccccgctaacgcgctaagcgaaccggaagagaaaagcgagattctttttcctgataaatgccagtcgtgcggcagcgcccttgaagacgccgggacaaggcttttctgcccgaattccgcctgctccaagaggcttcaccacaggcttgaaaaatgggtttccgtgcttgacatcagggaactaggagaaaaattaatacatcagttgtttgattcaggcagggtgcgaaatgtatcagatctatattcccttaatgtaacggaacttgaggattttgaaaggatgggcgagttatccgccgcaaaggtaatacgtcacatacgcaccaggcgtgaaatttcattaaaggcatttgtggcgggttttgaccttgaaggggtaggggagctaattatggaaagggtagtcttatccgggttcgataccttggataaacttcgttccgccaggattgaggatttatcgggcatctacggtctgggtgaaattactgcaaagactatttttaaagggcttatagaatgtaaagacgaaatggacaaggttctttcagccgggattatttcaatagcgcttcctccaaagaaagaagaagttcctttaaaaggtatatctttttgttttacgcggtga

SEQ ID NO: 26290 - protein, 319 aa, Unknown
  Obtained from environmental sample
  DOMAIN (39)...(117): NAD-dependent DNA ligase OB-fold domain
  misc_feature (1)..(319): Xaa is any amino acid
MLDIYIDGLVVKDIQTDMTDLRRAGPERQIAFKFDLETAYSILRNVNGSESGATYTPIGIVDPVRLAGTTVQRANLNNPDMIRSMGLKIGSAVAVVKRGEIIPKIEGLAPANALSEPEEKSEILFPDKCQSCGSALEDAGTRLFCPNSACSKRLHHRLEKWVSVLDIRELGEKLIHQLFDSGRVRNVSDLYSLNVTELEDFERMGELSAAKVIRHIRTRREISLKAFVAGFDLEGVGELIMERVVLSGFDTLDKLRSARIEDLSGIYGLGEITAKTIFKGLIECKDEMDKVLSAGIISIALPPKKEEVPLKGISFCFTR

SEQ ID NO: 26291 - DNA, 333 bp, Unknown
  Obtained from environmental sample
  misc_feature (1)..(333): n is a, c, g, or t
atggcgggggtaaaacaggaagtttccggggatttttccggcggagtgcggggcgaagtggttatgaaaaccggagtgtggaaacaaaaatacccgactaaagccaactgccgtaacgccgccaacggaattatgcgccgaaaagacggggcaggctgtgaagatttaaactttatcagctatgacgcttccgctactgggaatgataattatttcaagacggagatggaaaaagtcgcctggcttaaaaagcagggatttgatgttaccgagacaagggaattcggcgatccggaaaaaataatcacgtacagggccgaaatcgcgatataa

SEQ ID NO: 26292 - protein, 110 aa, Unknown
  Obtained from environmental sample
  misc_feature (1)..(110): Xaa is any amino acid
MAGVKQEVSGDFSGGVRGEVVMKTGVWKQKYPTKANCRNAANGIMRRKDGAGCEDLNFISYDASATGNDNYFKTEMEKVAWLKKQGFDVTETREFGDPEKIITYRAEIAI

SEQ ID NO: 26293 - DNA, 1110 bp, Unknown
  Obtained from environmental sample
  misc_feature (1)..(1110): n is a, c, g, or t
atgaatagaattattttgatcgggaatggttttgacctcgctcatggattagaaacaaaatatacagattttattgatgatttttggatgaaaaagttagttactttttctgactcattaaaaaatgacagcttaaaaagaataccagattataataactcaaataatgatatttggaactatactgataattatatttctgtttatgttaaagattatcaatatattcttcaaagtgcggaaataaatgatgctgaaactggttttcaaacattccgtaattttatttctcaatttacaccttatacatttcagagcaattacgaattcaataatttattcttagataaaattactaataaacaacaattgcaaaaatgggtagacattgaagaagcatattattctgctctgctggaatgtttagaaaacaaaaagaaggaagaaaaaattaaaaaacttaatgaagactttaaacaaattcaaattttattgcaaatatatttatccgaacaaattaaaaagaaggtttcttttaataataatattgagaaaaacatatattcgccattattacaaattgattttattgatgacattaaagaaactaaattagataatatttgctttctcaattttaattacactcctacaactgtgctatattcaaatggtcgtaaagatgttaaaacaattaatatacacgggcaaattaataactcaaacaatcctattatctttgggtatggtgatgaaaaggatgataattataaaagaattgaaaaagaaaataatgattttcttcaatatataaaatcatttatgtattcaaggacaaataattataaagaattacttactttcattaattctgatgtatatcaagtttatattatggggctttcctgcagtacatctgacagaacgttattgagcactctttttgaacacaaacattgtaagtcaattaaaatattctattataacaaaaacagtattgagaatgattatcttgatatttatatgaatatttcacgaagttttaacaataaagaaaaaatgagggaactcgtggttagttttgaaaacagtataccgctaataggttag

SEQ ID NO: 26294 - protein, 369 aa, Unknown
  Obtained from environmental sample
  misc_feature (1)..(369): Xaa is any amino acid
MNRIILIGNGFDLAHGLETKYTDFIDDFWMKKLVTFSDSLKNDSLKRIPDYNNSNNDIWNYTDNYISVYVKDYQYILQSAEINDAETGFQTFRNFISQFTPYTFQSNYEFNNLFLDKITNKQQLQKWVDIEEAYYSALLECLENKKKEEKIKKLNEDFKQIQILLQIYLSEQIKKKVSFNNNIEKNIYSPLLQIDFIDDIKETKLDNICFLNFNYTPTTVLYSNGRKDVKTINIHGQINNSNNPIIFGYGDEKDDNYKRIEKENNDFLQYIKSFMYSRTNNYKELLTFINSDVYQVYIMGLSCSTSDRTLLSTLFEHKHCKSIKIFYYNKNSIENDYLDIYMNISRSFNNKEKMRELVVSFENSIPLIG

SEQ ID NO: 26295 - DNA, 1734 bp, Unknown
  Obtained from environmental sample
  misc_feature (1)..(1734): n is a, c, g, or t
atgaccgatttaattatggctaaagaacaggcggaacagagcagccgtttcaagacacaattcctgtcgcgtatgagccatgaagtacgcacgcccatgaacgcgattctgggcattacagaaattcaacttcaggatgaaacactgtcgcccgccgccagagaagcgatggacaagattttcaactcgggctatttactgcttggtatcattaacgacatattggacttgtcaaaaatagaagcgggcaagcttgaaattacgcctgccggttatgatgtcccaagccttatcaacgacaccatacagcttacggcgatgcagttcgacaataaaccgatagactttaatcttaaattggatgagaacattcccatatcgctgttcggcgatgaactgcgtataaaacagattttaaacaacctgctttccaacgctttcaaatatacggataccggcagtatttctttgtcggtttcagtcgaagatattcggcatggagataacccacaggtaactcttgtgttcagtatagctgatacagggcaagggatgacaagagaacaggtggaaaaactgttcgatgagtacacgcgctttaatatggatgccaaccgtacaaccgaaggcacaggtcttggcatgagcattacaaaacaacttgtgcgcatgatgaacggtgatatttccgtggaaagcgagcagggaaaaggctcggtatttaccgtgcgtctaccgcaggggattgtcggctccagagtgttaggaaaagaattagcggaaaacgcccagagattccatattggcaaagcgtctcaaataaataacgcgccgcaatttgtccgcgaatatatgccttatggcaaagtcctggttgtggacgacgttgaaacaaacctgtatgtcgcaagggggcttatggccccttacggcttgtctattgaaaccgccgtaagcggatttgaagcaattgaaaaaatcaaaaacggcgctgtctatgacattattttcatggatcattttatgccaagaatggacggcatagaaacggtaaaaaaactgcgcattatgggttatacgcttacaatcatcgcgctgacagctaacgcccttgccggacaggctgaagtttttttggaacacgggttcgacggatttatctccaagcctatagacatacgccagcttaatgttactttgaataaatatatacgcgacaaataccctcccgaagtaattgaagccgcgcgcaggcagacggcaaggctaatggcgaaaacttccattgaaaaggcaaagccgtcggcaggttctgaattagcggcaattttcacgcgggacgccgagaaggctatttcagagctgaaaacaattctttccggctcattcagcaataaagatgatttacttcaatttgttatcaatgtccactcaatgaaaagcgcgcttgcgaacattggtgaaaccgaactttctgacgcggcgcttaaattggaattggcgggacgttcggaaaatattccggtaattacggctgaaacttcggcgttcctgaanacactggaggaagtaataaaaagaaacaaacctaaagaagacatangcgttgaaaacgcaactgtaaaggaaagacgcgncagacctagccgcgtatttagcgaanaaactgagtattatccgtacagcatgcgggaaaatgatgaaaaaacgccccaaaaacattgtctgaactga

SEQ ID NO: 26296 - protein, 577 aa, Unknown
  Obtained from environmental sample
  DOMAIN (439)...(527): Hpt domain
  misc_feature (1)..(577): Xaa is any amino acid
MTDLIMAKEQAEQSSRFKTQFLSRMSHEVRTPMNAILGITEIQLQDETLSPAAREAMDKIFNSGYLLLGIINDILDLSKIEAGKLEITPAGYDVPSLINDTIQLTAMQFDNKPIDFNLKLDENIPISLFGDELRIKQILNNLLSNAFKYTDTGSISLSVSVEDIRHGDNPQVTLVFSIADTGQGMTREQVEKLFDEYTRFNMDANRTTEGTGLGMSITKQLVRMMNGDISVESEQGKGSVFTVRLPQGIVGSRVLGKELAENAQRFHIGKASQINNAPQFVREYMPYGKVLVVDDVETNLYVARGLMAPYGLSIETAVSGFEAIEKIKNGAVYDIIFMDHFMPRMDGIETVKKLRIMGYTLTIIALTANALAGQAEVFLEHGFDGFISKPIDIRQLNVTLNKYIRDKYPPEVIEAARRQTARLMAKTSIEKAKPSAGSELAAIFTRDAEKAISELKTILSGSFSNKDDLLQFVINVHSMKSALANIGETELSDAALKLELAGRSENIPVITAETSAFLXTLEEVIKRNKPKEDIXVENATVKERRXRPSRVFSEXTEYYPYSMRENDEKTPQKHCLN

SEQ ID NO: 26297 - DNA, 570 bp, Unknown
  Obtained from environmental sample
  misc_feature (1)..(570): n is a, c, g, or t
gtggtttcgcaaaacagcgagacccacaagaccatttcaatggcttttgaaaacaggcagattaaaaagcgctatatagcggtggtttgtgggcggccttcctggaaggaaaccgcctgcgacctcgcccttgttccgaacggaaacaagaagcaccttaccatcatcgacaggttcaggggcaagaatgcgctgactgcttttcgccttttgggaagcgcggggaattacagcgcccttgaagccctgcctgaaaccggcaggattcaccagatacgcgtacaccttgccgcgcttggtcatcccgttgtctgcgatgaactttacggaaacacaaaaccggttctgctttccgccatcaagcgctcgtggcgcggcgacccgttggatgaacgcccgcttctttcacggctgggccttcacgccgcagagcttttcattcccgattacgttgtagaaggtacggaagctatggggctaggccttaaagccccgcttcccagggacatgagcgcccttatccgccagatggaaaaagcaagcggagtgaaatttattcaaaaacaatga

SEQ ID NO: 26298 - protein, 189 aa, Unknown
  Obtained from environmental sample
  DOMAIN (1)...(98): RNA pseudouridylate synthase
  misc_feature (1)..(189): Xaa is any amino acid
MVSQNSETHKTISMAFENRQIKKRYIAVVCGRPSWKETACDLALVPNGNKKHLTIIDRFRGKNALTAFRLLGSAGNYSALEALPETGRIHQIRVHLAALGHPVVCDELYGNTKPVLLSAIKRSWRGDPLDERPLLSRLGLHAAELFIPDYVVEGTEAMGLGLKAPLPRDMSALIRQMEKASGVKFIQKQ

SEQ ID NO: 26299 - DNA, 330 bp, Unknown
  Obtained from environmental sample
  misc_feature (1)..(330): n is a, c, g, or t
atgtctgataacgatgaaataaccgcaataaaagacagtatcttaaaaactgtgggcgaaaattgtgaaaaaatcattctctttggttcatatgcctatggaatgcccagagaaggcagcgactatgatgtctttgtcattcttaaagatggtacagaaaaacctatcttggttttacagaatatataccgaggcttgtctcaaaacccgaattacaaagcggttgatgtccttgcaaattataaaagccgctttgaagtaagaagcaaattaccaaccattgaaaaaactattgcccaaaaaggaattgttctctatgaccacgcttga

SEQ ID NO: 26300 - protein, 109 aa, Unknown
  Obtained from environmental sample
  DOMAIN (7)...(105): Nucleotidyltransferase domain
  misc_feature (1)..(109): Xaa is any amino acid
MSDNDEITAIKDSILKTVGENCEKIILFGSYAYGMPREGSDYDVFVILKDGTEKPILVLQNIYRGLSQNPNYKAVDVLANYKSRFEVRSKLPTIEKTIAQKGIVLYDHA

SEQ ID NO: 26301 - DNA, 426 bp, Unknown
  Obtained from environmental sample
  misc_feature (1)..(426): n is a, c, g, or t
ttgaaaaaactattgcccaaaaaggaattgttctctatgaccacgcttgatttggcaaaagaatggcttagatacgcaaaaagcgacctaaataccgctaaacatatgtttaatgatgttaacccaaaggaaactgaaatttcatgttatcactcgcaacaatgcgccgaaaaatctcttaaagcttatttgatagtaaaagaaatagaccatccatttatacatgatttggttgaattaataaaactatgcgctgatcaggaaacaagtttttcaacaattcaaccgtattgtgtttccctaaatccatatagtgttcaggtacgctatcctaatgaattagctgttgatgacagcatggctggacaagccattgattatgctgaaaaaatttttgagttttgtgaaaaaataataaacaaatga

SEQ ID NO: 26302 - protein, 141 aa, Unknown
  Obtained from environmental sample
  DOMAIN (19)...(138): HEPN domain
  misc_feature (1)..(141): Xaa is any amino acid
MKKLLPKKELFSMTTLDLAKEWLRYAKSDLNTAKHMFNDVNPKETEISCYHSQQCAEKSLKAYLIVKEIDHPFIHDLVELIKLCADQETSFSTIQPYCVSLNPYSVQVRYPNELAVDDSMAGQAIDYAEKIFEFCEKIINK

SEQ ID NO: 26303 - DNA, 504 bp, Unknown
  Obtained from environmental sample
  misc_feature (1)..(504): n is a, c, g, or t
gtgggcggcgcaaaaccgcttgtcggccgtcttctaatatttgacgcgtggcgcatggcgttccgcgagctaaaacttgataaaaatccagattgtcccgtatgcgggaaatctccttccattcacgaacttatagactacgaacaattttgcggtttgaaaaaaaacaccgacagcaagcctatagataccataaccgccctcgaattaaaaaaacgccttgataacggagataaaattcaatttatagatataagagaaccccacgaacgcgccattgtaaaattccctgacgcgaaagtaattcccctcggccagttggaaaggcgcatggaagaattagacccggccatagacgcggtgttcctgtgcaaaatcggccagcgcagcattttgggaatacgcacattacaggacgccggatacaaaggaaaattgttgaaccttcaggacggccttaacgcgtgggctcgcgatgtagacaaaagcatgcctgtttattga

SEQ ID NO: 26304 - protein, 167 aa, Unknown
  Obtained from environmental sample
  DOMAIN (66)...(159): Rhodanese-like domain
  misc_feature (1)..(167): Xaa is any amino acid
MGGAKPLVGRLLIFDAWRMAFRELKLDKNPDCPVCGKSPSIHELIDYEQFCGLKKNTDSKPIDTITALELKKRLDNGDKIQFIDIREPHERAIVKFPDAKVIPLGQLERRMEELDPAIDAVFLCKIGQRSILGIRTLQDAGYKGKLLNLQDGLNAWARDVDKSMPVY

SEQ ID NO: 26305 - DNA, 1101 bp, Unknown
  Obtained from environmental sample
  misc_feature (1)..(1101): n is a, c, g, or t
ttggatgcagatgttcaagaatgcgcgggagtttattgcctgaaccacgtttataatttgaaagactacgattttgttttcccagccgagcttattgcgcaaaaaacagcaggcaaagggaaaacgaaaattttgcactgcccaaaaaatggcggcgcattacgggttttggagagctgccgaataactgacttattcaaagcgggggattgcatagttgtgaataatacgcgggttattccagcgcggctactaggaaaaaccaagcacggcggcaaagcggaaatttttttgctcagacaattggaacctgccgcagataacaccgctatgtgggaggcatgggttaaacccggcaaggcttttgaaaacggaaaggaaatttttgtttcaaacataaaatgcaaaagcctcggatttgcaaaaacacaggattctaaaacccgcataataaatttctccatatcaaactcggagttcaattcttttttggaaaaaaacgggcagattcctttgccgccatatataaatagaagcgtttgcacaagcgatgaaagcgattaccaaacgatttttgcaaaatatgcaggagctgtggctgctccaactgcgagcttgcattttagcgaagatatggcaaacgaacttaaaacaaaaggcgtgttctttgcagaaacaaccttgcacgttggtcctggtacttttgaaaacataagtgaaacttcggattttcgcaggcataaaatgcacagcgaggaatacgaattaaacgagcaaaatgcaaacataataaacgaatgcaaaaaaaatggcggaagaataatttgcataggcacaacaagcacgcgagttttggaaacggttgcaaccgaagatggttttgtgaaagcctctagtggtgcaacggatatttttatttaccccggttttaaattcaaagcaacagatgctttacttacaaattttcattggccaaaatcctctttgattctgctggtatctgctttttatggcagggaaaataccttgaatgcttacaaatacgctgttgaaaattccttaaagctctttagctatggagatggaatgttgattatttaa

SEQ ID NO: 26306 - protein, 366 aa, Unknown
  Obtained from environmental sample
  DOMAIN (18)...(240): Queuosine biosynthesis protein
  misc_feature (1)..(366): Xaa is any amino acid
MDADVQECAGVYCLNHVYNLKDYDFVFPAELIAQKTAGKGKTKILHCPKNGGALRVLESCRITDLFKAGDCIVVNNTRVIPARLLGKTKHGGKAEIFLLRQLEPAADNTAMWEAWVKPGKAFENGKEIFVSNIKCKSLGFAKTQDSKTRIINFSISNSEFNSFLEKNGQIPLPPYINRSVCTSDESDYQTIFAKYAGAVAAPTASLHFSEDMANELKTKGVFFAETTLHVGPGTFENISETSDFRRHKMHSEEYELNEQNANIINECKKNGGRIICIGTTSTRVLETVATEDGFVKASSGATDIFIYPGFKFKATDALLTNFHWPKSSLILLVSAFYGRENTLNAYKYAVENSLKLFSYGDGMLII

SEQ ID NO: 26307 - DNA, 726 bp, Unknown
  Obtained from environmental sample
  misc_feature (1)..(726): n is a, c, g, or t
atgaatctaaaaaaatacgaatactggtttatcgtaggaagccaggacctttacgggaatgaaacgctaaaacaagtcgccgatcatgcccgtattatgacggatgaattcaacaaggatgctatgctttcaggcgcggttgtattaaaacctaccgcgataacgccgcaggcaatacgcggtctttttgaggaagcgaacacctcaaacaactgcgccggtatcatcacatggatgcatacattctcgccttcaaaaatgtggatacaggggcttgcgcttaaccgcaaaccgcttttacatctccatacgcaatttaaccgggatatcccttggtcttcaattgacatggattttatgaacttaaaccagtcggcgcacggcgaccgcgagcacgggtttattcatacaaggatgaagcttccacgcaaagtagtcgccggtttctggcaggataaggaaattcgccgccgcatggacgtgtggatgcgcgccgccgccgcgagaaaagacgggatggattcaaccgttatgcgatttggtgacaatatgcgggaagtggctgttaccgaaggcgacaaagtcgaagctcaaatcaagtttggctggcaggtaaacacatggggaatcggcgaccttgccgcacgttacgcgaaaatcagcgacgcgcaggcggaaaagctggcggaagaatacgcagtaaatacgaacttgcgcctgatctaa

SEQ ID NO: 26308 - protein, 241 aa, Unknown
  Obtained from environmental sample
  DOMAIN (1)...(240): L-arabinose isomerase
  misc_feature (1)..(241): Xaa is any amino acid
MNLKKYEYWFIVGSQDLYGNETLKQVADHARIMTDEFNKDAMLSGAVVLKPTAITPQAIRGLFEEANTSNNCAGIITWMHTFSPSKMWIQGLALNRKPLLHLHTQFNRDIPWSSIDMDFMNLNQSAHGDREHGFIHTRMKLPRKVVAGFWQDKEIRRRMDVWMRAAAARKDGMDSTVMRFGDNMREVAVTEGDKVEAQIKFGWQVNTWGIGDLAARYAKISDAQAEKLAEEYAVNTNLRLI

SEQ ID NO: 26309 - DNA, 312 bp, Unknown
  Obtained from environmental sample
  misc_feature (1)..(312): n is a, c, g, or t
ttgccccatgtcgcctacaatgaaaacgatatatggccgctttccgccgcgcttaccccccattcaagccacgctatggtgttatgcggcgcgtacggcaagggcagtctctacgtgctgacaattccggacgctttcgccgatttgtacaatcttcccgccgaaacgctcactgtcctgcgcggggagttagatttgcccataacgctggaatgcgcgggccgcgtgtccctgttcctctatgacaacgatacttttattctgcaatcattccttgacaggctcggaacggggtccggcatccgtcattaa

SEQ ID NO: 26310 - protein, 103 aa, Unknown
  Obtained from environmental sample
  misc_feature (1)..(103): Xaa is any amino acid
MPHVAYNENDIWPLSAALTPHSSHAMVLCGAYGKGSLYVLTIPDAFADLYNLPAETLTVLRGELDLPITLECAGRVSLFLYDNDTFILQSFLDRLGTGSGIRH

SEQ ID NO: 26311 - DNA, 993 bp, Unknown
  Obtained from environmental sample
  misc_feature (1)..(993): n is a, c, g, or t
ttgatgggaagcatgtgttttacagacccggagaaccgcaaaaggttaggcgaaattgccgcttacaccgcgtcgctttttgacgaagtaatactggacgatttttactttacaaattgccgctgtgaatcatgtataaaagcgaaaggagaccgcgattgggcgacattccgccttgcgctgatgaacgacatttcagaaaacgtgataatcaaaaacgcgaaggcggcgaatccgaaggtaaactgcattatcaagtaccccaactggtacgacagtttccaggctaacggctacaaccttgaagacgaatcgaaaatgttcgacatgatctacacaggaaccgagacacgcgatccacattacacccatcaaaatttgccgcgttatttaagttattttctgccccggctgtttgagcacatcaagccgggaaaaaacggcggcggctggtacgacctctttgattgttcgctggaagactatgtacagcaggcttatttaactcttttcgcgaaatgccgcgaacagatgcttttctgcttccccttgctcgtcaacgccccgctttacaccgccgccgcgggcgcgttcttcgatgaagctgatctgtttatcgggcagacaggggagcctgtgggtgttgcctgttacaagccgtatcactcgtacggggaaaggctgcttcatgaatttattgggatgtgcggcgttcccctggatccctatccttattacccggaaaacgcgaagacggtatttcttacggctgacgctgcctgggacaaagaaattgtcggaaagataaaaatgagtctcttcgaaggaagcaaagtttttattacaagcggggtgtatgaaaaatgtcggggtaagggaataaaagcatactgccccttgaaattacaaacagaaaaatatccacggatgtttttaccaacagcgcttttggcagcggcaaccgcgggtacgcaaaagctttttgtcggataa

SEQ ID NO: 26312 - protein, 330 aa, Unknown
  Obtained from environmental sample
  misc_feature (1)..(330): Xaa is any amino acid
MMGSMCFTDPENRKRLGEIAAYTASLFDEVILDDFYFTNCRCESCIKAKGDRDWATFRLALMNDISENVIIKNAKAANPKVNCIIKYPNWYDSFQANGYNLEDESKMFDMIYTGTETRDPHYTHQNLPRYLSYFLPRLFEHIKPGKNGGGWYDLFDCSLEDYVQQAYLTLFAKCREQMLFCFPLLVNAPLYTAAAGAFFDEADLFIGQTGEPVGVACYKPYHSYGERLLHEFIGMCGVPLDPYPYYPENAKTVFLTADAAWDKEIVGKIKMSLFEGSKVFITSGVYEKCRGKGIKAYCPLKLQTEKYPRMFLPTALLAAATAGTQKLFVG

SEQ ID NO: 26313 - DNA, 351 bp, Unknown
  Obtained from environmental sample
  misc_feature (1)..(351): n is a, c, g, or t
ttgacttttattgattcggtcctgcttctttatntgcgtcagcaactggcacaggccgcctcacacggcggacgcgctgttgtatcaaaagaagatattgtggaacacctcagtctgtatgatcgtcagggaaataccgacaaagccggatttgataaacgtgttcttgcatcaattgagaagattaaaaaatacaacatcatacagaaaattcgtgctaccgatgatcgttttgaggtatcgccgactctgaaattactgttctctgctgaggaaattcaggcacttacaacagtttatcaacacatgactactgatgaatcgcatgacggtggcggggaagaagaatga

SEQ ID NO: 26314 - protein, 116 aa, Unknown
  Obtained from environmental sample
  misc_feature (1)..(116): Xaa is any amino acid
MTFIDSVLLLYXRQQLAQAASHGGRAVVSKEDIVEHLSLYDRQGNTDKAGFDKRVLASIEKIKKYNIIQKIRATDDRFEVSPTLKLLFSAEEIQALTTVYQHMTTDESHDGGGEEE

SEQ ID NO: 26315 - DNA, 864 bp, Unknown
  Obtained from environmental sample
  misc_feature (1)..(864): n is a, c, g, or t
gtgcattgcgactcccatattgggctttaccgatttaccgatttttctgaaataaactccggagaactgcctattggctatgcagaagaagccgttgacaccgcggttaagcagatgaaagatttggttatgtacaacccgtctagccttgtgcaaaaatcaaaatactcaaaagcaacagacctcttgggagatatagaccttgcaataagaagccgctggatgtttctcgtttatcaaccaaaaatagatatagcaacaggaaaaattcaatctgtggaagctctaataagatggaaccaccccgtgaaaggttttgtgccacctggtttatttatccctcaggccgagcaaagcactttgatagaaaacataacagactttgttattaaacaagccattttgcagttaaagctgtggcagagaagtggcatagatgtggacattgccgttaatgtttctacctataatctgttgcagccaaattttgtgaacaaggttttgaatttgctgcaagagaacaaactagatactaaaaaattggaaattgaaataaccgaaggttctttgatcacagattttcagcacgttttgaatggactaaaacgccttcacgatgcaagcataaaaattgccttagacgattttggcaccggatattcctcgcttcagtacctgcaaaagctgcctatagattttttgaaaatagaccagtcttttgttcgcaatttggaaacgagcaaacagtcaaaagaaattgtgaaagccatagtggatttagcgcacacgataaatataaaaaccatagccgaaggaatagaaactatggcagactatgattatttgacacagcgttggttgtga

SEQ ID NO: 26316 - protein, 287 aa, Unknown
  Obtained from environmental sample
  DOMAIN (58)...(285): EAL domain
  misc_feature (1)..(287): Xaa is any amino acid
MHCDSHIGLYRFTDFSEINSGELPIGYAEEAVDTAVKQMKDLVMYNPSSLVQKSKYSKATDLLGDIDLAIRSRWMFLVYQPKIDIATGKIQSVEALIRWNHPVKGFVPPGLFIPQAEQSTLIENITDFVIKQAILQLKLWQRSGIDVDIAVNVSTYNLLQPNFVNKVLNLLQENKLDTKKLEIEITEGSLITDFQHVLNGLKRLHDASIKIALDDFGTGYSSLQYLQKLPIDFLKIDQSFVRNLETSKQSKEIVKAIVDLAHTINIKTIAEGIETMADYDYLTQRWL

SEQ ID NO: 26317 - DNA, 636 bp, Unknown
  Obtained from environmental sample
  misc_feature (1)..(636): n is a, c, g, or t
atgaacggtgttttttttgaaaagaaagaggaaaagataataatggtggcaacggatgggcgcaggctttcttatattgataaagacgccaataacattgaagattttaacggagtgataattcctcccaaaattttgaatattattacaaaaagagccggagatgaagggcttatcggaatttccgtaattgataaaatgatttttgtccgttttgggttttataatcttgcctcggtattgcttgacggacagttccccaactacaggaaagttataccggaagatcataaaagttccttttatgttgacaggctggaaatactggatgcccttcggcgggtatcgcacgttgttgaacagaactcgcaccgggtatatatagggcttaaaccggggataatggagatttattcagaggaaggcgaaataggggaaggaagggaagaaattccctgcaagtacgacggggaagaagtgtcattcgcccttaactatcaataccttgaagagccttttaaggttatgaactgtgaagaaatttgcataaattttaccgggccgagtaaggcgataaccatagtcccggtcccaaagacggattatttccacatcgtaatgcccatgcaatcctga

SEQ ID NO: 26318 - protein, 211 aa, Unknown
  Obtained from environmental sample
  DOMAIN (1)...(88): DNA polymerase III beta subunit, central domain
  misc_feature (1)..(211): Xaa is any amino acid
MNGVFFEKKEEKIIMVATDGRRLSYIDKDANNIEDFNGVIIPPKILNIITKRAGDEGLIGISVIDKMIFVRFGFYNLASVLLDGQFPNYRKVIPEDHKSSFYVDRLEILDALRRVSHVVEQNSHRVYIGLKPGIMEIYSEEGEIGEGREEIPCKYDGEEVSFALNYQYLEEPFKVMNCEEICINFTGPSKAITIVPVPKTDYFHIVMPMQS

SEQ ID NO: 26319 - DNA, 645 bp, Unknown
  Obtained from environmental sample
  misc_feature (1)..(645): n is a, c, g, or t
gtgataatttcttcattacgcaccgcggcgttcaggaatttatcggatgccgttgtggaaaccgcggcaaaaaatatttttctcgtgggggaaaacggccagggcaagacaaattttttagaggccctttatttctgctcctacgcttcgtcttttcgcggttcttgtgacagtgatattgcacaaaatgaaaagaaggatttttccgcctctattacgacggtagcgcctgcggagaaaagcatccgcggcgaggttcttgtcaaattcgacaaaggcaaaaaatctgtatttattgacggcaaaaaaacggaggaccgcaaagagctcctttcggtagttccctgcgtcgtgttctgccatgaggatatggaatttgtagccggtagcccggaacggcgccgctggttttttgatcaggcgctcagcctgtatgatcccgtgtatctggacgatctccgcggctaccgcagggtgttaaaatcgcgtaacagcgtgttgagggactacaggcaggggcataacgccagcccggagccgctgcttgacgccctggatcagcaggccgcgttatacggatttaggttgatgggnaaacgggaaacggcggcgcggcttttttcacagtttttgcacgctttttga

SEQ ID NO: 26320 - protein, 214 aa, Unknown
  Obtained from environmental sample
  misc_feature (1)..(214): Xaa is any amino acid
MIISSLRTAAFRNLSDAVVETAAKNIFLVGENGQGKTNFLEALYFCSYASSFRGSCDSDIAQNEKKDFSASITTVAPAEKSIRGEVLVKFDKGKKSVFIDGKKTEDRKELLSVVPCVVFCHEDMEFVAGSPERRRWFFDQALSLYDPVYLDDLRGYRRVLKSRNSVLRDYRQGHNASPEPLLDALDQQAALYGFRLMGKRETAARLFSQFLHAF

SEQ ID NO: 26321 - DNA, 876 bp, Unknown
  Obtained from environmental sample
  misc_feature (1)..(876): n is a, c, g, or t
atgatggcagtggagaataaattccttgattggggatcccttatccgggttaagcctgtaaaattccctatatgggacaagattgaccatgaaatggaaatcccgaaggacgggatcatagaaaccactgtcggaaggctggtgttcaacgaggaacagcccagggagattcccttcgtcaattatgaaatgaaagacaaggaacttcgcgcccttattgagcatgtcttcaagaaaaacggttcatgggttacggtaaaaatgctggatgcgattaagtcgaccggctaccgttatgcgacagtttttggcgccaccatcggcattgatgatattgttgttcccaaagaaaagcccgaaatgatcgataaggcaaacagggaagttgaggcgattcaggcccagtggcgcaagggcattatgacccaggaggaacgctacaataaagtcattgatgtatggaacaagaccaacgaggaactgaccaacatcatgatgaagaccctggaggcggatcgtgacggctttaactcgatttacatgatggcgaactccggggcgcgcgggagcagaaaccagatacgccagcttgccgcgatgcggggccttatgggcaagccttccggcgaaattattgaactgccgatacgctcaaacttcaaggaagggctttccgttattgagttttttatttcaactaacggcgcgcgcaagggccttgcggacaccgcccttaaaaccgccgaagccggttacctcacgcggcggcttgtggatatagcccaggatgtggtggtgaacgagaatgactgcggcactattaacgggatttcctataccgccgtaaggaaggcgaagacattgttgagcctttga

SEQ ID NO: 26322 - protein, 291 aa, Unknown
  Obtained from environmental sample
  DOMAIN (2)...(112): RNA polymerase Rpb1, domain 3
  misc_feature (1)..(291): Xaa is any amino acid
MMAVENKFLDWGSLIRVKPVKFPIWDKIDHEMEIPKDGIIETTVGRLVFNEEQPREIPFVNYEMKDKELRALIEHVFKKNGSWVTVKMLDAIKSTGYRYATVFGATIGIDDIVVPKEKPEMIDKANREVEAIQAQWRKGIMTQEERYNKVIDVWNKTNEELTNIMMKTLEADRDGFNSIYMMANSGARGSRNQIRQLAAMRGLMGKPSGEIIELPIRSNFKEGLSVIEFFISTNGARKGLADTALKTAEAGYLTRRLVDIAQDVVVNENDCGTINGISYTAVRKAKTLLSL

SEQ ID NO: 26323 - DNA, 834 bp, Unknown
  Obtained from environmental sample
  misc_feature (1)..(834): n is a, c, g, or t
ttgaaacttcttatatgccgtattttcgattctcttancggcgagggaaaacgcggcgcattggaaatagcgcaaatcggtcaaatagcggaaaacgttcactttggaaaaccctgcggattaatggatcaggcggcatgcgcctgcggcggcgcggtagcgattgatttcgccgattcttcgcgccccgtaataaagcaaataaattttgatcccgccaccgccggctacgctctttgcgtagtgaacacaggcggcagtcacgccgatcttaccgccgattacgcttccattccggcggaaatgaaatccgtcgccgcgttctttggcaagactgtacttggagaattgaaaaaagaaaccgtcctttcccgcgccgccgaaacgcgaagttcattgggagacagggcattcctacgcgccattcactttttcaacgaaaacgaaagagtagacgcaatgaccgcaattttattggaaatggaaaagtccgcaacagccgccgacaaacaacgggcgttaagccgctacttggatttggtcaacgaatcgggtgattcctcatgggagtttttacaaaacgtattctcccctacccgccccgaagctcaaggcatcgccgcggctcttgcgctgacaaaagattttttccgtaagcaaaacttgcgaggagcgtgcagagtccacggcggcggttttgccggaaccattcaagcctatgtccccgtagacgcaataaacgcctaccgcgcgtacatcgaagccgtattcggcgcaaactcgctgacggtattgcggataagggctaagggcgcagtggagttggagttttaa

SEQ ID NO: 26324 - protein, 277 aa, Unknown
  Obtained from environmental sample
  misc_feature (1)..(277): Xaa is any amino acid
MKLLICRIFDSLXGEGKRGALEIAQIGQIAENVHFGKPCGLMDQAACACGGAVAIDFADSSRPVIKQINFDPATAGYALCVVNTGGSHADLTADYASIPAEMKSVAAFFGKTVLGELKKETVLSRAAETRSSLGDRAFLRAIHFFNENERVDAMTAILLEMEKSATAADKQRALSRYLDLVNESGDSSWEFLQNVFSPTRPEAQGIAAALALTKDFFRKQNLRGACRVHGGGFAGTIQAYVPVDAINAYRAYIEAVFGANSLTVLRIRAKGAVELEF

SEQ ID NO: 26325 - DNA, 684 bp, Unknown
  Obtained from environmental sample
  misc_feature (1)..(684): n is a, c, g, or t
atggaagattacctgcccggtttttaccagcattctcttgtatatatttccggcccaagccacgccgaagaagtatcccgcgggaaaataacagggcttatagccgcaagtgaaaacgcgaaaaattccatccgtttcagggacttattaaaaagcccggggctttttgtttattcatcttttgatgtccacggagtacaggcggcggcggcggcaaaaaacgtaatagccatcgcgtttgggatgttagacgcaataagatccatcggcggctcggatatgttcggcgacgggacagattcccttttgcttgcggcaggcttaaacgaaatacagctccttggcaaggctcttggcgcgactcatcctgaaacatttacctccatcgccggtattggcgatttggatgttacctgccgttcaatctacggcagaaacaggcgttttggcagggaaataatcgaaaaaaatattttggagccgtataaagatttagacgatcttataactcgtattaaggaaataggctaccttcccgaaggcgtagcggctgcaaaatataccagaatccttgcggaaaagcataagcttaaaatgcctgtttccataggattatgtcggctactgaaccgcgaattagacccctatgaatttgtacggaatttctttgaggatttgaggtaa

SEQ ID NO: 26326 - protein, 227 aa, Unknown
  Obtained from environmental sample
  DOMAIN (61)...(222): NAD-dependent glycerol-3-phosphate dehydrogenase C-terminus
  misc_feature (1)..(227): Xaa is any amino acid
MEDYLPGFYQHSLVYISGPSHAEEVSRGKITGLIAASENAKNSIRFRDLLKSPGLFVYSSFDVHGVQAAAAAKNVIAIAFGMLDAIRSIGGSDMFGDGTDSLLLAAGLNEIQLLGKALGATHPETFTSIAGIGDLDVTCRSIYGRNRRFGREIIEKNILEPYKDLDDLITRIKEIGYLPEGVAAAKYTRILAEKHKLKMPVSIGLCRLLNRELDPYEFVRNFFEDLR

SEQ ID NO: 26327 - DNA, 1023 bp, Unknown
  Obtained from environmental sample
  misc_feature (1)..(1023): n is a, c, g, or t
gtggctctgatgggtttgtgtggagagcctgcggatgcggctattaaattttggcacacaatagcacctgcggtaatgttcagggctttgcaaggaactttaaccagccttgtggcaacccacggctataccttatggaatttgtttgcaaacataataaccctcataataaatgtcactttgaactatatatttatggagggttattttggcgttccggtttttatgcaaggggtttatggcgtggcaatagcaaccggtttgtcttgggctatttctgtaatagcattatggataattgttctttaccatcttgaacacaaaacgaaagtaagagatattaaaaaaggctactatgtgcttttgccagaatggctccgcatagggattccagcggctgctgaacctgtgagttttcaactgtttcaggtttttgtcatggcaatgtttgttaaactaggtcatgatctcggcgatgcatcaattgtacctgctagggtttttgccggagcttttgcaatgttcgctgtggttttaagcgttgggcttggaagcgggagccaaatactcgtggctcatttggttgggaacaaagagtttgacaaagcgaataaaagaatgcaccaaagccttgtttggagcagttccagcgcactggtggtggcggtggcggtggctctaactgggcagtatctgttgtctttttacacgactgaccctaacatactgcatttgggtggtttgctcctttggtgcgatgttgctctgcaaccgttcaaagcctcaaatatcgtcataacaaatgccctaagagcttcgggagattccgcattccctgctgtgtttggaaccatatccatgtggacactggggcttggcactaccctattcctgtgttttggaatagagcttggggcgatgggtctctggcttggaatggcatctgatgaattctaccgctccattgccaactacacccgctggcgcagaggtaaatggaagagcaagggagtgattaggtag

SEQ ID NO: 26328 - protein, 340 aa, Unknown
  Obtained from environmental sample
  DOMAIN (131)...(297): MatE
  misc_feature (1)..(340): Xaa is any amino acid
MALMGLCGEPADAAIKFWHTIAPAVMFRALQGTLTSLVATHGYTLWNLFANIITLIINVTLNYIFMEGYFGVPVFMQGVYGVAIATGLSWAISVIALWIIVLYHLEHKTKVRDIKKGYYVLLPEWLRIGIPAAAEPVSFQLFQVFVMAMFVKLGHDLGDASIVPARVFAGAFAMFAVVLSVGLGSGSQILVAHLVGNKEFDKANKRMHQSLVWSSSSALVVAVAVALTGQYLLSFYTTDPNILHLGGLLLWCDVALQPFKASNIVITNALRASGDSAFPAVFGTISMWTLGLGTTLFLCFGIELGAMGLWLGMASDEFYRSIANYTRWRRGKWKSKGVIR

SEQ ID NO: 26329 - DNA, 738 bp, Unknown
  Obtained from environmental sample
  misc_feature (1)..(738): n is a, c, g, or t
atgcacgaagcggatctcccctatcttcaaccgctcaatcctgaacaaaggcaggccgttcttcataccgggaagccgctcttaatacttgccggagcgggatcaggaaagacaagagtaataaccacaaaaatcgcatggttaataagggaacagagaatggatccccgctctattctggcagtaacatttaccaacaaagccgcaagggaaatggcgtggagagcaaggcagattgatgaacgagcagaaaacgcgatgcttcgaacgtttcactcgtttggagcgtggtttttaagacgttacggaaaccttgccatgcttgattcggcctttgttatctacgatgacgatgatgtcatttcacttctttccgtaataatggaaaacgccccaagagccgaagtcaaagaatttgcgcataatatttcacgcgcaaaggattatttccttctgccggacgatccgttactcgctaaaattgacagcaggaaaaagttccgcagaatatatgaacagtatgaagagcgaatgacgcagatcggcaatgttgactttggggacttgattaaaaaacctgtggagatactgcgcagtcagcctgatgtagcccggcgtttccgtgagcgggttaaaagtattcatggtggacgagtatcaggatgcgaatgtagcgcagttccacctgcttanagagttgtgcggcgaagatacttatgtgtgcgtagtaggcgatga

SEQ ID NO: 26330 - protein, 245 aa, Unknown
  Obtained from environmental sample
  DOMAIN (12)...(245): UvrD/REP helicase
  misc_feature (1)..(245): Xaa is any amino acid
MHEADLPYLQPLNPEQRQAVLHTGKPLLILAGAGSGKTRVITTKIAWLIREQRMDPRSILAVTFTNKAAREMAWRARQIDERAENAMLRTFHSFGAWFLRRYGNLAMLDSAFVIYDDDDVISLLSVIMENAPRAEVKEFAHNISRAKDYFLLPDDPLLAKIDSRKKFRRIYEQYEERMTQIGNVDFGDLIKKPVEILRSQPDVARRFRERVKSIHGGRVSGCECSAVPPAXRVVRRRYLCVRSRR

SEQ ID NO: 26331 - DNA, 624 bp, Unknown
  Obtained from environmental sample
  misc_feature (1)..(624): n is a, c, g, or t
ttgcttcttattgccgctatcgcgtggatggggtacatccgttacgaaaagcgatatttttactggatacgctactgcgccggaatctttatcgtctcgctgggcggttcatacctggcgcagaagatgctcaaacagtaccaggtaatgaggcttattgtttttatggatcccaatgtagacccaaggggctttggctggcagatcatacagtctgttaccgcaattggatctggaggcccgtttggaaaaggctatttgcagggaacccaaagccattaccggtatctgccggagcagagcacggatttcatcttttcaatcctctcggaagaatgggggtttgtcggtggagttttggtgttcgcgttattccttcttatttttttaaggctcgtaaggataatgaaaattacatcggattcttttggttcctacatagttgcagggctcgtttatatgttcgcgtttcactttatcgttaatgtgggaatgaccatgggaattatgcccattaccggtatcccgctaatgtttgtgtcctacggaggatcggcggttttgtcttcaatgatcggaataggattggccatgagtattcatgtaagaaggtatacccattaa

SEQ ID NO: 26332 - protein, 207 aa, Unknown
  Obtained from environmental sample
  DOMAIN (1)...(206): Cell cycle protein
  misc_feature (1)..(207): Xaa is any amino acid
MLLIAAIAWMGYIRYEKRYFYWIRYCAGIFIVSLGGSYLAQKMLKQYQVMRLIVFMDPNVDPRGFGWQIIQSVTAIGSGGPFGKGYLQGTQSHYRYLPEQSTDFIFSILSEEWGFVGGVLVFALFLLIFLRLVRIMKITSDSFGSYIVAGLVYMFAFHFIVNVGMTMGIMPITGIPLMFVSYGGSAVLSSMIGIGLAMSIHVRRYTH

SEQ ID NO: 26333 - DNA, 465 bp, Unknown
  Obtained from environmental sample
  misc_feature (1)..(465): n is a, c, g, or t
atggcttccgatgatgcgcgtggaagtgtaccggcggtttataaacccaaagacgaccaggtgctgaaggcaacggtaattcgcgtaatagcggtggattcaagcggcaaacaaagcggtgtcgcgactaaaacatattttatcggcaataatttggatggttacgggaatacccgcatagtctctttggtttctgatcctgacaatctggtaagcgaagacaggggcattatggtaagaggaaaagcaagctacagatgggacagcaatcctccttataattaccggatgaagggagccgactgggaacgccccgcgtatttagagctttttgaagggaatgacagaagtaaagcggcgctttcaaccggagtgggcatcagagtccgcggcggttattcaagaggcgtgnggcaaaaaagtttcagtgtgtattttaaggaacaatacggcataaaaacctga

SEQ ID NO: 26334 - protein, 154 aa, Unknown
  Obtained from environmental sample
  misc_feature (1)..(154): Xaa is any amino acid
MASDDARGSVPAVYKPKDDQVLKATVIRVIAVDSSGKQSGVATKTYFIGNNLDGYGNTRIVSLVSDPDNLVSEDRGIMVRGKASYRWDSNPPYNYRMKGADWERPAYLELFEGNDRSKAALSTGVGIRVRGGYSRGVXQKSFSVYFKEQYGIKT

SEQ ID NO: 26335 - DNA, 885 bp, Unknown
  Obtained from environmental sample
  misc_feature (1)..(885): n is a, c, g, or t
ttgatacctaaagacacgactcttggcactaccggcgcggttaaagccgacggtaaaacgcctgtaacgcagtataaaggctttatgttaagaaacggcgcgaatgattgtgagtatacaaaattttacgatgtatttttacaggatttgctgagcgatcgcagttttgccacgcaagcctctgttccctgtatcgtgtatttaaacggtgaatactggggaccatataactttcaggagaggtacagcgacaaccataccgaatataaatacggcgttgataaagacaatgttatctccttcgataactgggaattagacgacggcaacccgggagaggaaaatttgttttggagtatgatggatatggcgaaaaacgatatgtccaatccggcaaactacaatgctttttgcgatgtttttgatattgacaactttattgattattgggcggcggaaatttacatctacaatgaggattggcctcataacaattaccgtttatggagaacgcgaaatgtagagccgggtaacccctatggcgacacaaaatggcgttatcagatgtttgatacggaatttgccatgggaatttacaacagcggcaatcttacaggtcaatccgataaagatgcttttgataaaattctgaccggaagcgaaagcagtaatccaatcaacaaattattcaaagcattattggcaaatcctgatttttgcaggaaatttgtaaataccatgatggatctttacaatataaactttcaccccgacaattatgtacccaaattgaatagttatgcggcggtatacaaaccggcttatgaccggttatttttccagatggggttatcctggaacatggacttcggtttatcaaaataa

SEQ ID NO: 26336 - protein, 294 aa, Unknown
  Obtained from environmental sample
  misc_feature (1)..(294): Xaa is any amino acid
MIPKDTTLGTTGAVKADGKTPVTQYKGFMLRNGANDCEYTKFYDVFLQDLLSDRSFATQASVPCIVYLNGEYWGPYNFQERYSDNHTEYKYGVDKDNVISFDNWELDDGNPGEENLFWSMMDMAKNDMSNPANYNAFCDVFDIDNFIDYWAAEIYIYNEDWPHNNYRLWRTRNVEPGNPYGDTKWRYQMFDTEFAMGIYNSGNLTGQSDKDAFDKILTGSESSNPINKLFKALLANPDFCRKFVNTMMDLYNINFHPDNYVPKLNSYAAVYKPAYDRLFFQMGLSWNMDFGLSK

SEQ ID NO: 26337 - DNA, 867 bp, Unknown
  Obtained from environmental sample
  misc_feature (1)..(867): n is a, c, g, or t
atgccgcctcgccccttagccttgtacgctctgattctgatattgtctcttttcttgacagcaatccaaacgccgccgcctggctcgcggacaccatgtcccaggaacccgcgagcctgcttgctttcatcctcctggtatcagaaccagcttgcggggtatgccgggctcactgttcttgaaaaactntccgttgcgccgggagaatcatcgggtaatccgcctttcccgcagatacgggtagccggccttatgttcaccggtttaagcgggggaagccttgcgcagggggaaccctttccgcatctcgtgccgatagagccttttatgatatgcagcacagtggttccctctcccgctttcgcggattttcttgacgcgaatcccctgtggggccctgatcaaagggaagcgcttgaaagccgggggctggcaaccgatgaatacctcgccgaatttgaagcgggggtaggcaggacgattaccggcatcagcgcggtatcatggtttgcggcgcagtccttttgcgaatggcttgaaacaaaacttcccgaatcgctttccgattgggaagtgcggctgcccacagaggcggaatgggaatacgcggtaaaatccgcggggcaatggaaccggaaagaattgcttgtcagggggaacttgtgggaatggtgcgggaatccctattcgcatcttcctttcatttccgcagctccggaggcgatagctaaggtcggttcgcccgaatacccgctgcggggcggttccgcgctgaacgccgtcatgccggtcagcgccgagacaagggcctctctgccgcctgaaagctgttcggctttgttcccttccggccggatctcgcgataa

SEQ ID NO: 26338 - protein, 288 aa, Unknown
  Obtained from environmental sample
  SIGNAL (1)...(21)
  DOMAIN (80)...(288): Domain of unknown function (DUF323)
  misc_feature (1)..(288): Xaa is any amino acid
MPPRPLALYALILILSLFLTAIQTPPPGSRTPCPRNPRACLLSSSWYQNQLAGYAGLTVLEKLSVAPGESSGNPPFPQIRVAGLMFTGLSGGSLAQGEPFPHLVPIEPFMICSTVVPSPAFADFLDANPLWGPDQREALESRGLATDEYLAEFEAGVGRTITGISAVSWFAAQSFCEWLETKLPESLSDWEVRLPTEAEWEYAVKSAGQWNRKELLVRGNLWEWCGNPYSHLPFISAAPEAIAKVGSPEYPLRGGSALNAVMPVSAETRASLPPESCSALFPSGRISR

SEQ ID NO: 26339 - DNA, 939 bp, Unknown
  Obtained from environmental sample
  misc_feature (1)..(939): n is a, c, g, or t
atgaatattgccgaatctgcggcgttggctttagccgggcgggaatccggctggcttgaggcttcaagttttgaagaggcggatctcgtcctgataaatacctgctctgtcagggcgacagcggagcagcgggtttttggcaggctggctcagtacaaggctcttaagaagaaacggccttttactcttgtggtcgccggctgcatggcagaacgtcttggcgaaaagctcaaaaaagattttgccgtggattacgttatgggaacgagcgcccgctccttattcccgcttattctgcaatctgtggaaaaaggcgtcgcttttaacgaagctgccgaaaagccagctttctctttttcttcttttcatcgcgagttttccagcccttttcgcagttttgtgccgattatgcatggctgcaacaatttttgttcctactgcattgtcccttatgtgcgcggcagggaaatttcccgcgatccccagtccatccttgatgaaatccgccttttgggaaggcaaggggtaagggaaattacgcttctggggcaaaacgttaattcttatcgatggaaagacgctgaaaatggggaagactcgcatcttggttttcccggccttttgcgccttattgcgtctgagttggcttcaggttcagggttaatcgaaggaagcggggtgaagtgggtaaggtttttgtccagccatcccaaggatctttccgatgaattaatcggaattttggctgaaaatccggtttttttgcgtcatatccacctttgcgtacagcacggctcaaaccgcatcctcgcgagcatgaaccgccgctatccccgcgagccatacctgggatttggtgcgccgcccttcgtttccgcgatgccggatttggagcctttccacggatattctgggccggttttccccggggaaacctga

SEQ ID NO: 26340 - protein, 312 aa, Unknown
  Obtained from environmental sample
  DOMAIN (134)...(312): Radical SAM superfamily
  misc_feature (1)..(312): Xaa is any amino acid
MNIAESAALALAGRESGWLEASSFEEADLVLINTCSVRATAEQRVFGRLAQYKALKKKRPFTLVVAGCMAERLGEKLKKDFAVDYVMGTSARSLFPLILQSVEKGVAFNEAAEKPAFSFSSFHREFSSPFRSFVPIMHGCNNFCSYCIVPYVRGREISRDPQSILDEIRLLGRQGVREITLLGQNVNSYRWKDAENGEDSHLGFPGLLRLIASELASGSGLIEGSGVKWVRFLSSHPKDLSDELIGILAENPVFLRHIHLCVQHGSNRILASMNRRYPREPYLGFGAPPFVSAMPDLEPFHGYSGPVFPGET

SEQ ID NO: 26341 - DNA, 741 bp, Unknown
  Obtained from environmental sample
  misc_feature (1)..(741): n is a, c, g, or t
atgaataccatgcaggcggccaaaattcttaacgaagacgcaggatatatcgccaaattgcagctaacagccgaccgcctgccaccgatgcggattggccggcataatcagctgcaggaatggctgcacgacgccgacgacccccaggacgatcaccgccatgtatcgcatctttacgggctgtatccgggcagccagatttcgccctatcgccatccgatcctttttcaggcggccaaaaagtcgctgctctaccggggcgacatggcaaccggatggtccatcggctggaaggttaatctctgggcgcgcctgctcgacggcaaccatgcctataccatcatatccaacctcattaccgaccgcacatatcccaatcttttcgacgcgcatccgcctttccagattgacggaaacttcgcggcaccggccgcgcttgcagaaatgctgctgcaatcccatcagggctatttacagttcctgcccgcgctgccgtccgcctgggcaaaaggggaattccgcggccttaaggcacggagcggttttgaagtcgatctggtttggaaagcgcataagccggtgagtggcgttatccgctcattatgcggcgaaccatgtgcactactggctccctcaggcacatcgatatccgaagacgggcaaactgtaaaaacaaagaggctggggcttttgctttattttgaaaccaaaaaaaacgccgcttacgatatagtgttttag

SEQ ID NO: 26342 - protein, 246 aa, Unknown
  Obtained from environmental sample
  misc_feature (1)..(246): Xaa is any amino acid
MNTMQAAKILNEDAGYIAKLQLTADRLPPMRIGRHNQLQEWLHDADDPQDDHRHVSHLYGLYPGSQISPYRHPILFQAAKKSLLYRGDMATGWSIGWKVNLWARLLDGNHAYTIISNLITDRTYPNLFDAHPPFQIDGNFAAPAALAEMLLQSHQGYLQFLPALPSAWAKGEFRGLKARSGFEVDLVWKAHKPVSGVIRSLCGEPCALLAPSGTSISEDGQTVKTKRLGLLLYFETKKNAAYDIVF

SEQ ID NO: 26343 - DNA, 375 bp, Unknown
  Obtained from environmental sample
  misc_feature (1)..(375): n is a, c, g, or t
atgggcgactgtgccaaatatgcccaaatgctgcttaataacggcaaactgggaaatgagcgcattctttccagaaagaccatagagcttatcaggacaaaccattgcgaaacatcaatgctaaaacctgcattctttggccacatggtcggctacggatacggtctgggtgtaagaaccatgctaaacactgccgaatctggactcaacggttctattggcgaatgggcgtgggatggttatatgggtacctattattgtgtggatccggctgaggaaatgacagccctgttctttatccagctcgtatcgcagatcaacagcgatcttcagcgcgggtttgttcagactgtatacggagctatcgatgattaa

SEQ ID NO: 26344 - protein, 124 aa, Unknown
  Obtained from environmental sample
  misc_feature (1)..(124): Xaa is any amino acid
MGDCAKYAQMLLNNGKLGNERILSRKTIELIRTNHCETSMLKPAFFGHMVGYGYGLGVRTMLNTAESGLNGSIGEWAWDGYMGTYYCVDPAEEMTALFFIQLVSQINSDLQRGFVQTVYGAIDD

SEQ ID NO: 26345 - DNA, 795 bp, Unknown
  Obtained from environmental sample
  misc_feature (1)..(795): n is a, c, g, or t
atgaagcgcattgaattggcatacagggcgcagcttctttcttatgaaaacgcgtcaaagcagttggagattcaggtaataaagagatttttaaatttaaaaacaatgggcgcgaacgtttcaaatatgcaggaaagccttgaccttgcgttacaaaaaatgaacaacgacaggatcgcaagagcgaacgggcttttaagcgagctggcctggctgaattcccagttaagcgcggaaactgcccgctacaatctgcttactgcccagaactcttataaaaactccctcggcgaattccttgcccttttggggatagatgaaggcacgaatgtaatcctaaacgggactgttgagatcgctcagctgaatttggagcctgaaaagcttattttagaatacctcccaaagaggccggacataatggcccagcgccaggttatcgaaaggctggagttaagcaaaaacattaccaccaataactcacgttcgccttccttgagtctttcaacccagtggcggggctcgccggggacaggcggtcttagcgccccttttaccgacagtctttcaggcagtttgagtttgagtattcctattgattcctggattccgggaaccaggcagaatcaaaacatcaaggcggcaaacaccgaggttgaaaaggcaaaactggatttgcaaaacacagaaacccaggcgaaaacccaaatacgctcgctggtatcaaccttaacagcacctgggagagtctggaaatcgcccgccttcgtgtatcggttgcacagcgcaccgtag

SEQ ID NO: 26346 - protein, 264 aa, Unknown
  Obtained from environmental sample
  misc_feature (1)..(264): Xaa is any amino acid
MKRIELAYRAQLLSYENASKQLEIQVIKRFLNLKTMGANVSNMQESLDLALQKMNNDRIARANGLLSELAWLNSQLSAETARYNLLTAQNSYKNSLGEFLALLGIDEGTNVILNGTVEIAQLNLEPEKLILEYLPKRPDIMAQRQVIERLELSKNITTNNSRSPSLSLSTQWRGSPGTGGLSAPFTDSLSGSLSLSIPIDSWIPGTRQNQNIKAANTEVEKAKLDLQNTETQAKTQIRSLVSTLTAPGRVWKSPAFVYRLHSAP

SEQ ID NO: 26347 - DNA, 477 bp, Unknown
  Obtained from environmental sample
  misc_feature (1)..(477): n is a, c, g, or t
gtgctacaaaacgctgaccgaggtgccgggcgaggtcgatctcgtcgtcgtggtggtcgggcgcgacctcgtgatcccggtgctcaaggagatggggcagaaggggagcaaggcggccgtcgtcatcaccgccggcttcggggagacgggggaggagggcaagaagctgcaaaaggagatgatcgaggtcgtgaagcagcacgggatcacgatggtggggcccaactgtctgggggtgctcaacccgtggcacaagctcaacgcctctttcggcggggcggccggggagccgggcgggatcgccttgatctcccagtccggcgctttgctcaccgccgtgcaggacatcgcggcgcgggagcagctggggtggtcggtgctcgcctccatcggcaacaaggcctcgctcgacgaggtggagtgcttgcaggggctgaagaacgacaagaacacgaaggttatcaccgcctaccttga

SEQ ID NO: 26348 - protein, 158 aa, Unknown
  Obtained from environmental sample
  misc_feature (1)..(158): Xaa is any amino acid
MLQNADRGAGRGRSRRRGGRARPRDPGAQGDGAEGEQGGRRHHRRLRGDGGGGQEAAKGDDRGREAARDHDGGAQLSGGAQPVAQAQRLFRRGGRGAGRDRLDLPVRRFAHRRAGHRGAGAAGVVGARLHRQQGLARRGGVLAGAEERQEHEGYHRLP

SEQ ID NO: 26349 - DNA, 462 bp, Unknown
  Obtained from environmental sample
  misc_feature (1)..(462): n is a, c, g, or t
gtgataaccttcgtgttcttgtcgttcttcagcccctgcaagcactccacctcgtcgagcgaggccttgttgccgatggaggcgagcaccgaccaccccagctgctcccgcgccgcgatgtcctgcacggcggtgagcaaagcgccggactgggagatcaaggcgatcccgcccggctccccggccgccccgccgaaagaggcgttgagcttgtgccacgggttgagcacccccagacagttgggccccaccatcgtgatcccgtgctgcttcacgacctcgatcatctccttttgcagcttcttgccctcctcccccgtctccccgaagccggcggtgatgacgacggccgccttgctccccttctgccccatctccttgagcaccgggatcacgaggtcgcgcccgaccaccacgacgacgagatcgacctcgcccggcacctcggtcagcgttttgtag

SEQ ID NO: 26350 - protein, 153 aa, Unknown
  Obtained from environmental sample
  misc_feature (1)..(153): Xaa is any amino acid
MITFVFLSFFSPCKHSTSSSEALLPMEASTDHPSCSRAAMSCTAVSKAPDWEIKAIPPGSPAAPPKEALSLCHGLSTPRQLGPTIVIPCCFTTSIISFCSFLPSSPVSPKPAVMTTAALLPFCPISLSTGITRSRPTTTTTRSTSPGTSVSVL

SEQ ID NO: 26351 - DNA, 768 bp, Unknown
  Obtained from environmental sample
  misc_feature (1)..(768): n is a, c, g, or t
gtgccgggcgaggtcgatctcgtcgtcgtggtggtcgggcgcgacctcgtgatcccggtgctcaaggagatggggcagaaggggagcaaggcggccgtcgtcatcaccgccggcttcggggagacgggggaggagggcaagaagctgcaaaaggagatgatcgaggtcgtgaagcagcacgggatcacgatggtggggcccaactgtctgggggtgctcaacccgtggcacaagctcaacgcctctttcggcggggcggccggggagccgggcgggatcgccttgatctcccagtccggcgctttgctcaccgccgtgcaggacatcgcggcgcgggagcagctggggtggtcggtgctcgcctccatcggcaacaaggcctcgctcgacgaggtggagtgcttgcaggggctgaagaacgacaagaacacgaaggttatcaccgcctaccttgagaacatcacccgcgggcgcgacttcatccgcgaggcggaggagacgagcaaggagaagccgatagtcatcctgaaggccggtaggaccagcgccggggcggcggcggcctcctcacacacgggtagcctcgccggagccgattccacctacgccgccgctttcgacagggtgggcgtgattcgggcggagtccatagagcacctctttgatgtggctatggccttctcctatatgcccgttgcccaagggcgaccgggtcgctatagtgaccaatgcgggcggccccggcatcatgatgtccgacgccattga

SEQ ID NO: 26352 - protein, 255 aa, Unknown
  Obtained from environmental sample
  misc_feature (1)..(255): Xaa is any amino acid
MPGEVDLVVVVVGRDLVIPVLKEMGQKGSKAAVVITAGFGETGEEGKKLQKEMIEVVKQHGITMVGPNCLGVLNPWHKLNASFGGAAGEPGGIALISQSGALLTAVQDIAAREQLGWSVLASIGNKASLDEVECLQGLKNDKNTKVITAYLENITRGRDFIREAEETSKEKPIVILKAGRTSAGAAAASSHTGSLAGADSTYAAAFDRVGVIRAESIEHLFDVAMAFSYMPVAQGRPGRYSDQCGRPRHHDVRRH

SEQ ID NO: 26353 - DNA, 339 bp, Unknown
  Obtained from environmental sample
  misc_feature (1)..(339): n is a, c, g, or t
atggaaaaaacagaaacagctgtcgccctgtgcgcagtcggcgcggaaaaagttgtctcaaatgaattgaaaaaactgactgacaaagacggaaatccatatatcaaagttgaagattctctttacggcagagtgcgctttcaggcggacaaaaaaggcttgtacaaagcgttaatcggtcttcgcgccgccgatagagtcctgcttgaaatcgccaattttaaagccgtagattttgacgctctttttgaaggaaccgccgcagcggaatgggaaacgcttgtgccgaaaggcatggngctgaaagttgcccaagtccgcacaaacgctcgcaggtaa

SEQ ID NO: 26354 - protein, 112 aa, Unknown
  Obtained from environmental sample
  misc_feature (1)..(112): Xaa is any amino acid
MEKTETAVALCAVGAEKVVSNELKKLTDKDGNPYIKVEDSLYGRVRFQADKKGLYKALIGLRAADRVLLEIANFKAVDFDALFEGTAAAEWETLVPKGMXLKVAQVRTNARR

SEQ ID NO: 26355 - DNA, 951 bp, Unknown
  Obtained from environmental sample
  misc_feature (1)..(951): n is a, c, g, or t
atgatgctttgcctgatgggttttgcggcctatgcgagtttaaattatgaatggattatggaacaggttgaagcgcagcttaaaccaaacccggaaaaatcggaaaagcttttgaaaaaaggcaacatgaaacaagcgaagaaaagcatacaaaagcagttgaaggaaaaacccaatgatatagaacttttgattttgcaagggagatattatataagtgctgcacgcaaaagaatggacgaactgcattggaaaacttacgacaaagcaaatgcgctccctgagatagataccgccgtggctatctttcgcagagcggaaaccttagaccccaaagatgccaacgtccctagatggatttcaatcgcagagcaattgagaagagatttttcagaagcggaaaccgccgcccgcagagccatcaccctcaatccagaggatcctgataactggaatcaattgggttctgtgtttatagatggagaacaaatcagccaagcggaacaggtattttatagagcattgaagatagaccaaacgaatgccacaactttgaaaaatttgactattttaaatctctattacacaaaagatgcgcaaaaagctacaaatttcttattcaattatttgaatcaaaaggaagcggccatggatatggattcttacaatcttcgagtggacttgacaaccgagatgataggcgactttaacccacctatggaaagattaagcccgccaacactttcttttgaagaatacgaaagaagacggaaacaaatatctgcggaccctcggctgaaaaccgatcctctgttgcaagagcagctgggattgctgtatatgtcaaaaggcgagagaattgcagccgaagaatgcttcataaaatccatccacttaaacgcaggcaggagtctccagaaaaatgctcgccataatgtatttaaaggataa

SEQ ID NO: 26356 - protein, 316 aa, Unknown
  Obtained from environmental sample
  misc_feature (1)..(316): Xaa is any amino acid
MMLCLMGFAAYASLNYEWIMEQVEAQLKPNPEKSEKLLKKGNMKQAKKSIQKQLKEKPNDIELLILQGRYYISAARKRMDELHWKTYDKANALPEIDTAVAIFRRAETLDPKDANVPRWISIAEQLRRDFSEAETAARRAITLNPEDPDNWNQLGSVFIDGEQISQAEQVFYRALKIDQTNATTLKNLTILNLYYTKDAQKATNFLFNYLNQKEAAMDMDSYNLRVDLTTEMIGDFNPPMERLSPPTLSFEEYERRRKQISADPRLKTDPLLQEQLGLLYMSKGERIAAEECFIKSIHLNAGRSLQKNARHNVFKG

SEQ ID NO: 26357 - DNA, 840 bp, Unknown
  Obtained from environmental sample
  misc_feature (1)..(840): n is a, c, g, or t
atgattttaagggaaccgtgtcttccctccggttggtttccccggcaaagggagaaaattgaagaatttttagaaccttttaagaaaagcaaggaagctttacttccggcttcggcggcaatagccccccatgccggctggtattactcaggccgtctggcggcgctggccgtatcgtcgcttgaatcgggagcggaaactgtggccgttataggcggccatttgccgcgcggcgcgcctgttcttgccgccaaagaagacggcgtaaagaccccctttggcgcaatgatgatcgacggagaattcagggaggcgtttgcaaaacgaattaccatcgcccctgacaaataccaggacaatacggtggaagttcttttgcctatggcgcattattttttccctgaatcgaagctgctttggctcaggtttccggcggagatatcctcatttgaagcgggaaagatacttgccgaaaccgccgtgaatttgggcaggcggattgtcgttctttcgtccacggatcttacccactacgggcgtaattacggctttagcccccggggaagtggaaaacccgccctcgaatggatgaaaaagagcaacgacgccgcctttatcaatgccgtccttaaaggagacccttctgcggttctgaaacgggcggaggacgacagctccgcctgttctgccggagctgttcttggtgcccttggttttgcttctttcaagggaaaaagcgcaaagcttcttgaatactctacgagcgcggatgtccggaaatcgggtgatgacgaaattcccgattcttttgtgggctatgccgccatttcattcggatag

SEQ ID NO: 26358 - protein, 279 aa, Unknown
  Obtained from environmental sample
  DOMAIN (5)...(277): Protein of unknown function DUF52
  misc_feature (1)..(279): Xaa is any amino acid
MILREPCLPSGWFPRQREKIEEFLEPFKKSKEALLPASAAIAPHAGWYYSGRLAALAVSSLESGAETVAVIGGHLPRGAPVLAAKEDGVKTPFGAMMIDGEFREAFAKRITIAPDKYQDNTVEVLLPMAHYFFPESKLLWLRFPAEISSFEAGKILAETAVNLGRRIVVLSSTDLTHYGRNYGFSPRGSGKPALEWMKKSNDAAFINAVLKGDPSAVLKRAEDDSSACSAGAVLGALGFASFKGKSAKLLEYSTSADVRKSGDDEIPDSFVGYAAISFG

SEQ ID NO: 26359 - DNA, 1059 bp, Unknown
  Obtained from environmental sample
  misc_feature (1)..(1059): n is a, c, g, or t
atgatcagatcggccgagtttagtttcaggcttaatagacgcaattcattcagtaaccgcgttttgcccgcggagaaagcaatggacaatgataatcttaaaggcggtatttttgagaaaaatcttcttgcccttttaaaaagaaaccgggaactctcctatggactttcaaaaaccgttaccaaaaccagccgctacaaatttccgtcttcacgctcaggtgatataataccgaattgggtagatcagcaaggcgcgtcccatcccctgcactcgatgatagatccccgaaaagaagcaaagcgccttattgaaactatacaaagcgaaggctttattgtctttcttgggcttggagccggcttttacgccgaggaggcgctcaggcgggaagaaagcggctttgtactggttatcgaatacgatttatgcgggcttgcggaactgttgcgcaatatagactatacctctatttttgaagacgccaggttcagccttgccgttgatttatcaggcgaagaactcaagcggcttattttaagcttgtatcagcctgttattttcggcggaataaaggcaatcccgcttcgctcaagaacaagcctccagcaagagagctttataaacgcagcaaagacaattgaagaggccattgatcaggcagcatcggattattcagttcaggcgcgcttcggcaggcgctggctttcaaacattctgagaaacctgaaaacctcaggcgctgttcacggcagcatcctgccaataaaaaaggcagcggtttgcgcggcaggcccttccctttcgcttcagattccggcaatccaaaaaacaaggaaagataaatttctcattgccgttgataccagccttccctgtctgcttaacgcgggaatacgcccggacgcggttgtctctatagactgccagcatattagttattatcactttatggacggctttccgaaaagcgccctctttttcttgatctcgcaagcccccccatgctggcctcctgttccaaaaaccaccggtttttcgcaagcgcccatcctttaa

SEQ ID NO: 26360 - protein, 352 aa, Unknown
  Obtained from environmental sample
  misc_feature (1)..(352): Xaa is any amino acid
MIRSAEFSFRLNRRNSFSNRVLPAEKAMDNDNLKGGIFEKNLLALLKRNRELSYGLSKTVTKTSRYKFPSSRSGDIIPNWVDQQGASHPLHSMIDPRKEAKRLIETIQSEGFIVFLGLGAGFYAEEALRREESGFVLVIEYDLCGLAELLRNIDYTSIFEDARFSLAVDLSGEELKRLILSLYQPVIFGGIKAIPLRSRTSLQQESFINAAKTIEEAIDQAASDYSVQARFGRRWLSNILRNLKTSGAVHGSILPIKKAAVCAAGPSLSLQIPAIQKTRKDKFLIAVDTSLPCLLNAGIRPDAVVSIDCQHISYYHFMDGFPKSALFFLISQAPPCWPPVPKTTGFSQAPIL

SEQ ID NO: 26361 - DNA, 768 bp, Unknown
  Obtained from environmental sample
  misc_feature (1)..(768): n is a, c, g, or t
atgctggcctcctgttccaaaaaccaccggtttttcgcaagcgcccatcctttaacaaggtatgtctcacgggtttggaagaagtttcccgagcttgatacctcaggcggcaatgtaacctatgctgcggtatccctggctgaacagctaggcgcttgcgagatagagctttacggtgcggatttctcttatccgggaggtgtctcttacgctcggggcgcttacatttattcgctatttgctaaacgccagaaccgccttttaccgcttgaagcgcagtgttcggattttatctataggacgccccttgaaaaaatcacctgccgccctgagggaagcgcaggttcctggtattacgaaaacaggcttttaaagttttacagagaagccctggaaaaaaaatgcctcaatatggatgcggcgctaatgcccgccataggcctgggagcgccaattcgcgtaaagcaggttgaaaaccggaaatacaaaaacggaatgttcactttcggaaaatccgcaacgcaggcggaagattttctttcgcattataaaaatttgatcgcaaaccttccaaagctggaaaaaaacgccacttattaccttggatcgttgaatgacgaagaaaaatcggttttagcaacaattctcccattggccgctgcaataaagaaccgcaattctacccttagctttacagagttaattgaaaaggcaaaatcttataccacaacacaaattgataaggttctagcagactgtaacagttaa

SEQ ID NO: 26362 - protein, 255 aa, Unknown
  Obtained from environmental sample
  misc_feature (1)..(255): Xaa is any amino acid
MLASCSKNHRFFASAHPLTRYVSRVWKKFPELDTSGGNVTYAAVSLAEQLGACEIELYGADFSYPGGVSYARGAYIYSLFAKRQNRLLPLEAQCSDFIYRTPLEKITCRPEGSAGSWYYENRLLKFYREALEKKCLNMDAALMPAIGLGAPIRVKQVENRKYKNGMFTFGKSATQAEDFLSHYKNLIANLPKLEKNATYYLGSLNDEEKSVLATILPLAAAIKNRNSTLSFTELIEKAKSYTTTQIDKVLADCNS

SEQ ID NO: 26363 - DNA, 780 bp, Unknown
  Obtained from environmental sample
  misc_feature (1)..(780): n is a, c, g, or t
atgacacagagtacataccagccatttttaagcgttcgctctgtttcaaacacatatacctcaaggccgttgggcatcataggtaaaaaggaaaagaagcctgtactcaacaatataagctttgaaataaaccggggagaaatcttcggcctggtaggcgaatcaggttgcggcaagaccacgctcgcaaaatgtattttgggactgattgattacgagggagaaataattatcaacggccgtaagcgggaagcaaggccttctttcgccgaaagacgcctaagaaccgaaggtagaagcgcttttgatgtacaggcggttttccaaaactcctcctcttcgcttaacccggtaaaaacaataggctggattttggaagaaccattaagggcgcaccgcctgggcagtacagtggagagacagaagcgcgtagacgaaatactcgaccttgtggggctggattcttcttacaaaaagcgaaggccggcggaactttcgtcggggcaaaaacagcgggtcgccataggctttgctttaacgctgaaccccggcctcatcgtcgctgatgagcctgtcagcgccctggatgtttcggtggcggcgcaagttttgaaccttttccgcgacctgaataaaagactgggcctggcattgcttttcatctctcacaacatggaaatggtgcattacctctgcgacagagttgccgttatgcggaacggcgggattacggatgtttacattcaggggctgtccaatcgaacagccccttccgaataa

SEQ ID NO: 26364 - protein, 259 aa, Unknown
  Obtained from environmental sample
  DOMAIN (46)...(241): ABC transporter
  misc_feature (1)..(259): Xaa is any amino acid
MTQSTYQPFLSVRSVSNTYTSRPLGIIGKKEKKPVLNNISFEINRGEIFGLVGESGCGKTTLAKCILGLIDYEGEIIINGRKREARPSFAERRLRTEGRSAFDVQAVFQNSSSSLNPVKTIGWILEEPLRAHRLGSTVERQKRVDEILDLVGLDSSYKKRRPAELSSGQKQRVAIGFALTLNPGLIVADEPVSALDVSVAAQVLNLFRDLNKRLGLALLFISHNMEMVHYLCDRVAVMRNGGITDVYIQGLSNRTAPSE

SEQ ID NO: 26365 - DNA, 303 bp, Unknown
  Obtained from environmental sample
  misc_feature (1)..(303): n is a, c, g, or t
atggtggttaaaccgctggatttcatcgcccgcaacaaaaacacccttctgcagccggcggtaaagtgccgtggccgcgaatacctgcgcatcatttacggcccggattacaccacggcagctcacctcgataggttgcggaatcgctcgcttcgaagaaaacaggaactggccctcgcggaatttgccctgggcatggaatccctgcaacgctttgtcaacaaagaaccattctatcgcgttcacgaatgtgtctttgccgtgctggccctggagaacgaaaatgtcgatccaagattgtga

SEQ ID NO: 26366 - protein, 100 aa, Unknown
  Obtained from environmental sample
  misc_feature (1)..(100): Xaa is any amino acid
MVVKPLDFIARNKNTLLQPAVKCRGREYLRIIYGPDYTTAAHLDRLRNRSLRRKQELALAEFALGMESLQRFVNKEPFYRVHECVFAVLALENENVDPRL

SEQ ID NO: 26367 - DNA, 486 bp, Unknown
  Obtained from environmental sample
  misc_feature (1)..(486): n is a, c, g, or t
gtgaaagaaggcgaaataggggagctggtgcttaccattctctgccgtgaagcgactcccatactccgctaccgtacccgcgatctcaccggcttttacaccgagccctgcccttgcggcaggactcaccgccgcctccgcagaataaccgggcgcagtgacgatatgctgatcatcaacggcgtgaacgttttcccaagccagattgaggaagtgatcatggccatgaaagaggtcggcaacaactacctcattgtggtagaaaaagacggtgcgcttgatcgcctgactgtaaaaacggaagtaaaccctgacatattcgtggacgatgcccgtccccttaacgccctgatggagcggatcagagataccctgagggcttcaatttacatcagccccagggtggaactccacgagagcggcagtctgccgatatcggaaggcaaggcagtacgcgtgatggacaagcggcctaaagacgtgtga

SEQ ID NO: 26368 - protein, 161 aa, Unknown
  Obtained from environmental sample
  misc_feature (1)..(161): Xaa is any amino acid
MKEGEIGELVLTILCREATPILRYRTRDLTGFYTEPCPCGRTHRRLRRITGRSDDMLIINGVNVFPSQIEEVIMAMKEVGNNYLIVVEKDGALDRLTVKTEVNPDIFVDDARPLNALMERIRDTLRASIYISPRVELHESGSLPISEGKAVRVMDKRPKDV

SEQ ID NO: 26369 - DNA, 744 bp, Unknown
  Obtained from environmental sample
  misc_feature (1)..(744): n is a, c, g, or t
gtgggaatccaaggccctgatgacatcaaaaccctggaagacctgaagcgtattccctttactaccaagaatgatcttagggacggtttcccctatggttttttaagcattccgagagaggaagtggtaaggctgcacgcttcaagcggcactaccggaatcccaaccacgatttattttaaccgcaacgacatcaaaaactggtcgaacaatatggcccgttgcatttatggggccggctgtacacaaagcgatgtgtttcagaacatgataacttatggccttttcacgggaggtcttggtctgcaccagggcggcgaggaagtcggcatgctggttattccatcgggcgcgggaaataccagcaggcagctaaaattgatggaagattttggtaccactgtggtacatgccactccgagttttcttctgcaccttgaaaccaggatgaaagaagccggggtaaaaagggaaagcctgcttcttaaacgcgcttttgccggggcggagccttattccgaagatacaaggcggcggattgaaaccctgctaagaattgacgtgttcaattcttacggcctttcggaaatgaacggtccgagcgtcgcctttgagtgccagtgcaaaaacggaatgcacctgtgggaagacggctacatcgccgagataataaacccggacaccctggaaccctgtgaaagaaggcgaaataggggagctggtgcttaccattctctgccgtga

SEQ ID NO: 26370 - protein, 247 aa, Unknown
  Obtained from environmental sample
  misc_feature (1)..(247): Xaa is any amino acid
MGIQGPDDIKTLEDLKRIPFTTKNDLRDGFPYGFLSIPREEVVRLHASSGTTGIPTTIYFNRNDIKNWSNNMARCIYGAGCTQSDVFQNMITYGLFTGGLGLHQGGEEVGMLVIPSGAGNTSRQLKLMEDFGTTVVHATPSFLLHLETRMKEAGVKRESLLLKRAFAGAEPYSEDTRRRIETLLRIDVFNSYGLSEMNGPSVAFECQCKNGMHLWEDGYIAEIINPDTLEPCERRRNRGAGAYHSLP

SEQ ID NO: 26371 - DNA, 918 bp, Unknown
  Obtained from environmental sample
  misc_feature (1)..(918): n is a, c, g, or t
gtgaccgcctggctgcgttcgccggagaaagcccggtatgtcggtgaacagcgcgaatcccgcgaatatctgccgggcgtaaagattccggacggcgtgcggataacgagcgatatggcggactgcgccggggccgatatggttgtgttcgccgccggctcaaaatcaaaccgccaggtagcggagttgtataaaccgtacgcctcgccggggcaaatcatggtgagcgcgtccaaagggcttgagcctgacacaggcttacgcctttcgcaggttatacgcctcgttttgcccgaaaaccccgcagccgttttttccgggccatgccacgcggaggaattgtcgaagggcctagcgtccacatgcgtggcggcggctgatgagcctggaatcgccgaagccgttcaggacgcgtttatggctccagaattccggatttacacgaaccccgacgtgattggcgtcgagcttggcggcgggcttaaaaacgtaatagcgctcgccacgggcataagcgatggtttgggcaacggcgacaacatccgcgccgccattatgacgcgcggcatagttgaaatcacccggctgggcgtggccatgggcgctaaggccgagactttcagcggcctgtccggcataggcgacctgattggcacttgcgtaagcccgcattcccgcaaccgccgggcgggcctgttaatcggccagggcaaaagccttgagcaggctctggcggaaattcacatgctggttgaaggcgttggcacggccaaggccgcgctggctttttcgcgggagcttaacgtccctatgccgataaccgcagaagttaacaaggtgctgtttgagggcaaagacccggcttcgacggttcagacgctcatggagcgtgacaggacgtccgaaagtgtttgctga

SEQ ID NO: 26372 - protein, 305 aa, Unknown
  Obtained from environmental sample
  DOMAIN (2)...(133): NAD-dependent glycerol-3-phosphate dehydrogenase N-terminus
  misc_feature (1)..(305): Xaa is any amino acid
MTAWLRSPEKARYVGEQRESREYLPGVKIPDGVRITSDMADCAGADMVVFAAGSKSNRQVAELYKPYASPGQIMVSASKGLEPDTGLRLSQVIRLVLPENPAAVFSGPCHAEELSKGLASTCVAAADEPGIAEAVQDAFMAPEFRIYTNPDVIGVELGGGLKNVIALATGISDGLGNGDNIRAAIMTRGIVEITRLGVAMGAKAETFSGLSGIGDLIGTCVSPHSRNRRAGLLIGQGKSLEQALAEIHMLVEGVGTAKAALAFSRELNVPMPITAEVNKVLFEGKDPASTVQTLMERDRTSESVC

SEQ ID NO: 26373 - DNA, 771 bp, Unknown
  Obtained from environmental sample
  misc_feature (1)..(771): n is a, c, g, or t
gtggatcgggaaggaactatgtcgggtatagatatggagccggtgaaacagctttgcggtgcggtgggagaaaactgcagaatcaccgctgcggggggtgtatcaagcctggaagaaattgaagctctggcagctctgggctgtgatgtgcagcttggcatggccctttatacgggaaaaataaatcttgccgacgcctttgttcgttccctcaactgggaaaaggccgggactatgctgccggtgatcgcccaggcttcggacgggcaggttttgatgacgggctttgccgacagggaggcggtggccgaaagctttaagcggggcaatctttgtttccacagccggacgcggaacaagctgtggatgaaaggggaaaactccagccacacgctaaagctgctccgccttcgctctgactgtgacagggacgcgctgcttgcggtggtagagccggcggggccggtttgtcataccggagcgtggtcctgcttcggcgtgaaccgccgctatacgttggaataccttcagtcggtaattgccgaacggtttcgcaatcccgtgcccggttcctataccgcaaccttggatgaccagcttgtccgtgaaaaaattatggaagaagcggaagaactttgcggcgccaaaacccattatgaaaaagtctgggaagcggcggacctgctctactttaccgcggccctcatgaccagggaagggattccggttacggaagttctgaatgaactggatcggcggcataaaaaatag

SEQ ID NO: 26374 - protein, 256 aa, Unknown
  Obtained from environmental sample
  DOMAIN (173)...(255): Phosphoribosyl-ATP pyrophosphohydrolase
  misc_feature (1)..(256): Xaa is any amino acid
MDREGTMSGIDMEPVKQLCGAVGENCRITAAGGVSSLEEIEALAALGCDVQLGMALYTGKINLADAFVRSLNWEKAGTMLPVIAQASDGQVLMTGFADREAVAESFKRGNLCFHSRTRNKLWMKGENSSHTLKLLRLRSDCDRDALLAVVEPAGPVCHTGAWSCFGVNRRYTLEYLQSVIAERFRNPVPGSYTATLDDQLVREKIMEEAEELCGAKTHYEKVWEAADLLYFTAALMTREGIPVTEVLNELDRRHKK

SEQ ID NO: 26375 - DNA, 933 bp, Unknown
  Obtained from environmental sample
  misc_feature (1)..(933): n is a, c, g, or t
atgatcagatggccgaggggtgttcgcgggggcaggctcaatttcagcgccgccgtagccggcaacaacaacccgaaccagagcgtgacatggaaagtcagttccaacgccgcgggcaccgggactgtcacggacggaactttgataacaggaaacgggacgctaaccgtggcggccgccgaagcatcagcgaccttgtacgtcaccgcgacctcctcggtaaacacgacgaaatcgggctccatcacggtaaccattcccaccgtaaccagcgtaagcgtagccccggcaaacccgcagataaagaggggcgaaggcgcgacctttacggcgagggtgcagggcacgggcaacccgggccaggaggtaacgtggaagctggacggcattggcggcagcactacggtaacgacaataaccagcaacggcatggtcatagttaacacggcggaaacactgtcgcagcttcttattacggcaacctctgttgacgatcccgcgaaattcggcacgacaatggtaacgataccggcagtgccggcggcggtcgttcccgctacaccgcccccagcgactccggctccgcaggtacaggctacgactccgcaggcccagactccggtttccggcccggccgcaagcgcgatcgagctgaccgcgggcaaatggactgacgacagttttaccgccgggaatcaggaacattggttcaagtttaccgcgactgccgcttcgcactatatacagtttatgcctaacacaatgcacagcgtgggcgcgcaattgtacgcttccaacgctacgacagcctcaggagccgccatagcttttactaacgctactaccaatgccaacaggacggggttgaccgccggggccgtgtactatatcaaagtaacgcccgcctccgccctcgcggggcatacaggatag

SEQ ID NO: 26376 - protein, 310 aa, Unknown
  Obtained from environmental sample
  misc_feature (1)..(310): Xaa is any amino acid
MIRWPRGVRGGRLNFSAAVAGNNNPNQSVTWKVSSNAAGTGTVTDGTLITGNGTLTVAAAEASATLYVTATSSVNTTKSGSITVTIPTVTSVSVAPANPQIKRGEGATFTARVQGTGNPGQEVTWKLDGIGGSTTVTTITSNGMVIVNTAETLSQLLITATSVDDPAKFGTTMVTIPAVPAAVVPATPPPATPAPQVQATTPQAQTPVSGPAASAIELTAGKWTDDSFTAGNQEHWFKFTATAASHYIQFMPNTMHSVGAQLYASNATTASGAAIAFTNATTNANRTGLTAGAVYYIKVTPASALAGHTG

SEQ ID NO: 26377 - DNA, 531 bp, Unknown
  Obtained from environmental sample
  misc_feature (1)..(531): n is a, c, g, or t
atgattaaaatcaaaacaagcaatgccgctaatgtacggactttgatggattcaatattcattaaattcgcggaccttgccacggcccttttttcggagctgctgcgaacgccggttaaggtgcgagtcagttgcataaaaacaatagcttacaaacaatacagccgttcaaattccgccccgtcaacattcgccgttataaatatggaacccttacaatgcaacgcggttcttgaaaccaatctttgcgcttcttattccattataagccgtctttgcggcggtataaaagaaaccggtatagaaacgcgtgaacccaatgaaattgaagcctcactatttgaaggaatcattgtccgtcttttgcaaaaaatgcgcgaagcgtggagccggattgcagacctcaacctggcactgcgccatttcgaaaccaatcccctgtttgcccaaatcgcccgcccgaaagacaaggtaataatgagcggcatggaaatcgaaatgacggcgtacaggcaaactcggccaatctga

SEQ ID NO: 26378 - protein, 176 aa, Unknown
  Obtained from environmental sample
  DOMAIN (4)...(171): Flagellar motor switch protein FliM
  misc_feature (1)..(176): Xaa is any amino acid
MIKIKTSNAANVRTLMDSIFIKFADLATALFSELLRTPVKVRVSCIKTIAYKQYSRSNSAPSTFAVINMEPLQCNAVLETNLCASYSIISRLCGGIKETGIETREPNEIEASLFEGIIVRLLQKMREAWSRIADLNLALRHFETNPLFAQIARPKDKVIMSGMEIEMTAYRQTRPI

SEQ ID NO: 26379 - DNA, 570 bp, Unknown
  Obtained from environmental sample
  misc_feature (1)..(570): n is a, c, g, or t
atggataaaaaagcgcttattcttttggcggacgggtttgaggaagtagaggcggtaacccccgttgattatctgcggcgggccaatatcaaagtagttatggccgcgataggaaaaaatgccgacgttatgggttcccacggcataaactttactgccgataccacccttgaaacaatggaaaaacagggcgaacttaatcccgacggatgggactgcgtaattattcccggcggcatgcttggctcaaaaaaccttgccgcttgcgctccggttgggaattttcttaaaaaaaccagcggtaaaggaaaaatgattgccgccatttgcgccgctcccgccgttgttcttgcccccctgggccttttggaagggaaacgctttacctgttatcccggaatggaacaaggattaacaagcgaaacctggacggaagacatagtagtaatcgacggcgctcttattaccagccgcgccgccggtactgccgctgaatttgctttcgctataatcagaatacttgcgggcgacgaacaagaaaataaattacgggccgcgctgctgctgtga

SEQ ID NO: 26380 - protein, 189 aa, Unknown
  Obtained from environmental sample
  DOMAIN (31)...(175): DJ-1/PfpI family
  misc_feature (1)..(189): Xaa is any amino acid
MDKKALILLADGFEEVEAVTPVDYLRRANIKVVMAAIGKNADVMGSHGINFTADTTLETMEKQGELNPDGWDCVIIPGGMLGSKNLAACAPVGNFLKKTSGKGKMIAAICAAPAVVLAPLGLLEGKRFTCYPGMEQGLTSETWTEDIVVIDGALITSRAAGTAAEFAFAIIRILAGDEQENKLRAALLL

SEQ ID NO: 26381 - DNA, 1158 bp, Unknown
  Obtained from environmental sample
  misc_feature (1)..(1158): n is a, c, g, or t
ttggaagacgtgcggacatggcttgaaaaaaattatccgaaagaactgcgggaaaagccaatggagtatacagtcggcaagaacgcgcaggacgcccatgaggcaataaggcccacatacaccgaatatacccccgattcaattaaagaacatttaacaaaggaccagctccgcctgtattcgatcatctgggaaaggtttgtttccagccagatgacaaacgcgaaaagcaggaccgtaagccttgatatcaaggttattgcaggtaacgatgaggggcttttcagggtaagcgggacaaaacttatagaaaaaggattttacaaagcgataaaacttttgtcttccaaagaagaaaacacaggctcttgtccgtcccttgaggtaaacgataaaataaaagttgaaaaattcaaaaatgaacagcattttacccagggaccgtcccgttactcggacgcttccattgtccgcactctggaagagaaaggaatcggcaggccgtcaacatacgcttcaattatttcggttttgcttgaccgttactacgttacgcgcttaaataagcagttggttccgactgttttgggaaaattgatcagcgacgtgttaaccgaacattttccgttatatgtcgacgccgattttacggcttccatggaatcaaaacttgacgacgttgaagaaaacaaagtcagctggccccaaatgataaaagaattctggtatccgttcaagacgactgtagacgacgtgacaaaaaatatagaatcgttcaagggaatccttgatgaacctacggatcacgtttgcgaaaaatgcggcaagcccatgttaaaaaaactcggacgtttcggatttttccttgcgtgttccggtttccccgagtgccgaaacaccaaatcaataccgcttgccaagtgccccaaatgcggcggcgatatagtggcgcgcaagacaaagggcaaaaacaaggagttctacggctgtacaaattatccccagtgtgattttataagtcattttaagccgcttaaccaaagctgcccaaaatgcggattcttccttgtggaaaaatatgacaaaaagaacggcgcccacaaaatatgtataaatcctgaatgtgattatctgcacagcgcggagacggaggaataa

SEQ ID NO: 26382 - protein, 385 aa, Unknown
  Obtained from environmental sample
  DOMAIN (1)...(227): DNA topoisomerase
  misc_feature (1)..(385): Xaa is any amino acid
MEDVRTWLEKNYPKELREKPMEYTVGKNAQDAHEAIRPTYTEYTPDSIKEHLTKDQLRLYSIIWERFVSSQMTNAKSRTVSLDIKVIAGNDEGLFRVSGTKLIEKGFYKAIKLLSSKEENTGSCPSLEVNDKIKVEKFKNEQHFTQGPSRYSDASIVRTLEEKGIGRPSTYASIISVLLDRYYVTRLNKQLVPTVLGKLISDVLTEHFPLYVDADFTASMESKLDDVEENKVSWPQMIKEFWYPFKTTVDDVTKNIESFKGILDEPTDHVCEKCGKPMLKKLGRFGFFLACSGFPECRNTKSIPLAKCPKCGGDIVARKTKGKNKEFYGCTNYPQCDFISHFKPLNQSCPKCGFFLVEKYDKKNGAHKICINPECDYLHSAETEE

SEQ ID NO: 26383 - DNA, 753 bp, Unknown
  Obtained from environmental sample
  misc_feature (1)..(753): n is a, c, g, or t
ttgattaattctgtttctattaataactttaagataataaaaaaacttgaaaatgtacctcttaaaaaaattacattaataggtggaaagaataatattggaaaaactacatttttggaagcactcttcttttatttggactacaactctcctgaagtcattaataaacatttctcttggcgcaaattcaatggaatgtggatgtctcagaaaacatgggaaaaactcttttttgactcagacccttcaaatgaaataaaaatttcaatcaacaccgataaagatataaaaggacaagttattgtaaaatttttggcagattatgagacatctgtaccaattcctgtaacagatgataataaaataacaatacttagaaaaaactttccttcactcgaaatatcacattataataatgaatctattgattatcaggctcatttactttgttataatgcgttttacaattatatcaaagaaatagatctattacaggatcaattgtcggtgttttatattggtgaaggaatgagtttatatgaaaaaaacgcagagtatcttggagttttggataaagccggtgaacagtatcaaatactgccgttattgcagatatttgaacctaatttagaacgactccaactaattaatgaaaacgaaaacaacttaatatatgccgatctgggaaacagaaacaagattcctgttaatatgctgggtgatggtttttgtcgttgtctgactatggcttga

SEQ ID NO: 26384 - protein, 250 aa, Unknown
  Obtained from environmental sample
  misc_feature (1)..(250): Xaa is any amino acid
MINSVSINNFKIIKKLENVPLKKITLIGGKNNIGKTTFLEALFFYLDYNSPEVINKHFSWRKFNGMWMSQKTWEKLFFDSDPSNEIKISINTDKDIKGQVIVKFLADYETSVPIPVTDDNKITILRKNFPSLEISHYNNESIDYQAHLLCYNAFYNYIKEIDLLQDQLSVFYIGEGMSLYEKNAEYLGVLDKAGEQYQILPLLQIFEPNLERLQLINENENNLIYADLGNRNKIPVNMLGDGFCRCLTMA

SEQ ID NO: 26385 - DNA, 852 bp, Unknown
  Obtained from environmental sample
  misc_feature (1)..(852): n is a, c, g, or t
atgaggaatagggaacatggggcagtttttcgtcaatcattgcgggattttccttgtcctgtaacgcttggcgaaaaatcgccgtcttttggtttacaccgttataaacaggacttgcggtttattcctaccgatgatgaaggctntacgcttcggggggataaacagcggttattgtacaagggaaggcggcgttcccataggtttaccattctcggagacggttcttttgagtacgattgtatcttaaaaaaagagcctgacagtaataccattcgtctgcggattgaaggggcagaaaattttgattttttccgtcagcctgtttttgtgaaaaatccttttttgaaagggtcttatgcggtttacaaaaagaaaactatggttggagaaggtacaggcaaactttgccatatccaccgacctgaaattattgacgctcgtgggcgacgttgttggggaacattggttgttatcgggaatgaattacacataacaataccagaacaatggttgagtgaagcggcttatcctgtggtcgtagatccgactattgggactactacggttggggctttttgggaagaccatattcattgggacgaagaggattgggaagatgatacatttgaattatattttgagtggcaaatagcggttaatcaattttattgtgatcaagtcatacaaggcagggcgaacgcatttttttatagcagggattattacattaatgatacttatcctgcgctttataatgggtcatatgaaccagaatgtttagtatctgaaaacgagcaaaaacttccatcgtatatcccagggctttatgaaggcctcggccgattctga

SEQ ID NO: 26386 - protein, 283 aa, Unknown
  Obtained from environmental sample
  misc_feature (1)..(283): Xaa is any amino acid
MRNREHGAVFRQSLRDFPCPVTLGEKSPSFGLHRYKQDLRFIPTDDEGXTLRGDKQRLLYKGRRRSHRFTILGDGSFEYDCILKKEPDSNTIRLRIEGAENFDFFRQPVFVKNPFLKGSYAVYKKKTMVGEGTGKLCHIHRPEIIDARGRRCWGTLVVIGNELHITIPEQWLSEAAYPVVVDPTIGTTTVGAFWEDHIHWDEEDWEDDTFELYFEWQIAVNQFYCDQVIQGRANAFFYSRDYYINDTYPALYNGSYEPECLVSENEQKLPSYIPGLYEGLGRF

SEQ ID NO: 26387 - DNA, 1263 bp, Unknown
  Obtained from environmental sample
  misc_feature (1)..(1263): n is a, c, g, or t
atggccgagacgcgaggcggctcttgttttggagcgggcgataaagatgaaattttccgtcttgcaaggcggataaaagaaacgttttacggaaacagaattgttcttttcgcgccgctgtacctttccaattattgcgtaaacggctgtttgtactgcccttatcattcgcaaaacaaaacaatggcgcgaaaaaaactttcacaggacgaaatccgcagggaagcaatcgcgttacaggatatggggcataagcgccttgcgatagaagcgggtgaagacccggtgaacaacccaattgaatatattgttgagtcaatgaaaacgatatacagcataaaacataaaaacggcgcgatacgccgcttgaatgtaaatattgccgccacaactgtagatgattataaactgctcaaagacgccggtatcggaacatatattttgtttcaggaaacatataacagggaaaagtataaagaactgcatccttccggtccaaaatcagactatgactggcacaccgaagctatggacagggcaatgcagggcggaatagacgacgtagggttaggcgttttattcggtcttggtcagtatctttatgaatttatagcgatacttatgcacgcagaacatctggaagcggcgcacggcgtcggtccccataccataagcgttccgcgcatacgcgccgccgaaggaataaatcccggctctttcaagaacggcatagacgacgatacatttgaaaggattgccgcctgccttagagtcagcgtcccctataccggaattattgtctcaacaagggaaagcgaagaatccagaanaaaagttttggaacttggagtttcccaaatcagcggcggttcccgtaccagcgtcggcggttacgaaaaagaggaagaggaaaacacaaaacaatttaaagtcaacgacaaccgttctcttgatgaagtggtaagctggcttataaaagataaatttattcccagtttttgtactgcgtgctaccgcgaagggcgtacaggcgaccgctttatgtcgctgtgcaaatccggccagatacaaaattgctgcctgcccaacgcgcttatgacactgcaggaatacctgattgattacgctgcaagcggcacaagaaccgccggggaagaattgataaagagcgaaattgaaaacatacctaatgaaaaaatgcgtacgcttgtcgttaaacacttggaagaaattaaacaggggaacagggatttcagagtatga

SEQ ID NO: 26388 - protein, 420 aa, Unknown
  Obtained from environmental sample
  DOMAIN (40)...(210): Radical SAM superfamily
  misc_feature (1)..(420): Xaa is any amino acid
MAETRGGSCFGAGDKDEIFRLARRIKETFYGNRIVLFAPLYLSNYCVNGCLYCPYHSQNKTMARKKLSQDEIRREAIALQDMGHKRLAIEAGEDPVNNPIEYIVESMKTIYSIKHKNGAIRRLNVNIAATTVDDYKLLKDAGIGTYILFQETYNREKYKELHPSGPKSDYDWHTEAMDRAMQGGIDDVGLGVLFGLGQYLYEFIAILMHAEHLEAAHGVGPHTISVPRIRAAEGINPGSFKNGIDDDTFERIAACLRVSVPYTGIIVSTRESEESRXKVLELGVSQISGGSRTSVGGYEKEEEENTKQFKVNDNRSLDEVVSWLIKDKFIPSFCTACYREGRTGDRFMSLCKSGQIQNCCLPNALMTLQEYLIDYAASGTRTAGEELIKSEIENIPNEKMRTLVVKHLEEIKQGNRDFRV

SEQ ID NO: 26389 - DNA, 834 bp, Unknown
  Obtained from environmental sample
  misc_feature (1)..(834): n is a, c, g, or t
atggacaatgtagtcgtcaaaggcggcacggttgaggcgggtactacgggttatgcgattgacaacaagatagcccagggcaaggtaaacatctcgggcggcgaggttattgcatttgacggcagggcggttaacaacagggtgcctaaagcaacaacccctgctggtggaactggtttagctctttacagcgtaaacatctccggcggcgtggtttcggcaacaaacggcatagcggtaaataacgtacaagacggtttgattgtcataagaggcgttgagaccaaggtcacttcgataaacacaaaaaacagcctggggacgatcgttttagaagacttttcttatgatgatgataagttgaataccccggtgctttggatacaaggcggcacggtagagaacgactcaaccggcaacgccatttttaacgcgtccaacggcaagataaccgtcacaggctatgaaggcggtgatgatgaagcggatcccgaatcctatcccgaagttagggcttcgtccggctgtgcaatctttaacgataaaggcggatttttggacataatcaaaggcgcctgggtacatgtgacatcgggcatcgcggtgaacaacactaaaggaaatgctaaaggattaaaggatactattgacacagaaacccttgggagggatttttacagtattatctatatctcggatgaaccgggggacgaagaaactgatgacgcgtattttgaggccctgcccagaaccagggttacggcggagagcggcacggcggtgtataccaatggtaatggtcccactcggaaagagttacgacactcgccataa

SEQ ID NO: 26390 - protein, 277 aa, Unknown
  Obtained from environmental sample
  misc_feature (1)..(277): Xaa is any amino acid
MDNVVVKGGTVEAGTTGYAIDNKIAQGKVNISGGEVIAFDGRAVNNRVPKATTPAGGTGLALYSVNISGGVVSATNGIAVNNVQDGLIVIRGVETKVTSINTKNSLGTIVLEDFSYDDDKLNTPVLWIQGGTVENDSTGNAIFNASNGKITVTGYEGGDDEADPESYPEVRASSGCAIFNDKGGFLDIIKGAWVHVTSGIAVNNTKGNAKGLKDTIDTETLGRDFYSIIYISDEPGDEETDDAYFEALPRTRVTAESGTAVYTNGNGPTRKELRHSP

SEQ ID NO: 26391 - DNA, 906 bp, Unknown
  Obtained from environmental sample
  misc_feature (1)..(906): n is a, c, g, or t
atgacagattcgacagtcccagcaggtcttgcagccggacaatattggtatggaaaacttaccgtaagcggccagggattcagccctgtggaaatacaattgataatccgcgtaatcggcgccaaatacgtcattatccaggacaccgataatattttcatatataaagcgactaaaggcgaaccctccgacccaacaagcaccgcagtggaagaaggaccgttacataaagttctgacagccatcagagaaaacgccgcggcagccaacgaaaaagccgttgccatacagttcggccccgacgctgacggtgacggtatatttgataaagaagtgaacgtccaaagcgccattgcttttgagaacgacgacaccgcctgggatgttgtagaactccaggggtgcataaactcaacgaataacgagtcgaattccggcgccgtggtagtcggcgacggcgttaaattttccaattttgcggatataaggcatgaagatgaaactggcggcggcgccaatataatctataacaagtccgacgaggacataacgatttggcaaggcaaacttacggcaaaattcggcagagtcgtgaccaatatggcctcaggctcggtgattgtcaaaggcggcaatcttaacgcgacaagtaaagaggcgatttataacactgccgaaggcagcatcattgttgaaggcggcacggttgaggcgacaacgggcaccgcgatatcaaacgcgtcctcaggcaccgtaacagtcacaggcggcacggttaggacgtctgggaactcgggtgttgcgattgacaacagcgcgaacggcgcgatcttcgtgcagggcggaaccgtcacgtctattaatacgaacagagaccagggaacagttcgtcttcaaaatatgtaa

SEQ ID NO: 26392 - protein, 301 aa, Unknown
  Obtained from environmental sample
  misc_feature (1)..(301): Xaa is any amino acid
MTDSTVPAGLAAGQYWYGKLTVSGQGFSPVEIQLIIRVIGAKYVIIQDTDNIFIYKATKGEPSDPTSTAVEEGPLHKVLTAIRENAAAANEKAVAIQFGPDADGDGIFDKEVNVQSAIAFENDDTAWDVVELQGCINSTNNESNSGAVVVGDGVKFSNFADIRHEDETGGGANIIYNKSDEDITIWQGKLTAKFGRVVTNMASGSVIVKGGNLNATSKEAIYNTAEGSIIVEGGTVEATTGTAISNASSGTVTVTGGTVRTSGNSGVAIDNSANGAIFVQGGTVTSINTNRDQGTVRLQNM

SEQ ID NO: 26393 - DNA, 585 bp, Unknown
  Obtained from environmental sample
  misc_feature (1)..(585): n is a, c, g, or t
gtggcntgcgtattgggagttgcggattatctcggaattgatagaaccagagctttaaagtccattgctgagcatgaaccggatgccggagcttttggaatatatacctggaaaacgaatgccaaccccgttttctttgccgatgccagagcggcaaatgatgttgaatcaacagagcgcttatttgctgcggcttttcatgccgtaaaacccgataaagacaccaaacgaatcttattgataattaaccgggaagatcgccctgaaaggacatggggttttcttcaatacattattgaccaaaacagtgcattacgttttgaccaatacttctgtctgggctacgttcctttaccatttcgaacggcactgaagcgaagacgtataaactttaaaattatacgaggcgcaaaggatctggattgcgaactgggaaaactcccggagcatacagtattcatttcgggagctggaaattacggtggggcaggtgagttgataactcaatggcttgaaacaaaacggcatgaaccggactttactcaaatttcagaaacttctatttgggagacagtacagcaatga

SEQ ID NO: 26394 - protein, 194 aa, Unknown
  Obtained from environmental sample
  misc_feature (1)..(194): Xaa is any amino acid
MACVLGVADYLGIDRTRALKSIAEHEPDAGAFGIYTWKTNANPVFFADARAANDVESTERLFAAAFHAVKPDKDTKRILLIINREDRPERTWGFLQYIIDQNSALRFDQYFCLGYVPLPFRTALKRRRINFKIIRGAKDLDCELGKLPEHTVFISGAGNYGGAGELITQWLETKRHEPDFTQISETSIWETVQQ

SEQ ID NO: 26395 - DNA, 1572 bp, Unknown
  Obtained from environmental sample
  misc_feature (1)..(1572): n is a, c, g, or t
ttgatggcgagctctcggcatggttcgcccgacgtgtacaggaagatgacgtcaaccttcgcgaaaggcgaaaccgttaatgtagactctttgatgcgccgcttcgtggaattgcagtacgagcgcaacgacaatgttctggatcgcggacgtttccgcagaaggggagacaccattgaaattttccccgcttacatggaagaggcctaccgcgtcgaccttgactgggacagggtcgagcgcataaggcgctttaacccagtgtccggcgagatgctggaagatattgacagggcgcttatctacccggcgaagcagttcgtcatgcccgccgacatggtgcataacgcgatgggagccataaagcgggaactggaagaacggcttgagtttttcaagagccagggcaagataatcgaggcggaacggctgaaaacccgcgttgagtacgatattgaaatgcttaacgagatgggctactgttccggcattgaaaattattcggcgcttttggcgggccgcaaacccggcgagtctccggacacccttgttgattacctcccccaaaagcacctgaccttcattgacgaaagccatgttacattgccgcagttaggcgcaatgtacgccggggatcgcagccgcaagcagagccttgtggactacggcttccgcctgccctgcgccctggacaaccgccccctgcgctacgatgaatttgtcgatcgcctggacaagacagtttttgtgtcggccacgcccggcaaaaccgagatagagcagtccgcccgcgtggttcagcagcttatccgtcctaccggccttcttgaccctgaaatagaagtgcgtcccagcgaaggccagatggaggacatctacagcgaaatacgaaagcggatcgatgcgggcgagcgatccctcatccttaccctgaccaaaaagatggccgaagacctcaccgactacctttccggcctgggactgcgcgtgcgttatattcacagcgaagtagagacaatagaaagggtagaaatactaacccagcttcgcagcggggagttcgatgtcctggtgggaatcaatttattgagggaaggcatcgatctgcctgaagtgtcttttatcgcgattctggacgcggacaaaataggctttctaaggtcgcttaccagcctggtgcagataatcggacgggcggcgcgtaacgcggcaggcaaggtgatcatgtacgcggacagggtaagcgacgccatgaagacagccattgccgaaaccgagcgccgccgcgctattcagatggaatacaacgaaaagcacggaattacccccactacggttaagaaggcaataacagacattctgcaacgccacgcggcggaagaaagggacgccgctgcctcatccgttgaagtgcttaaaaagtcattcaacgtcattattccagccgagcggaagaagcttatttcagcactcgaaagggaaatgctggaacacgccaagaacctggaatttgaacaggcggccaccatcagggacgagataaagaagataaaggagatcggaaatacatga

SEQ ID NO: 26396 - protein, 523 aa, Unknown
  Obtained from environmental sample
  DOMAIN (485)...(520): UvrB/uvrC motif
  misc_feature (1)..(523): Xaa is any amino acid
MMASSRHGSPDVYRKMTSTFAKGETVNVDSLMRRFVELQYERNDNVLDRGRFRRRGDTIEIFPAYMEEAYRVDLDWDRVERIRRFNPVSGEMLEDIDRALIYPAKQFVMPADMVHNAMGAIKRELEERLEFFKSQGKIIEAERLKTRVEYDIEMLNEMGYCSGIENYSALLAGRKPGESPDTLVDYLPQKHLTFIDESHVTLPQLGAMYAGDRSRKQSLVDYGFRLPCALDNRPLRYDEFVDRLDKTVFVSATPGKTEIEQSARVVQQLIRPTGLLDPEIEVRPSEGQMEDIYSEIRKRIDAGERSLILTLTKKMAEDLTDYLSGLGLRVRYIHSEVETIERVEILTQLRSGEFDVLVGINLLREGIDLPEVSFIAILDADKIGFLRSLTSLVQIIGRAARNAAGKVIMYADRVSDAMKTAIAETERRRAIQMEYNEKHGITPTTVKKAITDILQRHAAEERDAAASSVEVLKKSFNVIIPAERKKLISALEREMLEHAKNLEFEQAATIRDEIKKIKEIGNT

SEQ ID NO: 26397 - DNA, 666 bp, Unknown
  Obtained from environmental sample
  misc_feature (1)..(666): n is a, c, g, or t
atgtcagttgaagaatcgtatctgcaggacgctgtggatttgatgattgtcagggaaaccagcaagcaggacagcattcaccagaaattaatggcgcttgactttatcggcagcctcattgaacagggcaataccagcgatgaaatccgcttaacgctggaacgcctttcccttgagggaaccaacattcaggccagggaaaggggccgcctcaagaacgactaccccgaagtaaggaggcaggcggcaaagcaccttggctcctttggcaccgaggaagccaagatcgcgctcttaagagtctgcgtctctgacaatgagccgttggtcctgcaggaagcggtcagatcgcttggccaaataggcatagataaagacggtgaagtggtcggcaccattgtctgggtaaccaacaaattcaccaacaccatatccccggataaccttcttgcccttgccgcgatagaagctatccaaaaaatagccaaaaacaacaatggcgtaagagaagacgccttcaacctcctcatcaggatatctgaaggctcttattccccgcctgtcagggaaaaagcccggcaaaccgtaatggatatccgcaacctgatctccaataacgcgaaggcaaaaaaaggacaaggccaacaacaaggacaaccgagataa

SEQ ID NO: 26398 - protein, 221 aa, Unknown
  Obtained from environmental sample
  misc_feature (1)..(221): Xaa is any amino acid
MSVEESYLQDAVDLMIVRETSKQDSIHQKLMALDFIGSLIEQGNTSDEIRLTLERLSLEGTNIQARERGRLKNDYPEVRRQAAKHLGSFGTEEAKIALLRVCVSDNEPLVLQEAVRSLGQIGIDKDGEVVGTIVWVTNKFTNTISPDNLLALAAIEAIQKIAKNNNGVREDAFNLLIRISEGSYSPPVREKARQTVMDIRNLISNNAKAKKGQGQQQGQPR

SEQ ID NO: 26399 - DNA, 507 bp, Unknown
  Obtained from environmental sample
  misc_feature (1)..(507): n is a, c, g, or t
atgctggaagaacttgaaaaaaacggcgtttaccgcgaagaaacaaaaggctgggatgtagaccttcttttgcagtcctgccagcttcatgatgtaggcaaaatatccattgatgacgttatcctaaaaaaacccggtaaactcaatgagcaggaatatgctgaaatgaaaaaacacgcgcatatcggcgagcagataattgaaaaaattgaaactctggcgaaggaaagcgattttttaaattacgcgaaaatttttgcggcaagccatcacgaaagatgggacggcaatggttatccgcgcggacttaaagaaaacgaaatacccctactgggccgcatcatggcgattgccgatgtatacgatgcgcttacttcggtgcgtccgtataaaaacgcctttagccacgaggaagctgtgcggattatcagcgaaggaaggggaacccagtttgatccggctctggtagacatattcataaacgcggctgatcgatttaaaagatag

SEQ ID NO: 26400 - protein, 168 aa, Unknown
  Obtained from environmental sample
  DOMAIN (10)...(124): HD domain
  misc_feature (1)..(168): Xaa is any amino acid
MLEELEKNGVYREETKGWDVDLLLQSCQLHDVGKISIDDVILKKPGKLNEQEYAEMKKHAHIGEQIIEKIETLAKESDFLNYAKIFAASHHERWDGNGYPRGLKENEIPLLGRIMAIADVYDALTSVRPYKNAFSHEEAVRIISEGRGTQFDPALVDIFINAADRFKR

SEQ ID NO: 26401 - DNA, 777 bp, Unknown
  Obtained from environmental sample
  misc_feature (1)..(777): n is a, c, g, or t
ttgaaaactgaaaactggactaatcccaaagatgtctcctggggggagaaggggtttataatcaataaaacggctctcggcgatccaatggggaatatgtcgcctaacaacgagcaatttttgattaatcctatttacgaaacggagattatgaccgatgccgccaaaaaatcggtgatgatgaaccttgtacgccatcgcccgatgtcggggtcttctatctttttgccgacgcgggacagaggcggggtacaactaaagtggcacacttcctacggacagaaaatagagggcagcaaaccaaagggtgttgagcgcgtggaactcaaggcgtatactctggcggggtatattccgtggtttgacgaatttgaggaagatgtctttatcgacttcggtcaaatgttcgtggatgaattcattgagacatacgggcaagagtttgacagacaatgcctgttggcagacaacgacccctttaccggcgcgatgatgtgtcccgatgttaccgaggttacaattaaaggtaataccgctaatgatttatcgtggaaggattttagggacgcggtttacaaagtaccagccgaagaaagaaaagactgcgcgtggtttttgaatgagacagtcttgaaccatatttcaagccttgaggatacgacaggccgcccgatttggcgggggcctacagaggctatgcctggcaaacttgacttgtatccgtatcacgaggtttccattctgccgcanattgcagacattgaggctaaccaatga

SEQ ID NO: 26402 - protein, 258 aa, Unknown
  Obtained from environmental sample
  misc_feature (1)..(258): Xaa is any amino acid
MKTENWTNPKDVSWGEKGFIINKTALGDPMGNMSPNNEQFLINPIYETEIMTDAAKKSVMMNLVRHRPMSGSSIFLPTRDRGGVQLKWHTSYGQKIEGSKPKGVERVELKAYTLAGYIPWFDEFEEDVFIDFGQMFVDEFIETYGQEFDRQCLLADNDPFTGAMMCPDVTEVTIKGNTANDLSWKDFRDAVYKVPAEERKDCAWFLNETVLNHISSLEDTTGRPIWRGPTEAMPGKLDLYPYHEVSILPXIADIEANQ

SEQ ID NO: 26403 - DNA, 513 bp, Unknown
  Obtained from environmental sample
  misc_feature (1)..(513): n is a, c, g, or t
atgtaccctatagcacaggctcttaaaaaagcgggcaacaaagtgagcgttattttgggagctaggcaaaaaaatttgataataatggaaagcgaattgaaaagcgtttgcgatgaaatgataatttgcacagacgatggctcttatgggcgcaaatgcttggtgacagaacctttaaaggaactctgcgaaaattgcaaaccgaactttgtcatagccattggtcctcccataatgatgaaattctgtgcagaaacaactcgcccttatggcgttaaaacttatgcaagccttaacagtattatggtggatggcactggaatgtgcggctgctgccgagtgacggttggcggcgaggttaagtttgtgtgtgtggatggtcctgaatttgatgcccacaaggttgattgggaaaatatgatgaaaagaatgggaacttacaagcaacgcgaagcccttgcaaaagaaagggtgcttgaaaagataaaaaattgcaagtgtggggataaatga

SEQ ID NO: 26404 - protein, 170 aa, Unknown
  Obtained from environmental sample
  DOMAIN (1)...(85): Oxidoreductase NAD-binding domain
  misc_feature (1)..(170): Xaa is any amino acid
MYPIAQALKKAGNKVSVILGARQKNLIIMESELKSVCDEMIICTDDGSYGRKCLVTEPLKELCENCKPNFVIAIGPPIMMKFCAETTRPYGVKTYASLNSIMVDGTGMCGCCRVTVGGEVKFVCVDGPEFDAHKVDWENMMKRMGTYKQREALAKERVLEKIKNCKCGDK

SEQ ID NO: 26405 - DNA, 1491 bp, Unknown
  Obtained from environmental sample
  misc_feature (1)..(1491): n is a, c, g, or t
gtggatgagaatattccgacaacgctgttcggcgatgaactacgcattaaacagattcttaacaacctgctttccaacgcgtttaagtataccagctcaggtaaagttacactgtcggttgtttgtgaggcgcagcaggaaaaagctgccggtataatgcttgttttccgtgtcattgataccgggcagggcatgactgcggaacagataaataaactgtttgatgagtatacccgctttaacacggaagccaaccgcacaaccgtgggtacgggcctgggcatggccattacaaaatacctcgtccagatgatggacggcgcaatttccgtggaaagcgatccgggtaaaggttcagtgtttaccgtaaagcttccgcaggggaccgttgatggggcgggtgtattgggcagggaattgacggagaacctgaaacaattccgtcttggcagagcggagcagatgaaaaaagcgccgcaaattatacgcgaatatatgccttacggcagagttttagttgtagacgatgtggaaacaaatctgtatgtcgccaaagggttgctggctccctacggcctgtcggttgaaacggtcggaagcgggtttgaggccattgaaaaaatcaaaaataacgtggtttacgacatcatcttcatggatcattttatgccggaaatggacggcatagtaacgacaaaaaaattacgtgaattgggatatacgcggcccgtagtggcgctgacagctaatgccctggcggggcaggcggaaatgtttgcggcaaacggttttgatgattttatttccaagccgatagatattcaccagcttaacgctgcattgaacaaaacagtacgcgacagacatcaggataaaagcgatgagatgaaacgggagatcgtgaataatctgaataaatccgccggtaaacagccgcgttttatagatcaacagttaagagaggcttttatcagagacgctgaaagagcggccgctttgttggatataatacattcaaaaaattatcgcagagccgatgatttacagttgtacattgtcaatgtccacgctttgaaaagcgcgctggccaatatcggggaaatgaaaatgtcagccgcggcggcaaaactggaagatgcggggcgtaaacagaatattgacataatttcagctgagacgcccatgtttctgctctccctgcggacagtgatcgaaaaaatcaaaccgaaagaagacaattccggtgatgaagcctctaacgatattagcggtgatgacggcgcttatcttttggaaaaactggccgccataaagacagcctgcacggattatgataaaaaaagcgcaaaagatacgctggttcagcttaggcaaaaaacatggccgcgccctgtcaaggaactactggagacaatagccgaacatctgctgcacagtgaatttacacaggccgcagatatcgcggaaaactataaattaccggaaaattga

SEQ ID NO: 26406 - protein, 496 aa, Unknown
  Obtained from environmental sample
  DOMAIN (169)...(282): Response regulator receiver domain
  misc_feature (1)..(496): Xaa is any amino acid
MDENIPTTLFGDELRIKQILNNLLSNAFKYTSSGKVTLSVVCEAQQEKAAGIMLVFRVIDTGQGMTAEQINKLFDEYTRFNTEANRTTVGTGLGMAITKYLVQMMDGAISVESDPGKGSVFTVKLPQGTVDGAGVLGRELTENLKQFRLGRAEQMKKAPQIIREYMPYGRVLVVDDVETNLYVAKGLLAPYGLSVETVGSGFEAIEKIKNNVVYDIIFMDHFMPEMDGIVTTKKLRELGYTRPVVALTANALAGQAEMFAANGFDDFISKPIDIHQLNAALNKTVRDRHQDKSDEMKREIVNNLNKSAGKQPRFIDQQLREAFIRDAERAAALLDIIHSKNYRRADDLQLYIVNVHALKSALANIGEMKMSAAAAKLEDAGRKQNIDIISAETPMFLLSLRTVIEKIKPKEDNSGDEASNDISGDDGAYLLEKLAAIKTACTDYDKKSAKDTLVQLRQKTWPRPVKELLETIAEHLLHSEFTQAADIAENYKLPEN

SEQ ID NO: 26407 - DNA, 414 bp, Unknown
  Obtained from environmental sample
  misc_feature (1)..(414): n is a, c, g, or t
atggaaaagacaaaaaaaagagcgctgaaattggcaaataaaaaaatcgcgtttgtcggttctgtcaacgaacataacgtgccaaacatcaaggcaatgtcggttataaaacataacgggctggaaacgttttattttgtttcaaatcattctgagattaagacggaacattataagcgtaattttaacgcttgtatatattttaccggcggcccgatttataaagaacttatactggagggtataatgaaagtctttcatggcgatgaaataaaaaattttgtccggatgaataataataaaaacgcgtataaaaacggcggacgggattctgattattgcgtgctgcaatttatcacaaagaaggggcgttttcatcattggtttaaaaccgaagcgtttgatattgattag

SEQ ID NO: 26408 - protein, 137 aa, Unknown
  Obtained from environmental sample
  misc_feature (1)..(137): Xaa is any amino acid
MEKTKKRALKLANKKIAFVGSVNEHNVPNIKAMSVIKHNGLETFYFVSNHSEIKTEHYKRNFNACIYFTGGPIYKELILEGIMKVFHGDEIKNFVRMNNNKNAYKNGGRDSDYCVLQFITKKGRFHHWFKTEAFDID

SEQ ID NO: 26409 - DNA, 360 bp, Unknown
  Obtained from environmental sample
  misc_feature (1)..(360): n is a, c, g, or t
ttgcttcgtgattacgttgcgtttgtagaagaagtacgagaaatcaacagagaggaggttatgaccccagagcgggcgatggagagggcgatagataactgtataaaaaaagggatattaatcaatttcctaaaccaccataaacaggagattatgaaaatgttagtaacggaatgggattacgatttagaaaaggaagtcttaaaagaagaagcgcatgagaaaggtctaaaggaaggtcgggaggaagagcgcgccatactcatcaagagtatgtacgaaaacggcctgaccgttgcgcaaatagtaaaaagcacaaacctttccgaaacggtcgtcaagcagattttaggcttgtag

SEQ ID NO: 26410 - protein, 119 aa, Unknown
  Obtained from environmental sample
  misc_feature (1)..(119): Xaa is any amino acid
MLRDYVAFVEEVREINREEVMTPERAMERAIDNCIKKGILINFLNHHKQEIMKMLVTEWDYDLEKEVLKEEAHEKGLKEGREEERAILIKSMYENGLTVAQIVKSTNLSETVVKQILGL

SEQ ID NO: 26411 - DNA, 327 bp, Unknown
  Obtained from environmental sample
  misc_feature (1)..(327): n is a, c, g, or t
atggtcagaatcggccgagaaggcgcgggcgtctgtcaggattacgcgcatatactgctcgccgttctgcgcctagacaaaatcccctgccgctacgtagccggtctcgcctccgactacggcgaaacccacgcgtgggtagaggcgtggacgggtgatagatactgcgccgtagacccgacgcgcgacaaactcgtagacgagggctacatagcgttgtcgcggggccgcgatttcgccgacggttcgatagaacgcgggatattcaaaggaacgtgccgcgggacgcagacggttacggtcggtttgaacatggagatttcgtaa

SEQ ID NO: 26412 - protein, 108 aa, Unknown
  Obtained from environmental sample
  DOMAIN (7)...(61): Transglutaminase-like superfamily
  misc_feature (1)..(108): Xaa is any amino acid
MVRIGREGAGVCQDYAHILLAVLRLDKIPCRYVAGLASDYGETHAWVEAWTGDRYCAVDPTRDKLVDEGYIALSRGRDFADGSIERGIFKGTCRGTQTVTVGLNMEIS

SEQ ID NO: 26413 - DNA, 810 bp, Unknown
  Obtained from environmental sample
  misc_feature (1)..(810): n is a, c, g, or t
gtgtggatgatggtcaaaccggagacgttcggactcgccggcttggaagacgccgtgaagttatctttcatctcggtgacggtatggtgggcggtgttctcgattccgcttttcctattcgtcaaggagaagaaccgcaaagcgtcaacacgcagaaaatttcttgccgccgcggcagatacggccggcgcggtgaaaaagaccttcttggcgataatacgaaggaaagaactgctgctgtttttgatagcgtactggttctattacgacggcataaacacgttcatacgaatggcggtggacttcggcctgtcaataggtttcggccccgagtctctaatggccgctctcatcacaacgcagctgacggcctttccggcgtcgctgtttttcggttatttctccgaaaagataggggcgggacggatgatctttgccggagtgctgatgtatctgttgataagcgtggccggttcgctctttatgcgtaccgaaacgcacttcatcatactcgcggcgcttgtgggtttggcccaaggcggcatacaagcgctcagccgctcctatttcgcgaagttgataccgcccgacgaatcaacggaatacttcggcttctacaacgtggtaagccgcttcgccgtagtcggccccgcggtggtcgggctggtagcgatgatctcaaggggcgccggagcgggggagacggccgcgtcgcgtataggaatatcgtcaatagccctattcttcgcggcggggttgattttgctacggttgagctttacgaaatctccatgttcaaaccgaccgtaa

SEQ ID NO: 26414 - protein, 269 aa, Unknown
  Obtained from environmental sample
  misc_feature (1)..(269): Xaa is any amino acid
MWMMVKPETFGLAGLEDAVKLSFISVTVWWAVFSIPLFLFVKEKNRKASTRRKFLAAAADTAGAVKKTFLAIIRRKELLLFLIAYWFYYDGINTFIRMAVDFGLSIGFGPESLMAALITTQLTAFPASLFFGYFSEKIGAGRMIFAGVLMYLLISVAGSLFMRTETHFIILAALVGLAQGGIQALSRSYFAKLIPPDESTEYFGFYNVVSRFAVVGPAVVGLVAMISRGAGAGETAASRIGISSIALFFAAGLILLRLSFTKSPCSNRP

SEQ ID NO: 26415 - DNA, 399 bp, Unknown
  Obtained from environmental sample
  misc_feature (1)..(399): n is a, c, g, or t
atgacggacttcatcgccggaaacacgggagacaaacagtatgttggccgaaccgataacgtattttatgacagcttcttggatatgggcggaagcggcggaggcggagggggcggcaataaaccgaagccgcgcaagttttcaaaaaccgcccaagacgtgttcaaagccggcaaggaattatggagatactaccacgcgcaaccgaatattgacgtaaacgcctcatactacgacatccgcgagcactttcaaggcagaaacgcccgcgggacaatgaatccgaacagcaacgacgaacactatacggagttgatttcaaaactgcgcgcggcgtcggatatattggctaagaaaatagaacctaaagtgtacgagtacgggtttttgaaagaataa

SEQ ID NO: 26416 - protein, 132 aa, Unknown
  Obtained from environmental sample
  misc_feature (1)..(132): Xaa is any amino acid
MTDFIAGNTGDKQYVGRTDNVFYDSFLDMGGSGGGGGGGNKPKPRKFSKTAQDVFKAGKELWRYYHAQPNIDVNASYYDIREHFQGRNARGTMNPNSNDEHYTELISKLRAASDILAKKIEPKVYEYGFLKE

SEQ ID NO: 26417 - DNA, 831 bp, Unknown
  Obtained from environmental sample
  misc_feature (1)..(831): n is a, c, g, or t
ttggagagctcgcttcgttctgggaagaccggctggttcctgctggaagacgaaatgacccaggtgaattttaattttgtcaatgacgtgtgttaccagggggcctttgcgctttcccggtcggtacaggccggaaagcctttgggacttgaggtctttggccgcgagggaaaaaccatttatgagattctcgcgtctttgccggaaaaggtaaaagaaagctggtttgcctttgatcatttttattccgatataggttttgaagaagcccttcccattgtattttcccataatccgcggaagattatcgacatcggtggaaataccgccaagtgggccatctgctgctgccgccatgacccccaggtggaggtgaccattgtagacctgccggggcagactcaggcggcgctgcagaaaatagaacaagccggtttttccggcaggatcaaaaccatagcctgcaatgttctggataccgaaacagccattcctgccggagccgatataatctggatgagccaattcctggattgtttttcccttgaggaagtaacccggatcatggagaaggtgcgccgggcggcggggtctgccgcgaatgtgtatgttctggaacccttttgggacaaacagcgttttgaagccgcgtcttattcgcttcaggccacgtccctttattttacctgcatggccaacggcaacagcaagatgtaccgctatggggaacttgcgggggcaatagaaaaggcgggctttgacattgttgacgcgcggcataatttgggttccaatgattattcgctgctgtgctgccggaagcagccatga

SEQ ID NO: 26418 - protein, 276 aa, Unknown
  Obtained from environmental sample
  misc_feature (1)..(276): Xaa is any amino acid
MESSLRSGKTGWFLLEDEMTQVNFNFVNDVCYQGAFALSRSVQAGKPLGLEVFGREGKTIYEILASLPEKVKESWFAFDHFYSDIGFEEALPIVFSHNPRKIIDIGGNTAKWAICCCRHDPQVEVTIVDLPGQTQAALQKIEQAGFSGRIKTIACNVLDTETAIPAGADIIWMSQFLDCFSLEEVTRIMEKVRRAAGSAANVYVLEPFWDKQRFEAASYSLQATSLYFTCMANGNSKMYRYGELAGAIEKAGFDIVDARHNLGSNDYSLLCCRKQP

SEQ ID NO: 26419 - DNA, 711 bp, Unknown
  Obtained from environmental sample
  misc_feature (1)..(711): n is a, c, g, or t
gtgctgccggaagcagccatgagcggcggaccgtatatcacccgccttgcggcatgggctcccggagtagagacctccggcgattgggatgaatgggcgcagggtagacggaacatagcttccgacaggaaaggaccggcaattgcttttaccgattccctgttccgccggcgcttgagtcaaatttcaaaaatgaccatacaggttgcctatgacctgttgccggtgggggaagacacaaaaatcttttttatatcattccggggcgagctttcacggcagtatcagattaacaagatgttggcggaagaaaaaaacctgacgcctgcggctttttcgctttcggtttttaacgctccggtagcgttggcttctattgccattggacttaaagggggatactcggcgctgtatccgggaaataactcatttgccgcaggtcttgcggcggctgaaggatttctttcttcgcaagcgccgctatcttccaaaaggggggaacttatttttatatatgccgatgaacaagtaccgcctgaatatgagcgtttttttaccgaatgccctccttgcctggccttcggccttcttttgacatgggaacctcatccccttgccattcctttctcgtcactcaatgagggagaagtcagcccgtctgattttctcaggcggctccttctttgcgataaaatccatgtttccccctga

SEQ ID NO: 26420 - protein, 236 aa, Unknown
  Obtained from environmental sample
  misc_feature (1)..(236): Xaa is any amino acid
MLPEAAMSGGPYITRLAAWAPGVETSGDWDEWAQGRRNIASDRKGPAIAFTDSLFRRRLSQISKMTIQVAYDLLPVGEDTKIFFISFRGELSRQYQINKMLAEEKNLTPAAFSLSVFNAPVALASIAIGLKGGYSALYPGNNSFAAGLAAAEGFLSSQAPLSSKRGELIFIYADEQVPPEYERFFTECPPCLAFGLLLTWEPHPLAIPFSSLNEGEVSPSDFLRRLLLCDKIHVSP

SEQ ID NO: 26421 - DNA, 939 bp, Unknown
  Obtained from environmental sample
  misc_feature (1)..(939): n is a, c, g, or t
atggcaggtttagacgctgatttgattatcattggcgcgggtcccgcggggcttaccgccgcgcaatacggagcaaggtctaacttgaaagtccttgttattgaacaaattgctcccggaggacagattctggttattgaccgattggaaaattatccgggcgttaccgaggaaatttcaggttatgaattttcgcttgccttgtacaaacaggctgaaacttttggagcggtttttattacggaaactgtaacaagtataaaaaaagacgagcattttaccgtagggctttcaaacgggaaaactcttaccgcttttgctgtaattcttgcgacaggttcaaagccggctttgctcggcgctcccggtgaaaaggaattttcggcaaagggcgtttcttactgcgctacctgcgacggtcatttctttaaaaacaaaaaaatgtttattgtcggcggaggggatgccgcttgtgaggaagcgcgttatctttcacatttaacggaaaaggttgtgttagttcacagacgggacgctttccgcgcccaaaaagctcttgccgaaagaacgatgaaaaatcctaaaattgaagtgcgttttaatacgataattaaagaaattaaaggcgatgaaagagtaaaatcggttgtttgggaaaataacaaaacaggcaaaacaggcgaagaagagacagacgccgtttttatttttgtcggcactgttccgcagtctgcgctcgcgcgctctttaggcgcgaatttggacgaaggcggtcatataattaccgatcaaaaaatggcgactaatgtttccggtttctacgccgttggcgatataagatccaatgctttccggcaagttgtaacagccgcatccgacggagcgattgccgcgcacaatgccgcagattatattgatgaagaaaaaagtaaaaaataa

SEQ ID NO: 26422 - protein, 312 aa, Unknown
  Obtained from environmental sample
  DOMAIN (7)...(189): FAD dependent oxidoreductase
  misc_feature (1)..(312): Xaa is any amino acid
MAGLDADLIIIGAGPAGLTAAQYGARSNLKVLVIEQIAPGGQILVIDRLENYPGVTEEISGYEFSLALYKQAETFGAVFITETVTSIKKDEHFTVGLSNGKTLTAFAVILATGSKPALLGAPGEKEFSAKGVSYCATCDGHFFKNKKMFIVGGGDAACEEARYLSHLTEKVVLVHRRDAFRAQKALAERTMKNPKIEVRFNTIIKEIKGDERVKSVVWENNKTGKTGEEETDAVFIFVGTVPQSALARSLGANLDEGGHIITDQKMATNVSGFYAVGDIRSNAFRQVVTAASDGAIAAHNAADYIDEEKSKK

SEQ ID NO: 26423 - DNA, 603 bp, Unknown
  Obtained from environmental sample
  misc_feature (1)..(603): n is a, c, g, or t
ttgccgcgcacaatgccgcagattatattgatgaagaaaaaagtaaaaaataaaacgcaggttcttgtttttttcctgtgtgtatttttatttttcaattcgcttcctcttttctctctaagttttaacgattcgggaactccggcggaacttgccgccgccattgaaaacgccatgacagacgaacaggctcttgcgcaggtttttatgcttggctgggttggagaagagccgtcgccgttaattatggactggattcgccggagaaatatcggcggggtaaaaattttcggatggaatacggcgaatacgcataaattagccgagaccgtaggcattttacagagcgcaagtttaaacggcgcttttaacatcccgcttcttgtcgctacggatcaggaaggcggatggatacgccacatcaagggcgatacaagcgaaactcccggaaatatggcgataggcgcgtcaggttatccccgcgacgcgtatctgtccggttattacataggcaaggaattggctctccttggggtcaacatgaatttcgctcctatggttgatcttttacaaaccgcctcggccgatctgatacgtgggtga

SEQ ID NO: 26424 - protein, 200 aa, Unknown
  Obtained from environmental sample
  misc_feature (1)..(200): Xaa is any amino acid
MPRTMPQIILMKKKVKNKTQVLVFFLCVFLFFNSLPLFSLSFNDSGTPAELAAAIENAMTDEQALAQVFMLGWVGEEPSPLIMDWIRRRNIGGVKIFGWNTANTHKLAETVGILQSASLNGAFNIPLLVATDQEGGWIRHIKGDTSETPGNMAIGASGYPRDAYLSGYYIGKELALLGVNMNFAPMVDLLQTASADLIRG

SEQ ID NO: 26425 - DNA, 978 bp, Unknown
  Obtained from environmental sample
  misc_feature (1)..(978): n is a, c, g, or t
ttgaaaacgcggattctgtcaaaactggagtccctgcccgttcagaggatcagctttaacgaagtcacccccgtcgccataaaggacgccgtggcgaacccgcgacccatgacgagggcccttgtcgatcgcaaaaaggcccgcagggtgcttgaccggctggtagggtacagcctttcgccgttattatggaaaaaagtcaagaacggcctttcagcgggcagggtgcagtccgtagccctgcgccttatatgcgaacgggaaaaggaagttgaatcctttattcccgaagagtactggagcctggaagcggatttcaagatcggcaggtcaacctttaccgcgcagcttgtaaagtggaacggagtcaaacccgaactgcctaacgaggcggcggcaaaaaaaattatcagcagcctggagggagccgattgcgttgtgagcgatattaaggaagccgacaagacaatcaagccgaaaccgccgttcatcacgtcggaactgcaaaagtcagccgcaaaccggcttggttatacgtcacggaagaccatgcaggtggcgcagcagctttacgaaggggtgaatatgggatcgacccgcatcggccttatcagttacatgaggacggattcggtgcgcgtgtcagagacagcccttacggaactgcgcgaatggcttggcgagcattatcccaatgagcttccggaaaaaccgcttgagtatacctccggaaagaaagcccaggacgcgcacgaggcgatacgcccgacttatgtaagttatacgccggaatcggtcgccgaatacctgaaccgcgaccagttaaggctgtacacgataatatgggaacgctttgtttcaagccagatgatcagcgctaaaacccgcacgatcagcgttgagatacgcgctgtcacaggcggcgccgtaaacggcggggaagaagggctgttccgtgttccgggacaaaacttgtga

SEQ ID NO: 26426 - protein, 325 aa, Unknown
  Obtained from environmental sample
  DOMAIN (34)...(323): DNA topoisomerase
  misc_feature (1)..(325): Xaa is any amino acid
MKTRILSKLESLPVQRISFNEVTPVAIKDAVANPRPMTRALVDRKKARRVLDRLVGYSLSPLLWKKVKNGLSAGRVQSVALRLICEREKEVESFIPEEYWSLEADFKIGRSTFTAQLVKWNGVKPELPNEAAAKKIISSLEGADCVVSDIKEADKTIKPKPPFITSELQKSAANRLGYTSRKTMQVAQQLYEGVNMGSTRIGLISYMRTDSVRVSETALTELREWLGEHYPNELPEKPLEYTSGKKAQDAHEAIRPTYVSYTPESVAEYLNRDQLRLYTIIWERFVSSQMISAKTRTISVEIRAVTGGAVNGGEEGLFRVPGQNL

SEQ ID NO: 26427 - DNA, 882 bp, Unknown
  Obtained from environmental sample
  misc_feature (1)..(882): n is a, c, g, or t
gtgtctgatattgaggcgcttgtagggcgtgaaattaaaacatggaacgtcgattcgtccaggcggacggcggagcgcgttgcggaaaaagcgcgcgtacgggggatcaacattgtctcatggcaaagcccgctgtacccgccgctgttaagggaaatatacgatccgcccgtattgctgtttttccgcgggaggctgcccgatccgggaagccccctcgccgcgattgtagggacaagaaaacccagtccggcttcctcggcgcaggcctttgatattgccaggggacttggcaggggaggcatttccgttgtttcaggccttgcgatgggcatcgattcttttgcccacaggggaaacatggaaggcggcgccccgactgtcgcggtgcttggctccggagttgacgaggtttacccttcgtccaaccgggttcttgccctcagggtgcttgaaacaggcggagctttactctcggaatatccccccggcacaggcccgcgcaaatggaatttccccgcgaggaacaggatcatttccggcatttcccgcggcgtgcttatagccgaggccccgcagaaatccggcgcgcttataaccgcaaggtttgcgcttgagcagaacagggatctctgggtcgcgtcagcgggtgtggaacaaatacccgccgcagcggcggcgccggcgccgatgccggaaaagggaaagcgattaggaccttttgacaaaaggggaacctcaaaactggcggatgacggggcgactataattaaaaccgcttctgacatactggaagcctggaatattcatatttcccgaaatcggagaccgcttcccgagcacgcccccgaacatgaaacgctccggccggccatgccatag

SEQ ID NO: 26428 - protein, 293 aa, Unknown
  Obtained from environmental sample
  DOMAIN (30)...(242): SMF family
  misc_feature (1)..(293): Xaa is any amino acid
MSDIEALVGREIKTWNVDSSRRTAERVAEKARVRGINIVSWQSPLYPPLLREIYDPPVLLFFRGRLPDPGSPLAAIVGTRKPSPASSAQAFDIARGLGRGGISVVSGLAMGIDSFAHRGNMEGGAPTVAVLGSGVDEVYPSSNRVLALRVLETGGALLSEYPPGTGPRKWNFPARNRIISGISRGVLIAEAPQKSGALITARFALEQNRDLWVASAGVEQIPAAAAAPAPMPEKGKRLGPFDKRGTSKLADDGATIIKTASDILEAWNIHISRNRRPLPEHAPEHETLRPAMP

SEQ ID NO: 26429 - DNA, 465 bp, Unknown
  Obtained from environmental sample
  misc_feature (1)..(465): n is a, c, g, or t
atgtcgtttttgaccgtttgccttaatcctactcttcaaaagactctgcgctttccttcaatatattcggggactgtgaacaggacgggaatccaccgtcttgacgcaagcggcaaggggatcaatgttacccgcgttttaactcaacttgggaaaaaaaccgtgcatcttactcaacttggcggcggcttgcgtccgttgtttctttcgctctgcgaacaggacaaactttccgtgcagtgggctgagagtgaaagcgaaatccgtttttgttacacattgctttccgaagcggacggcactgttacggaattgattgaagaatcgaaggttgtagttgacggaactgagaaacgacttctggaaaagtttgatgaacttcttataaatactcctgacttgaattgggttataatttccggcacaaaagcggcggggttttccggcgcggtattcccgccatga

SEQ ID NO: 26430 - protein, 154 aa, Unknown
  Obtained from environmental sample
  misc_feature (1)..(154): Xaa is any amino acid
MSFLTVCLNPTLQKTLRFPSIYSGTVNRTGIHRLDASGKGINVTRVLTQLGKKTVHLTQLGGGLRPLFLSLCEQDKLSVQWAESESEIRFCYTLLSEADGTVTELIEESKVVVDGTEKRLLEKFDELLINTPDLNWVIISGTKAAGFSGAVFPP

SEQ ID NO: 26431 - DNA, 1158 bp, Unknown
  Obtained from environmental sample
  misc_feature (1)..(1158): n is a, c, g, or t
atggagagcttgaattttccgantccgctggttgattgtaaaaagtgcaaatctcgctttagggcggatcagataccgcaggaaaatcttgcggcgaaaaaatgccccgactgcggcggcgagttgaccgaaacccgtaagttcaacctgatgttcaaaacacacatcggtcctgcggaggacacagccagtgtcatttaccttcgtcccgaaaccgcccagggtatatacgtcaattataaaaatattattcagtccaacagaatgaaagttccgttcggcattgcgcagattggcaaggcgttccgtaacgaaattgttaccaagaactttattttccgcacctgcgaattcgagcagatggaaatgcagtattttgtaaaaccggggacggacgaggaatggttttccgaatggcgcaaacagcgttgggcttattatgaaaaactcggcgttaaaatggatcatctgcgctggcatcagcacggaccggacgagcttgcgcattacgcaaaggacgcttacgatatcgagtacctgttcccgatgggctggcgcgagcttgagggcgtccacaacagaaccgattacgatctcggtcggcacactcagttttccggcaaagatttacagtacatcgatcaggacaacaacaacgaacgctacattccctacattatcgaaacttccgcaggacttacccgcaacctgttgatgattttctgcgacgcttatgacgaggaacaagtcacctctgataaaaattcgggcagttccgaaggaactgcaagcggaaccgcaggttccgcagatgatnggagaactgtcttgcgcttccaccccgatcttgcgccgattactgtcgctattcttccgttgatgaaaaaagacggacttgcggaacttgcgcaggacattcgcgcggaactaaaagaggactacgctaccgattacgatcaggcgggagcgattggaaggcgctaccgcagacaagatgaggcgggcactcctttctgcgttactgttgattaccagaccaaagaggacggcactgttaccctgcgcttccgtgattcaatggagcaggttcgtattccgaaagcggaacttgccgctcgtattcgcagtgaaattaaagcgtataaaagaattaaataa

SEQ ID NO: 26432 - protein, 385 aa, Unknown
  Obtained from environmental sample
  DOMAIN (287)...(377): Anticodon binding domain
  misc_feature (1)..(385): Xaa is any amino acid
MESLNFPXPLVDCKKCKSRFRADQIPQENLAAKKCPDCGGELTETRKFNLMFKTHIGPAEDTASVIYLRPETAQGIYVNYKNIIQSNRMKVPFGIAQIGKAFRNEIVTKNFIFRTCEFEQMEMQYFVKPGTDEEWFSEWRKQRWAYYEKLGVKMDHLRWHQHGPDELAHYAKDAYDIEYLFPMGWRELEGVHNRTDYDLGRHTQFSGKDLQYIDQDNNNERYIPYIIETSAGLTRNLLMIFCDAYDEEQVTSDKNSGSSEGTASGTAGSADDXRTVLRFHPDLAPITVAILPLMKKDGLAELAQDIRAELKEDYATDYDQAGAIGRRYRRQDEAGTPFCVTVDYQTKEDGTVTLRFRDSMEQVRIPKAELAARIRSEIKAYKRIK

SEQ ID NO: 26433 - DNA, 744 bp, Unknown
  Obtained from environmental sample
  misc_feature (1)..(744): n is a, c, g, or t
atgaaacagggttttcttatccccgtatacaggcacggcaaaacagcctgcccgctggctgaacgtctttccgcttccgcgttgacggtaatcatggtagacgacggcaatgacgaggagacccggaacctgcttgccgattgcgccgccaaaataccgggggtggcgctggtgagcctgaaaaaaaacagcggcaagggagaagccgttgccgttggttttaaaaaagcggcggaactggggcttacccatgtactccagatagacgccgacggccagcatgacgaaggaaagatcgctttctttcttgaagagtccgccaaacatcccgatatgctcatctgcggataccctgaatttgacgaaaccgcgcccaaaagcagagtaaagggacgaaaaatttccaatttctgggcgtctgttgctacgctctcaacggaattaaaggacgtactctgcggcttcagggtatatccggttgacgcgtcattacgcataacacgttctcctttcttggacaaacgcatgggttttgatccggaaattatggtgcgcctgtattggaataaagtgtttccaatatatcaccccataaaagtaagttatcccgccgacggggtttccaatttccacatggtaagggataatattcgtatcagcttgatgttcagcaggctgtttatcggtatgcttttgcgcttgccggttttgatcgtccgaaaaataaaacgcggaaaaaaatga

SEQ ID NO: 26434 - protein, 247 aa, Unknown
  Obtained from environmental sample
  DOMAIN (4)...(167): Glycosyl transferase family 2
  misc_feature (1)..(247): Xaa is any amino acid
MKQGFLIPVYRHGKTACPLAERLSASALTVIMVDDGNDEETRNLLADCAAKIPGVALVSLKKNSGKGEAVAVGFKKAAELGLTHVLQIDADGQHDEGKIAFFLEESAKHPDMLICGYPEFDETAPKSRVKGRKISNFWASVATLSTELKDVLCGFRVYPVDASLRITRSPFLDKRMGFDPEIMVRLYWNKVFPIYHPIKVSYPADGVSNFHMVRDNIRISLMFSRLFIGMLLRLPVLIVRKIKRGKK

SEQ ID NO: 26435 - DNA, 591 bp, Unknown
  Obtained from environmental sample
  misc_feature (1)..(591): n is a, c, g, or t
atgaaatcaatattgattgtagatgacaaccttgtcagccttaggcagataagttccctgctttccaaagattacgatgtttcactggcaaagtccggggagctggcgttgcagatttgcgcccaggaattgccggatttgatcctgcttgatgtggaaatgcccggcatggacggctttgaaacaatagcccgcctaaaggcagatgatcgtttaaaggacattccggtaattttcctgaccggcaaccgcgatgtcgaaacagaggtaaaatgcctggaatcgggagctatggactttatcaccaagccggccaatgccgagattctgcgccacaggatagatatgcatcttcagttttccatataccagcttcacctggaacacatggtaaaggaactggaagacaatatcgggatttcatttgcggaattactggaatgcaaagattataacgcggtcatccacatgctgcgttccggagagtatgttgagatgctggttaaagagcttattaacgagggcactttcgggaaggcgcttacgacggatgatgcgaatttgataaaagcgcgccgttcccttccatga

SEQ ID NO: 26436 - protein, 196 aa, Unknown
  Obtained from environmental sample
  DOMAIN (2)...(115): Response regulator receiver domain
  misc_feature (1)..(196): Xaa is any amino acid
MKSILIVDDNLVSLRQISSLLSKDYDVSLAKSGELALQICAQELPDLILLDVEMPGMDGFETIARLKADDRLKDIPVIFLTGNRDVETEVKCLESGAMDFITKPANAEILRHRIDMHLQFSIYQLHLEHMVKELEDNIGISFAELLECKDYNAVIHMLRSGEYVEMLVKELINEGTFGKALTTDDANLIKARRSLP

SEQ ID NO: 26437 - DNA, 1170 bp, Unknown
  Obtained from environmental sample
  misc_feature (1)..(1170): n is a, c, g, or t
atgntagatgaaactcccattggtgaaggaattgtgcgggatctggaagctttccattataaagatattcataacattgacgggctgcggctgttccggaaccacatgccttacggaaaagtactggttgttgacgacgtggagacaaacctggatgtcgctaaaggccttctgctgccctacggcctttcaattgataccgcttcaagcggcatggaagccatagcaaagatccggggcataagcgaagggggatcggcccccggttatgatcttgtccttatggatcatatgatgcccggaatggacggcatcgaggcggtcaggattatccgcaatgagattcagggcgagtatggcaagacagtgcctattgtcgcccttacagccaatgcccttaccggaaatgaggaaatgttcctgtccaagggttttaacgcttttatcgcaaaaccgattgatgttatgcagttggatgctgttttgaatacctgggtgcgggacaggaaaagcgttgaagttcttaaacaggcggaaatgacagcgcccgttcttgaaaacgcggatcagaatattctggacggtatagagatagagggtattgatcttgtccggggcaaaagaaagtacaacaatgacgccgcgtatctggatattctgcgctcctggtataagcatactccggcgctgcttgaaaaaatgagaaatcctctttttgaaagcctgcctgaatacgccattacagtacatggtattaagggagccagcctgggtatatgcgccgatgaaataagcaataaagcggaggaactggaacgctgtgccaaaagcggaaatatcgggcaggttcaggcggataatcccgcatttctcagcatggcggaatcgctgcttgcgagcatagagaaattactggaaaaagtcgatgtagggaaaaagcaaaagccaaagaaatacgctccggatccgttccttcttaacagactgctggatgcggtaaagtcctataaatctacgttgatggaagaaactatgtgttccattgaatcatacgattacgattcgggcatggaacttgttagctggctgcgccagcagatggatgaccttgaatatgacgcaatccgccagaggcttgaaagccggatgcccagtcatatcgaaacataa

SEQ ID NO: 26438 - protein, 389 aa, Unknown
  Obtained from environmental sample
  DOMAIN (218)...(311): Hpt domain
  misc_feature (1)..(389): Xaa is any amino acid
MXDETPIGEGIVRDLEAFHYKDIHNIDGLRLFRNHMPYGKVLVVDDVETNLDVAKGLLLPYGLSIDTASSGMEAIAKIRGISEGGSAPGYDLVLMDHMMPGMDGIEAVRIIRNEIQGEYGKTVPIVALTANALTGNEEMFLSKGFNAFIAKPIDVMQLDAVLNTWVRDRKSVEVLKQAEMTAPVLENADQNILDGIEIEGIDLVRGKRKYNNDAAYLDILRSWYKHTPALLEKMRNPLFESLPEYAITVHGIKGASLGICADEISNKAEELERCAKSGNIGQVQADNPAFLSMAESLLASIEKLLEKVDVGKKQKPKKYAPDPFLLNRLLDAVKSYKSTLMEETMCSIESYDYDSGMELVSWLRQQMDDLEYDAIRQRLESRMPSHIET

SEQ ID NO: 26439 - DNA, 789 bp, Unknown
  Obtained from environmental sample
  misc_feature (1)..(789): n is a, c, g, or t
atgaacaatttttttaatatattgaccagcgcggattttccctttctcagaaacgccctgcttgccggtttattgtcctcggtattgttcgggacaattggggcggtggtaacggtacggcgtatcgccagccttgccggggcaatatcgcacgcggtgttaggcggcatcggccttgccctgtacctttccgccgtgaaaaccatccccggcctgccgcccattgccggagcgctggccttcgccgttcttgccgccctgatcatcggcgttgtttcactgcgggcaaaacagcgcgaagatacggcaattaacgcgatatgggcaatcggcatgagcttgggcgtactgttcatggcaaagacacccggctacaccgatccctcaacctggcttttcggcaatattcttctcgtctcaagccgcgacttgatttttctggcagcgttagatgtcatcgtgctgctgctcgcctggcgtttctacgcccagatcgaagcggcctcgtttgatgaggaatttgcccgcgtccggggcgtcaaccttgacgcggtatttctgatactgcttgccataaccgccgtagccattgttcttttgcaaacctttgtcggcattatcatggtgatagccatgctcaccctgcccgccggctgttccggcgctttttcccgcagtctcgccggtatgatggcgttaagctgtattttttcggtaatattttccgtatgcggcgtcgccgtcggctggatttttgatctccccgtcggcgcaatcacggtcatatag

SEQ ID NO: 26440 - protein, 262 aa, Unknown
  Obtained from environmental sample
  DOMAIN (15)...(262): FecCD transport family
  misc_feature (1)..(262): Xaa is any amino acid
MNNFFNILTSADFPFLRNALLAGLLSSVLFGTIGAVVTVRRIASLAGAISHAVLGGIGLALYLSAVKTIPGLPPIAGALAFAVLAALIIGVVSLRAKQREDTAINAIWAIGMSLGVLFMAKTPGYTDPSTWLFGNILLVSSRDLIFLAALDVIVLLLAWRFYAQIEAASFDEEFARVRGVNLDAVFLILLAITAVAIVLLQTFVGIIMVIAMLTLPAGCSGAFSRSLAGMMALSCIFSVIFSVCGVAVGWIFDLPVGAITVI

SEQ ID NO: 26441 - DNA, 501 bp, Unknown
  Obtained from environmental sample
  misc_feature (1)..(501): n is a, c, g, or t
atgggtgcgcccatcaaacaatttatcgccgctaccaacatcaacaaaactgttcccgattatttggcatcgggtgaatatcgcacacgcgcgtcacaggcaaccatttccaacgcaatggatgtcggcgcgccaagcaactttgaacgcatggaagcgcatttttcctgggaggaaatgcggcgcatcattttaggtgtttccgtttccgacgaggaaacgcgggaaaccattacgcgagtgcatcatgaagcgggctattttcttgatccgcacagcgccgtcggctggaaaggcgtggacaaactcagcgcggaaaacaaaatcgacaatccggtgggcgtgctttccaccgcgcatccggcaaaattttccgaaaccgttgagccgctggtcggccccacgccggttccggcttcccttgccagtgcgatgagtcgcgccgtgaattctcaaaccattcctgctgaagtttccgcgctgctggaggcgctgttatga

SEQ ID NO: 26442 - protein, 166 aa, Unknown
  Obtained from environmental sample
  misc_feature (1)..(166): Xaa is any amino acid
MGAPIKQFIAATNINKTVPDYLASGEYRTRASQATISNAMDVGAPSNFERMEAHFSWEEMRRIILGVSVSDEETRETITRVHHEAGYFLDPHSAVGWKGVDKLSAENKIDNPVGVLSTAHPAKFSETVEPLVGPTPVPASLASAMSRAVNSQTIPAEVSALLEALL

SEQ ID NO: 26443 - DNA, 1125 bp, Unknown
  Obtained from environmental sample
  misc_feature (1)..(1125): n is a, c, g, or t
ttgatcagatcggccgagggtgttcaacaggtggaggcttttaatcctgatattctccacatcaataccgaaatggtcatcgccgaattcggtttcctttacgctaaagcgcataaccttcccgctatttatacttttcataccatgtgggaagattacggcccgaattatttccccatgttccccgcttttatcgtaaagtcctttattcggggcgttcttaaaaacatactgagacgatcatacaaagtaatcgtgcctacacagcagattgaagctgtcgtacacaagtatgagcccgataccgaaaccttcttgctgccgaccggcatagacccggcgtttttcgttcatgacaaagcggaaacagaggccttcaaagaagcgtttaacgcgctttatccggaaaccagcggaaaaaaaattctccttatggcgggcagggttgtaaaagaaaaaaacatcggtttccttcttaaaatacttcccgacattcttaaaaaaaatccggacacaatgcttgtaatcgtaggcagcgggccggatttggaattcttcatgaaggaagcgaaagaatacggcgtggaatccgcctgtgtttttacaggttatataaaccgttcccagctttcccttatgtactcaatttccgacgtgtttgtttttccttcccttaccgatacccaggggcttgttaccctggaagcgatgtcttcgggtattcccgtagtggctatcggcgctttgggaacgcttatggtaatgggcggggacaacggcggatttatggtaaaagacgatccgctggaattcaccgacagggtcctgcggttgttaaatgacggggaattgtacaggcgaaaatcggaagaagccagaatccacgcaagagcctggacattggaggaaattaccaaaaaactcacggtaatttacagggagacaatcgccgaatttataaaagattacggcaagccccgttcacccgtatgggaacttataatagacaaacgctggtgggaaataaacaataaaattattcagaaaaaaaccaaaatgaaattacaggaaatccgctcaaaaattaaagaaacctccaagttaatcaatgttcccggtttgtaa

SEQ ID NO: 26444 - protein, 374 aa, Unknown
  Obtained from environmental sample
  DOMAIN (127)...(295): Glycosyl transferases group 1
  misc_feature (1)..(374): Xaa is any amino acid
MIRSAEGVQQVEAFNPDILHINTEMVIAEFGFLYAKAHNLPAIYTFHTMWEDYGPNYFPMFPAFIVKSFIRGVLKNILRRSYKVIVPTQQIEAVVHKYEPDTETFLLPTGIDPAFFVHDKAETEAFKEAFNALYPETSGKKILLMAGRVVKEKNIGFLLKILPDILKKNPDTMLVIVGSGPDLEFFMKEAKEYGVESACVFTGYINRSQLSLMYSISDVFVFPSLTDTQGLVTLEAMSSGIPVVAIGALGTLMVMGGDNGGFMVKDDPLEFTDRVLRLLNDGELYRRKSEEARIHARAWTLEEITKKLTVIYRETIAEFIKDYGKPRSPVWELIIDKRWWEINNKIIQKKTKMKLQEIRSKIKETSKLINVPGL

SEQ ID NO: 26445 - DNA, 453 bp, Unknown
  Obtained from environmental sample
  misc_feature (1)..(453): n is a, c, g, or t
gtgcccggcctgcgcgacgccaaggaccagtttgcccggttattcgacatcgccctggattttgccgaggaagaacccgtgctccccttcagcgcggcggaaaaggtaaaggaaatagcccttgagcagggcgctatggcaaagatctcgtcgatacacgtcaatgtctggatgggcgattacgacaagctctccatggctgagcgttttttaaaggagcgattcggctggcagggcaatctggaggaagttgttttcgtgggcgactctcccaatgacgagccgatgttcgcccgtttccccctttcatgcgccgtcgccaatatccgcggtttcctgcacctgataaaagacaagcccgcgttcatagcctcaaaggaaggcggcgagggattcgcggaaatcgcggacgcgctgctggaaagaagggggcttacaaaccgggaacattga

SEQ ID NO: 26446 - protein, 150 aa, Unknown
  Obtained from environmental sample
  misc_feature (1)..(150): Xaa is any amino acid
MPGLRDAKDQFARLFDIALDFAEEEPVLPFSAAEKVKEIALEQGAMAKISSIHVNVWMGDYDKLSMAERFLKERFGWQGNLEEVVFVGDSPNDEPMFARFPLSCAVANIRGFLHLIKDKPAFIASKEGGEGFAEIADALLERRGLTNREH

SEQ ID NO: 26447 - DNA, 798 bp, Unknown
  Obtained from environmental sample
  misc_feature (1)..(798): n is a, c, g, or t
atggccgagccatcggaggaggacacatccaagtactaccgcatcgatgccttggtgcccaagctcaaaattgacgttgactacaaggtggacgagaaggatcgcattgtcacgctcaccgatgacggcatacgccacgccgaaagactgctgaacgtgccaaacctctatgacccaagcgccatagacaccttgcacgggctcaaccaggcgctggcggcccacaacctgtacacattggacgttgagtacatgatccgccccaaggaggacggcaaggggcgcgaaattgtgattgtcgatgagttcactggtcgcatgatgcctggcaggcggtggtccaacggtctccaccaggcgatagaggccaaggagggcgtggaggtcaacgccgaaaaccagacgctggccactgtgacgttccagaacttcttcaggatgtacaaaaaactggcaggcatgacgggcacggccgagaccgaggcagccgagctgctccagacctacaagctggaggtcatagtggtgcccaccaacatgccaatgatccgcaaagactacgccgacatcgtattttcgacgaagaagggcaagaagaaggccatcatcgaggagataaaggaacttcacgccaagggtcagcctgtcttggtcggcacggcgtccatcgagtcaagcgaggacttggcagcagaactgaaggcggctagggtgccacacgtagtactcaacgccaagcaccacatgcacgaggctgcgataatcgcccaggccggccgcagggcgcggtcaccatag

SEQ ID NO: 26448 - protein, 265 aa, Unknown
  Obtained from environmental sample
  DOMAIN (9)...(166): SecA DEAD-like domain
  misc_feature (1)..(265): Xaa is any amino acid
MAEPSEEDTSKYYRIDALVPKLKIDVDYKVDEKDRIVTLTDDGIRHAERLLNVPNLYDPSAIDTLHGLNQALAAHNLYTLDVEYMIRPKEDGKGREIVIVDEFTGRMMPGRRWSNGLHQAIEAKEGVEVNAENQTLATVTFQNFFRMYKKLAGMTGTAETEAAELLQTYKLEVIVVPTNMPMIRKDYADIVFSTKKGKKKAIIEEIKELHAKGQPVLVGTASIESSEDLAAELKAARVPHVVLNAKHHMHEAAIIAQAGRRARSP

SEQ ID NO: 26449 - DNA, 888 bp, Unknown
  Obtained from environmental sample
  misc_feature (1)..(888): n is a, c, g, or t
ttggtcggaaaacaaaaccgttatccgtttttggatattgggtgggttatgcgccattatagccctatcaacgctgaagattcagtaggggaaggatgtatgtttgacgcggaaatgacgcaaaaccaaaaaacagcacacctcttttgcttatgcgtaattctgttaacgggaatggggcttgtaacgctttattccgcgtcatactctttcgcttcgcgatttttcggggaaggaaattactttattgtcagacagttggtttactgcgcggcgggaatcgtgtttttcattatttcttcgatgattaaccttaatgtgcttagaaaattcttattaccccttgttatcatcgccgcttcattatgtgttttaacgtttattcccggaataggcgttgaacgctatggcgcgtcccgctggatagaatttggcgcatttacctatcagccgtcggaaatggttaaattcgcgcttccgttatacctggcgcacctgcttgataaaaaatcagataatcttgacaacttttattcgggcgttttgccgccggttctggttacgggaattttcttcggtcttatttacaggcagaataatttctccaccgcgatttttatcgtcataaacgctttaataatattcttccttgcgggtatccgtttccgttacttctttgccgcgattacaatgattatccccgtttccgcgcttttggtttttacaaaagaatacagggtcaggcggctggttagttttttaaggccccagtgggattccgcttggcgcggggtttcaggtaaacgcaagcaaggacgcaattgtttcaagcggcttatggggcagaggtatcggggaaggcacgcggaagctggcgagtattcctga

SEQ ID NO: 26450 - protein, 295 aa, Unknown
  Obtained from environmental sample
  DOMAIN (46)...(284): Cell cycle protein
  misc_feature (1)..(295): Xaa is any amino acid
MVGKQNRYPFLDIGWVMRHYSPINAEDSVGEGCMFDAEMTQNQKTAHLFCLCVILLTGMGLVTLYSASYSFASRFFGEGNYFIVRQLVYCAAGIVFFIISSMINLNVLRKFLLPLVIIAASLCVLTFIPGIGVERYGASRWIEFGAFTYQPSEMVKFALPLYLAHLLDKKSDNLDNFYSGVLPPVLVTGIFFGLIYRQNNFSTAIFIVINALIIFFLAGIRFRYFFAAITMIIPVSALLVFTKEYRVRRLVSFLRPQWDSAWRGVSGKRKQGRNCFKRLMGQRYRGRHAEAGEYS

SEQ ID NO: 26451 - DNA, 303 bp, Unknown
  Obtained from environmental sample
  misc_feature (1)..(303): n is a, c, g, or t
ttgtttgtcgtatttgcggttcttggatataaagccgcgcttgacagcaagactttatttggaaaatggttagccgcgggattaaccacgttaatagtgtcccaggctctgcttaatactgccgttgtttccggggccgttccggcaaccggcatcccgcttcctttcttttccgcgggcggctcttcgcttattacaacaatgattagcgcgggtcttatagccaatgtcgcaaggaataaatgcgaggctgtaaaagtaaaatcaaattacggagtatcggaggatgaaaatgagtactga

SEQ ID NO: 26452 - protein, 100 aa, Unknown
  Obtained from environmental sample
  misc_feature (1)..(100): Xaa is any amino acid
MFVVFAVLGYKAALDSKTLFGKWLAAGLTTLIVSQALLNTAVVSGAVPATGIPLPFFSAGGSSLITTMISAGLIANVARNKCEAVKVKSNYGVSEDENEY

SEQ ID NO: 26453 - DNA, 360 bp, Unknown
  Obtained from environmental sample
  misc_feature (1)..(360): n is a, c, g, or t
ttgcgggaaaatgcgaatattccaattatatcaggaatagaaaacgcccagcttaatatgcgtcttccttcggcgctcgttccgttagttgaaaatctcggtaagatttcggccacgtctcccgaattgttatccgctatttccgagatacggattgaaagaaaagcgtgggacggttatgaccttgtacttttccccgttcatagcggcataagggtaagggtggagaataattttacggaagatacgctcagatatatgctgcttatgttgaatgtgtttggaacggacgataaacgtccgcaggaaattgattttagatccggaataggttcatataaaattgaggagttatcctga

SEQ ID NO: 26454 - protein, 119 aa, Unknown
  Obtained from environmental sample
  misc_feature (1)..(119): Xaa is any amino acid
MRENANIPIISGIENAQLNMRLPSALVPLVENLGKISATSPELLSAISEIRIERKAWDGYDLVLFPVHSGIRVRVENNFTEDTLRYMLLMLNVFGTDDKRPQEIDFRSGIGSYKIEELS

SEQ ID NO: 26455 - DNA, 777 bp, Unknown
  Obtained from environmental sample
  misc_feature (1)..(777): n is a, c, g, or t
ttgaataataagaggaataatatggctgaaaatacagaaaatattagtacattatttcatagttttgaatgttgtcgttgtgtagattgtagcactccggttgagatagcagaaaaattgtcaaatactttgacggacgaacctaaatctcggaagcttaatataattagttggaactacgatgggaaaaagagcggtcttacaacagataaaataaatttgatgcggaaacttgctcctgatattttaattatacaggaatgtacatactatgaatgtatttcttttaaaaaattctataaacatgtaaaatggtacggagacgggaaagacagtattttaggtgttggtattttatcaaatgaatttgaaccgaactttataaatttaaatatctatgagcaaaaattcagatatgtaattccgtatgaaataaatataaatggcataaatattttattacttgccgtatggacaaaaggaattttgaaatgcggagatgatactgatgatgttcattgccttccttatatagaaaatgtatttgaggcaattaatttttatgatggtcttctgcgaaaatatactgaaataataattattggtgatttcaacagctttgataaaaaacagaagagaaacgaaagacagatagagcttgaaaagagattggaaaattatgatatttttaattgccatttcgttattgaaaataaagtgacatattatcataattataaatcgaataatcctggaataaatgattattgtttttaa

SEQ ID NO: 26456 - protein, 258 aa, Unknown
  Obtained from environmental sample
  misc_feature (1)..(258): Xaa is any amino acid
MNNKRNNMAENTENISTLFHSFECCRCVDCSTPVEIAEKLSNTLTDEPKSRKLNIISWNYDGKKSGLTTDKINLMRKLAPDILIIQECTYYECISFKKFYKHVKWYGDGKDSILGVGILSNEFEPNFINLNIYEQKFRYVIPYEININGINILLLAVWTKGILKCGDDTDDVHCLPYIENVFEAINFYDGLLRKYTEIIIIGDFNSFDKKQKRNERQIELEKRLENYDIFNCHFVIENKVTYYHNYKSNNPGINDYCF

SEQ ID NO: 26457 - DNA, 432 bp, Unknown
  Obtained from environmental sample
  misc_feature (1)..(432): n is a, c, g, or t
gtgccccgttttcaattcaaaacgatttttaagcaagctcaagctcaagtccttaattttttccttgagttgctcgtcgttcaattcattcagctctttcattttttctttgtgcttcattatatctccgaggcctcaacaattttaacccttatgggcagcttctgtgctgctccattcaacgcttccaaagcgagcggtttttccacgccgcccatctcaaacaaaatgcgaccaggcaacaccacggcaacccaaaattctggagcgcctttacctttacccatacgggtttcggcaggctttttggaaactggcttgtctgggaacacgcgaatccaaacacgaccgcctcttttaattttgcgggtcatgcaaatacgggcagcctctatttggcgagccgttaaccagcattgctcaagagcctga

SEQ ID NO: 26458 - protein, 143 aa, Unknown
  Obtained from environmental sample
  misc_feature (1)..(143): Xaa is any amino acid
MPRFQFKTIFKQAQAQVLNFFLELLVVQFIQLFHFFFVLHYISEASTILTLMGSFCAAPFNASKASGFSTPPISNKMRPGNTTATQNSGAPLPLPIRVSAGFLETGLSGNTRIQTRPPLLILRVMQIRAASIWRAVNQHCSRA

SEQ ID NO: 26459 - DNA, 414 bp, Unknown
  Obtained from environmental sample
  misc_feature (1)..(414): n is a, c, g, or t
atgcttagcccaaagaaaacaaaacatcgcaaaatgatgaaaggccgcatgaaaggcattgcaaccagtggtgattatatggcttttggcgatttcggtattcaggctcttgagcaatgctggttaacggctcgccaaatagaggctgcccgtatttgcatgacccgcaaaattaaaagaggcggtcgtgtttggattcgcgtgttcccagacaagccagtttccaaaaagcctgccgaaacccgtatgggtaaaggtaaaggcgctccagaattttgggttgccgtggtgttgcctggtcgcattttgtttgagatgggcggcgtggaaaaaccgctcgctttggaagcgttgaatggagcagcacagaagctgcccataagggttaaaattgttgaggcctcggagatataa

SEQ ID NO: 26460 - protein, 137 aa, Unknown
  Obtained from environmental sample
  DOMAIN (1)...(132): Ribosomal protein L16
  misc_feature (1)..(137): Xaa is any amino acid
MLSPKKTKHRKMMKGRMKGIATSGDYMAFGDFGIQALEQCWLTARQIEAARICMTRKIKRGGRVWIRVFPDKPVSKKPAETRMGKGKGAPEFWVAVVLPGRILFEMGGVEKPLALEALNGAAQKLPIRVKIVEASEI

SEQ ID NO: 26461 - DNA, 558 bp, Unknown
  Obtained from environmental sample
  misc_feature (1)..(558): n is a, c, g, or t
atgcaggttcgccgttatttatccaaaagatttgaaggtgcgcagatttccaaaatagagcttcgccgtacaaagaataccgtggaagttntgatacacaccgctcgccccggcgttataataggtcgcaaaggcgaagttgtggacggtttaaaagaagaattgaagatagtgaccaaaaaagatgttcacatagaaataatagagattaaacgtggcgaaacagatgccaaattggtagctgaaaatatcgctcgtcagttggagaagcgtgtaacaggccgccgtgccatgaaacgcgccattcagaatgccatgcgctttggcgttgagggtattcgtattcaaataggcggacgtttgggcggtgcggatattgcccgcgttgaaaaatatgcggagggcagagttccgctgcacacccttcgcgcagatatagattatgccactgcaaccgcaaaaacactttacggtaccaatggcgttaaagtttggattatgcacggagaaaaacttcgcaaaggggattttacttctaacgaaccaaaaaggatttga

SEQ ID NO: 26462 - protein, 185 aa, Unknown
  Obtained from environmental sample
  DOMAIN (27)...(81): KH domain
  misc_feature (1)..(185): Xaa is any amino acid
MQVRRYLSKRFEGAQISKIELRRTKNTVEVXIHTARPGVIIGRKGEVVDGLKEELKIVTKKDVHIEIIEIKRGETDAKLVAENIARQLEKRVTGRRAMKRAIQNAMRFGVEGIRIQIGGRLGGADIARVEKYAEGRVPLHTLRADIDYATATAKTLYGTNGVKVWIMHGEKLRKGDFTSNEPKRI

SEQ ID NO: 26463 - DNA, 738 bp, Unknown
  Obtained from environmental sample
  misc_feature (1)..(738): n is a, c, g, or t
atggcagcgaaagcaacgccgacgcgcactagcaagccgttggcgccggtactcgacgatatagtaaaggatcttcagaaaaaatacggcgcggagtctatctccatgttcgggcagaaccagtcggtagtcgaatggatacccgtcgattctttttctatttccgagctccttggcggcgggctgccgaggggaaggattatcgaagtcttcgggcaggaatcgtcgggaaaaactacttttatgacgtactgcgcggcgcaaatacaaaagcattattttgaggacaggcaacgctatggggctgtcgcctttatcgacgtggagcacgctttcgatcccgaatacgcaaagtctttcgggctggatatgacgaaagtagcgttctcgcagcccagcagcggcgagcaggcgcttaaccttgtccaagacctgcaagtttccggcggggtggactgcatacttgtcgattctgttgccgcgctgaccccgcaggcggagatagacgggaaaatgggcgacgtgcagatgggagcccagccgcgcctgatgggaaaggcctgccggaaactgtcggcagcgacaaggccggattcccccactattattttcagcaaccagatacgggcaaaaatcggggggtttagcccgacgggngatccgaccaccactccccgcgggaatgccctgaaaaatctcgcctccatccgcgtccagacaaaaagggcgactggatag

SEQ ID NO: 26464 - protein, 245 aa, Unknown
  Obtained from environmental sample
  DOMAIN (16)...(244): recA bacterial DNA recombination protein
  misc_feature (1)..(245): Xaa is any amino acid
MAAKATPTRTSKPLAPVLDDIVKDLQKKYGAESISMFGQNQSVVEWIPVDSFSISELLGGGLPRGRIIEVFGQESSGKTTFMTYCAAQIQKHYFEDRQRYGAVAFIDVEHAFDPEYAKSFGLDMTKVAFSQPSSGEQALNLVQDLQVSGGVDCILVDSVAALTPQAEIDGKMGDVQMGAQPRLMGKACRKLSAATRPDSPTIIFSNQIRAKIGGFSPTGDPTTTPRGNALKNLASIRVQTKRATG

SEQ ID NO: 26465 - DNA, 1347 bp, Unknown
  Obtained from environmental sample
  misc_feature (1)..(1347): n is a, c, g, or t
atgtttaagctataccatgttctttacgcgagtgccttgctctttgcaagcgtttatgctgaagagcagatgcaaacacaaacacaaacgcaagcattggtaccagcggttacgctgtacatgggcgggggctattcctttatcgaataccatttgggagttttaagcgagatagagagattgcagataccaatagataccgttgtagggactgagtggggggcgtttacgggggcattgtggagcgcgggtttaagttcagggcaaataagggagttggttaaatctttggattcgttgccgcgcgctaggcaaccccaaaattccgctctgtggaaaagaatttggcttgtgaaacacgatgaaaacggagtgctttctttggaggatgtggatagcaaaccttattttggggatatgttttttgattttagaattcaagaaattcttttaaattcaaatataggttcaaaaatttcttttcgagaaatagatagcagcggtaattatccctttccaccgccccaagcggatttcgcaacaatccgcatcttttccaatcacatcgctctacgcgataccaatggcacttctgcgcagcgtcatcaggtggctttgtggaacggagatacaacgcttataatgctacgcccgcattccaagcccagtttggattcgctctttgaagtaggtattgctgcggttcaaagccagcgttctgttctggcgcggattaacccgcaattgcggcatgaacaggcggctccccaacaacagacgctccagcagccccgtttttatcaccctgtttttgatggcactccagctgaacttcatgggcatttgaagagcttttggaacccaaacgatactggcattgtcgcggtcaaaaactttttggtaaatctgcaaagagatgcctcttatagggacctaaagctaaccgtggactcgttttttttgcagataaaaaccgataactacccgcaattatccttttcgctttttggttttggaggtacgctttttggtgctaatatcgccgcaaataccaatttccgttttgtgaatcaatttggctacaacttggatttaaccgctttttacgggcagggaattaggggcttggaaggggagttgcgcttggaacggctttttttaggtgatggcgatatatttttaagatctaaagctttggaacacgaaccacttcctttttttcaaaatgatatagataagaaggctagattattgagcgagaatagccgaggtgctgttctggggtttgaaaagcaacaggcgatagagccgcttttcaattgtcgcaagtttgaacgcaggaaatag

SEQ ID NO: 26466 - protein, 448 aa, Unknown
  Obtained from environmental sample
  SIGNAL (1)...(20)
  DOMAIN (39)...(201): Patatin-like phospholipase
  misc_feature (1)..(448): Xaa is any amino acid
MFKLYHVLYASALLFASVYAEEQMQTQTQTQALVPAVTLYMGGGYSFIEYHLGVLSEIERLQIPIDTVVGTEWGAFTGALWSAGLSSGQIRELVKSLDSLPRARQPQNSALWKRIWLVKHDENGVLSLEDVDSKPYFGDMFFDFRIQEILLNSNIGSKISFREIDSSGNYPFPPPQADFATIRIFSNHIALRDTNGTSAQRHQVALWNGDTTLIMLRPHSKPSLDSLFEVGIAAVQSQRSVLARINPQLRHEQAAPQQQTLQQPRFYHPVFDGTPAELHGHLKSFWNPNDTGIVAVKNFLVNLQRDASYRDLKLTVDSFFLQIKTDNYPQLSFSLFGFGGTLFGANIAANTNFRFVNQFGYNLDLTAFYGQGIRGLEGELRLERLFLGDGDIFLRSKALEHEPLPFFQNDIDKKARLLSENSRGAVLGFEKQQAIEPLFNCRKFERRK

SEQ ID NO: 26467 - DNA, 759 bp, Unknown
  Obtained from environmental sample
  misc_feature (1)..(759): n is a, c, g, or t
atggacgaaatctcgggcaaggccccgttaatattaaagatggacgaaagtgatattgccggcccgctgcggataagagtccgctcgttcatcgagaccgtaatgatacgccgcaaaagaaaagcgcataacacaaagccgttgggagacccttacgcggtcaaatatacaaaaaaagagccaaggaaggttctgcttgtccccaacgtaagccgggcgttctgcatggttatgagcggcgcccttgccaatgaaggcgtcattgtggagccgctgccgatgggtggcattgaagcgattgcgatggggaaaaaatacgtgcataacgacatgtgcctgccggtgcagattgtagtgggggaggcccttctcgcgttaaaaagcgggaaatacgatcccgacaagactttggtcggcatggcgaaggcgttatgcgattgccgtctttccaattatatgccccttgcgagaaaagctcttgacgaggccggctatccgcaggtgccgattattaccaccgatatatcggattccaaaaacgcgcacccgggtctgcgctttacggaaatgaccttcacaaaaatcatgtggggcataatccagacggacgctcttgaattcctgcggcgcaggatacggccttacgagctgcagaaaggggaaaccgataaagttgttgaaaacgcttttaacgaaattttcgaagggttcgcgaaaggcggaattccgggttcaaataccgcgttaaaaaagcgataa

SEQ ID NO: 26468 - protein, 252 aa, Unknown
  Obtained from environmental sample
  misc_feature (1)..(252): Xaa is any amino acid
MDEISGKAPLILKMDESDIAGPLRIRVRSFIETVMIRRKRKAHNTKPLGDPYAVKYTKKEPRKVLLVPNVSRAFCMVMSGALANEGVIVEPLPMGGIEAIAMGKKYVHNDMCLPVQIVVGEALLALKSGKYDPDKTLVGMAKALCDCRLSNYMPLARKALDEAGYPQVPIITTDISDSKNAHPGLRFTEMTFTKIMWGIIQTDALEFLRRRIRPYELQKGETDKVVENAFNEIFEGFAKGGIPGSNTALKKR

SEQ ID NO: 26469 - DNA, 987 bp, Unknown
  Obtained from environmental sample
  misc_feature (1)..(987): n is a, c, g, or t
atggccgggccagcccacttccgcattgtaagcctcgtcccaccagccgtccaggatggagcagttaagaacgccgttcagcgcggccttcatgccgctggtacccgacgcctccatcggccgccgtggcgtgttgagggaactgacagcgctgacggttttccgaaggcaaagcatcttattcctatgggaagccaggaaaaagctgccaacccgcctgagtttttatcatgggtaaaaaagacgtctctaaaatcgtttgttgtccagtataagcttgacggggcaagccttgagctgcaatacgaaaacggtaaattaaaatccgctcttacccgcggggacggaactatcggagatgaaataaccgggaatgccattcttatggcaggcgtaaaaaaggaagtctccgggaatttttcaggcggagtacgcggggaagttgtgatgaaaaccggagtgtggaagcaaaaatacccaaccaaagcaaattgccgaaacgccgccaatggaatcatgcgccgcaaagacggggcaggctgtgaagatttaaattttattagttatgacgcttccgccgcaggagacgataacttttttaaaaccgaaattgaaaaagtcgcctggctaaaaaaacaggggtttgatgtaaccgagacaaaggaattcggcgatccggataaaataatcgcgtatagggccgaagtcgcggaaaaacgtaaaaccctggccattgacattgacgggctggttgttaaggacttatggactgacatggccgatctgcgccgcccaaggccggaaaggcagatcgcttttaaatttgatcttgaaacggcatacagcatactcagatacgtggaatggagcgaatcaggagcgacttacactccaataggcattgtagatcccgtgcggctcgctggaactacggttcagcgggcgaaccttaacaacccggacatgataagggcaatgggaccttaa

SEQ ID NO: 26470 - protein, 328 aa, Unknown
  Obtained from environmental sample
  DOMAIN (280)...(328): NAD-dependent DNA ligase OB-fold domain
  misc_feature (1)..(328): Xaa is any amino acid
MAGPAHFRIVSLVPPAVQDGAVKNAVQRGLHAAGTRRLHRPPWRVEGTDSADGFPKAKHLIPMGSQEKAANPPEFLSWVKKTSLKSFVVQYKLDGASLELQYENGKLKSALTRGDGTIGDEITGNAILMAGVKKEVSGNFSGGVRGEVVMKTGVWKQKYPTKANCRNAANGIMRRKDGAGCEDLNFISYDASAAGDDNFFKTEIEKVAWLKKQGFDVTETKEFGDPDKIIAYRAEVAEKRKTLAIDIDGLVVKDLWTDMADLRRPRPERQIAFKFDLETAYSILRYVEWSESGATYTPIGIVDPVRLAGTTVQRANLNNPDMIRAMGP

SEQ ID NO: 26471 - DNA, 327 bp, Unknown
  Obtained from environmental sample
  misc_feature (1)..(327): n is a, c, g, or t
atggctaaagtcctttctgccgggattatttcaatagcgcctcagccaaaaaatgaagatgttcctttaaaaggtctttcgttttgttttacaggcgaattaagaagcataaagcgaagccaggccgaggaaaaagtaaaagcgcttggtgccttggtaaaaacttccgttgtaaaagatctttcttaccttgtaacaaacgatcccgaatcaggttctgccaagaatagaaaagctcttgaaatgggggtaaagataattaatgaggatatattttttaaattgataaaaaataacaaaataacttcgcaaaaagaactattttga

SEQ ID NO: 26472 - protein, 108 aa, Unknown
  Obtained from environmental sample
  DOMAIN (18)...(96): BRCA1 C Terminus (BRCT) domain
  misc_feature (1)..(108): Xaa is any amino acid
MAKVLSAGIISIAPQPKNEDVPLKGLSFCFTGELRSIKRSQAEEKVKALGALVKTSVVKDLSYLVTNDPESGSAKNRKALEMGVKIINEDIFFKLIKNNKITSQKELF

SEQ ID NO: 26473 - DNA, 783 bp, Unknown
  Obtained from environmental sample
  misc_feature (1)..(783): n is a, c, g, or t
ttgcaggggtatccgttatgtggcgttttaaatgattgcactattccgccgtcaaaatatccccttgaatattacaacgttacattaaaagatattgccgatccaatagcggatatatacggaataaaaattgtttttaaagacgggccgggcgatccgtttaccgaggtcggcattgaacctaatgaaaaagtattaagttttttattaaagctggcgcaacagcgtaaacttttatttacaaatgacgaaaacgggcggctggtgttttataaggccgcaagtgaaaaagcgtttatacaattcaaagagggttcaatgcccttattatcaataacgccgcaatttaacgcgcagggcttttattcccatataacagggcatacaaaaaatgacacattaaccgatccgctttcatacacctatgagaataaatatttaataaataaaaacgttatacggcatgaaacaattatggttgacgatgcagaaacaaaaaccgatttagaaaaagccgttttagcacacgccgggcggatgtttgcggattgtatagcgtataatttaaaatgtgatacccacttgaatagcgagggaaaactttttaaaaaaggtatgactgtttgtattgaagctcccggtgcaatgatttcaaggcaaactaatttcaaagcgcgtaacataaaacttttaagaaacaccgagggcaaaacggcggaacttgatctggttttacccggttcctttacggatgaactgccggaggtgttgccgtgggattaa

SEQ ID NO: 26474 - protein, 260 aa, Unknown
  Obtained from environmental sample
  DOMAIN (1)...(259): Bacteriophage Mu P protein
  misc_feature (1)..(260): Xaa is any amino acid
MQGYPLCGVLNDCTIPPSKYPLEYYNVTLKDIADPIADIYGIKIVFKDGPGDPFTEVGIEPNEKVLSFLLKLAQQRKLLFTNDENGRLVFYKAASEKAFIQFKEGSMPLLSITPQFNAQGFYSHITGHTKNDTLTDPLSYTYENKYLINKNVIRHETIMVDDAETKTDLEKAVLAHAGRMFADCIAYNLKCDTHLNSEGKLFKKGMTVCIEAPGAMISRQTNFKARNIKLLRNTEGKTAELDLVLPGSFTDELPEVLPWD

SEQ ID NO: 26475 - DNA, 405 bp, Unknown
  Obtained from environmental sample
  misc_feature (1)..(405): n is a, c, g, or t
atgatcattgacaatacttcgaccggacaaaccctgcgggataacggcctaaaaataatcggcactgttcttgaatcgtccacccgttttgtcgcttcgcatacggctcttgaaaacgcaacgaagcgcaaccggattgaagaacttacaatgctgtttcgcgctgtccttgaaggccgtgaacgcgtgatgcttgaaatgaacataccaaaagatcgcttcgatgccgcagtgaacgggcttccggcaatgcgcagtcctaccgttgccccattgtttggcgatgaaggttacgccgttaaaatcgcggtgaagaagaacgaagtttcagaaataattccacgtctaaagaaattgggtgctcttgatattctggaatacgatctgcgaaaagtggtaccttaa

SEQ ID NO: 26476 - protein, 134 aa, Unknown
  Obtained from environmental sample
  DOMAIN (58)...(132): HisG, C-terminal domain
  misc_feature (1)..(134): Xaa is any amino acid
MIIDNTSTGQTLRDNGLKIIGTVLESSTRFVASHTALENATKRNRIEELTMLFRAVLEGRERVMLEMNIPKDRFDAAVNGLPAMRSPTVAPLFGDEGYAVKIAVKKNEVSEIIPRLKKLGALDILEYDLRKVVP

SEQ ID NO: 26477 - DNA, 654 bp, Unknown
  Obtained from environmental sample
  misc_feature (1)..(654): n is a, c, g, or t
gtgagcagaacagcggaaattgagagaactaccaaagaaacatcaataaaagtgcaactcaacctggacggaagcggggcgggtaaatttgattacccgattggctttatcggccacatgctcaacacttttgcgcggcacgggctttttgatcttgaagtccgcgcctctggcgatcttgaagttgaccagcaccatctggtagaagacacgggcatcgttttgggccagtgctttgagaaggcccttggcgacaagcgcgggattcgccggaacggaagctgtcttttcccgatggacgagactttggcaagcgccgccgttgatttatcaggaaggccttttctttttatagacgccaagctttcaggcacgccgcttattgccgcgccaaacggggaaaacgaagaagcttttcagtttcagactgacaccatagaagatttttggcagggttttgtcggcgcgacgggctgcaatctgcatctggaaataatccggggcagaagcgaccaccacaaaatagaggcgctgttcaaggcggcagcccgttccttccgttcagcctgcgaatttgacgagcgcgcgcgcggcgcaatcccctcgacaaaaggctcattgccgggatttgacgcgccgggagtgcttgtgtga

SEQ ID NO: 26478 - protein, 217 aa, Unknown
  Obtained from environmental sample
  DOMAIN (34)...(187): Imidazoleglycerol-phosphate dehydratase
  misc_feature (1)..(217): Xaa is any amino acid
MSRTAEIERTTKETSIKVQLNLDGSGAGKFDYPIGFIGHMLNTFARHGLFDLEVRASGDLEVDQHHLVEDTGIVLGQCFEKALGDKRGIRRNGSCLFPMDETLASAAVDLSGRPFLFIDAKLSGTPLIAAPNGENEEAFQFQTDTIEDFWQGFVGATGCNLHLEIIRGRSDHHKIEALFKAAARSFRSACEFDERARGAIPSTKGSLPGFDAPGVLV

SEQ ID NO: 26479 - DNA, 603 bp, Unknown
  Obtained from environmental sample
  misc_feature (1)..(603): n is a, c, g, or t
gtgacaggcgtaataaactacggcgccgggaatctcggctcggtgatgaatgccttaaagcggctttcggttccggcgcgttttgtttcctgcgtggacgagcttgccctgggatcaacgccttttgaaaggatcatatttcccggcgacggacatttcgcgacggcaatggcatctctttcaaaatccggttatgaccgggcgatcaaggaatggataaaagctgacaggccttttctgggaatatgcatcggcttgcaattgctctttgattcttctgaggaggctccttcggttgacggcgttgaagtgaagggcctttccgtgatacccggaaccgtgcggcgttttcccgggcgcaaactcccccaaatcggctggaaccggacggaagctcgccccaattcaaagctgttcaggggcataagcgagaaaagttttttttattatatacattcatactacgccgatccgacggacgaatcggtatgcgccgctgaggccgaatattatctgcgctactgttgcgctgtgagcgacggcgctcttgcggcggtgcagttccatcccgaaaatccgggcgctcgcgataaccgnnnttaa

SEQ ID NO: 26480 - protein, 200 aa, Unknown
  Obtained from environmental sample
  DOMAIN (37)...(160): CobB/CobQ-like glutamine amidotransferase domain
  misc_feature (1)..(200): Xaa is any amino acid
MTGVINYGAGNLGSVMNALKRLSVPARFVSCVDELALGSTPFERIIFPGDGHFATAMASLSKSGYDRAIKEWIKADRPFLGICIGLQLLFDSSEEAPSVDGVEVKGLSVIPGTVRRFPGRKLPQIGWNRTEARPNSKLFRGISEKSFFYYIHSYYADPTDESVCAAEAEYYLRYCCAVSDGALAAVQFHPENPGARDNRX

SEQ ID NO: 26481 - DNA, 1434 bp, Unknown
  Obtained from environmental sample
  misc_feature (1)..(1434): n is a, c, g, or t
gtggttctttcaggcggccaggcacccggcggacacaacgtcatcgcgggcatctttgacggccttaaaaaagggaatcctgcttcaaagcttttcggctttttgggaggcccaagcggcctaatcaacaacaaggcaattgaattaacaagcgagataattgacgaataccggaacaccggcggcttcgatatcatcggttccgggcgtaccaagatagaaaccccagagcagtttgcttcttctctggaaaccgcaaaaaaactaaacctcaacgcgctggttatcgtcggcggggacgattccaataccaacgcggccctgcttgcggaatactttgtagaaaagggaacgacaattcaggttatcggctgtcccaaaactattgacggggatttgaaaaatgaatacatcgaaacctcctttggttttgattcggcatgcaaaacctacagcgagctaatcgggaacattcaaagggacgccaagagcgcgaaaaaatattggcactttataaaacttatgggccgctctgcaagccacatcgcccttgaatgtgcccttcaaacccagcccaacatctgtttaatttcggaagaagtcgaagaaaagaaaatgtcccttgatcaggttgttgaagatatttgtacttccattgttaaaagagccgaaaacaaagaaaacttcggagtggtactgataccggaggggctgattgaatttattcctgatattaagcaccttatcgaagagctgaacgacgccctggctttgaacaaggaggaattttccaaattcacttcgctaatcgaccagctctattggctgagccaggaaatatcgcctgagtcatgcaagcttctacagagcctgcctccggaaatttccagggaactgctaatggacagggacccgcacgggaatgttcaggtttcccgtatcgaaacggaaaagcttttaattgagatggtggaaaaacgccttgcaaaattaaaggaagaaggcgtatacaaagggagcttctcggccctgggtcatttcttcggttacgaaggccgttgcgcttttccttccaactttgacgccgactactgttactcgctgggttacagcgcgttcgcgcttattgcggcggggcttacgggctacatctccagcattagaaacctgactgcgcccgccactgaatgggtcgccgggggaattccccttgccatgctgatgaaccttgaacaaaggcacggttccaaaaagccagtcatcaaaaaagccctggttgaattaaacggaaacccttttaagttattcgacaatgagcgtgacaactgggctgtaaaaacctcctacctttatcctggctccatacagtatttcgggccgcctgaagtttgcgatcaaccgactataactttaaagctggaaaagaaaaagtaa

SEQ ID NO: 26482 - protein, 477 aa, Unknown
  Obtained from environmental sample
  DOMAIN (2)...(261): Phosphofructokinase
  misc_feature (1)..(477): Xaa is any amino acid
MVLSGGQAPGGHNVIAGIFDGLKKGNPASKLFGFLGGPSGLINNKAIELTSEIIDEYRNTGGFDIIGSGRTKIETPEQFASSLETAKKLNLNALVIVGGDDSNTNAALLAEYFVEKGTTIQVIGCPKTIDGDLKNEYIETSFGFDSACKTYSELIGNIQRDAKSAKKYWHFIKLMGRSASHIALECALQTQPNICLISEEVEEKKMSLDQVVEDICTSIVKRAENKENFGVVLIPEGLIEFIPDIKHLIEELNDALALNKEEFSKFTSLIDQLYWLSQEISPESCKLLQSLPPEISRELLMDRDPHGNVQVSRIETEKLLIEMVEKRLAKLKEEGVYKGSFSALGHFFGYEGRCAFPSNFDADYCYSLGYSAFALIAAGLTGYISSIRNLTAPATEWVAGGIPLAMLMNLEQRHGSKKPVIKKALVELNGNPFKLFDNERDNWAVKTSYLYPGSIQYFGPPEVCDQPTITLKLEKKK

SEQ ID NO: 26483 - DNA, 957 bp, Unknown
  Obtained from environmental sample
  misc_feature (1)..(957): n is a, c, g, or t
atggtcagaatcggccgaggctgcgcctgctctttatattcttggcgactgcgcgacgacgctaccccgttcacttgtcataaaatcgcgtgtttacaaacagcctgttttgacaagagcgaactgccggaaaaaacggcggcattttgcatggacttaaaaaccgaaccgggtgaaaagtacaaccttgacgagttaaagagcatagcgggcgacggcgacataattcccatcgagcgcaaaatgcagccgctttttaacaaggcgttgttttgtaaggtttttatttcgaccaacgaacaaataccgattgacagcttcggggaatcggagcgcagtcgcttccgccttgtcccttgccttgcccatgttgacgaacccgacagcggacttgaaaacgcgcttaaaaaagaatgccctcaaattttgaacttgcttttaaaatacgccgtccagtggaacgccaatgggcggaaacttccgccgtgcaaagtggtggacgcggcgacgaacagtttttttgagagacaggatgttatcggccagtttatagcggatcgatgcgtattaggcgaagggctgcggataccaaaaaaagaattatttgtcgcttatgaacaatacctgaccaaagagcagggaatattcaaagccggtaaaataaagaacttctcctccgcccttgagaaacggggaattaacgagggctttacgaaagtggacggtaaaagctcaagatgttttgtaggaattacgcttatcggacacccagacacaaaaaaacctgaaaatgaacttctttcctatagtaattcattacgcgagaacaatatcaaatcagagaattcttgtgtctcggtgtctgaaaaaccaaaaacagccacaaaaacagccgaaaacccatattttagcgaagatcaacagcggctgtgggaggggaacggcgatatttattag

SEQ ID NO: 26484 - protein, 318 aa, Unknown
  Obtained from environmental sample
  misc_feature (1)..(318): Xaa is any amino acid
MVRIGRGCACSLYSWRLRDDATPFTCHKIACLQTACFDKSELPEKTAAFCMDLKTEPGEKYNLDELKSIAGDGDIIPIERKMQPLFNKALFCKVFISTNEQIPIDSFGESERSRFRLVPCLAHVDEPDSGLENALKKECPQILNLLLKYAVQWNANGRKLPPCKVVDAATNSFFERQDVIGQFIADRCVLGEGLRIPKKELFVAYEQYLTKEQGIFKAGKIKNFSSALEKRGINEGFTKVDGKSSRCFVGITLIGHPDTKKPENELLSYSNSLRENNIKSENSCVSVSEKPKTATKTAENPYFSEDQQRLWEGNGDIY

SEQ ID NO: 26485 - DNA, 1065 bp, Unknown
  Obtained from environmental sample
  misc_feature (1)..(1065): n is a, c, g, or t
atgtttcccggcgtaccggaatcgctgttccgtgttcacgactggcgtaatgacgtggtggaactcggacgcattgaacaagagtgggtggaaaaagccaccgggggcgcggtcagttacgattggccggtgcaggtaaacaaattactgcgtgacggcggctttgatctgattgtttcgttgggacaggtggttccccatgaggtaatcggcatggcaaaccacgcgaaaaatcttctggtgggaaccggcggcaaagaagctatcgacaaaagccattttgccggggccgctttcggcatggaaaaaatgatgggccgcgccaatacgccggtgcgggccatgttcgatgagggcctgcgccgctatggtaataaactgcctcccgtgttttacgctctgaccgttttaagcgcccgcagtgaagttgaagccgccgcaatgggtacgcaacggggtagcctcgccctgcggggactttattgcggttttggccgcgattgttttgaacaggccgccgctcttgcccgccaggtaaatgttgaccttctggataaaccgatacacaaagccgtggtgtaccttgatccgcaggagtttcgcactacctggctgggaaataaagccgtgtaccgtactcgcatggcaatggccgacggcggagaactgttgattatcgcgccgggactggaacgctttggcgaggacatgggcattgatgcgctgatccgcaaacacggctaccgcccggcaaaaattatccgggaaaaagtcggcgcggacgcggaactgggcaacagccttagcgtcgccgcacacctcatccacggttccagcgaggaaagatttactgtccgttattgtccggggcctggggtgagccgcacggaaatagaatccgtgggctacgaatggggcagcctggacgaggcggtggctaggtacgatgtaaagaagctcccgatggggtggaacaccatgcccaacggagagcgtatcttctttgttccaaatcctgcacttggcctgtgggctgaaaagcggcgcttttacggtgatgattga

SEQ ID NO: 26486 - protein, 354 aa, Unknown
  Obtained from environmental sample
  misc_feature (1)..(354): Xaa is any amino acid
MFPGVPESLFRVHDWRNDVVELGRIEQEWVEKATGGAVSYDWPVQVNKLLRDGGFDLIVSLGQVVPHEVIGMANHAKNLLVGTGGKEAIDKSHFAGAAFGMEKMMGRANTPVRAMFDEGLRRYGNKLPPVFYALTVLSARSEVEAAAMGTQRGSLALRGLYCGFGRDCFEQAAALARQVNVDLLDKPIHKAVVYLDPQEFRTTWLGNKAVYRTRMAMADGGELLIIAPGLERFGEDMGIDALIRKHGYRPAKIIREKVGADAELGNSLSVAAHLIHGSSEERFTVRYCPGPGVSRTEIESVGYEWGSLDEAVARYDVKKLPMGWNTMPNGERIFFVPNPALGLWAEKRRFYGDD

SEQ ID NO: 26487 - DNA, 354 bp, Unknown
  Obtained from environmental sample
  misc_feature (1)..(354): n is a, c, g, or t
gtgtgtatctttcgatggttgagtcaaagaaaaaatcggctggttctcaaattggaacataacgcccctcatgactgctaccgtatcgtgggcagcgaaatacatattgccacgaaggccatccccggcgcttcaaaaacagaatttgccggaacggaggaggggcgattgcggatacgtcttgccgccgcgccggaaggcggcaaagccaacgctgaacttatcgctttttttgccaaaacgctcggctgccccaaacgggacataaccttgctgcgcggggaaaaatcccgtcttaaaatcatcgccctgccccttgcatgtatgccgcagttggataaaataattatatga

SEQ ID NO: 26488 - protein, 117 aa, Unknown
  Obtained from environmental sample
  DOMAIN (30)...(106): Uncharacterised ACR, YggU family COG1872
  misc_feature (1)..(117): Xaa is any amino acid
MCIFRWLSQRKNRLVLKLEHNAPHDCYRIVGSEIHIATKAIPGASKTEFAGTEEGRLRIRLAAAPEGGKANAELIAFFAKTLGCPKRDITLLRGEKSRLKIIALPLACMPQLDKIII

SEQ ID NO: 26489 - DNA, 816 bp, Unknown
  Obtained from environmental sample
  misc_feature (1)..(816): n is a, c, g, or t
atgtctttgggcatgctgcgttttgccattgccctgatttttttgtacttcataaaacgaaaactggctccccatgaaaaactgcgcgcacaagacatccccctgctggtgggcgcaagtttcagcggcgttactttttactttttctgtgaaaacaacggcgttgctctggttaccgcgtcggaagcttccattgccattggctcaattcccgtgctgaccatgattgccgactggttaagcgcgaagatttcccgaaacaacaactttccgcgcctgggcctccgtcagtggacaggagcctttatctccattgccggcgtgtggctggtagccggagtttcctttgccctttcaggcagcatcctgggttatatttacatggcgggctcggcgctctgctgggtggcctattccctgtttacccgccccctctttacccgctgttcccgcatttatattgtgttctggcagtcattggcaggctttatcggttttattcctttttcaatttttgaatttggcagttggggaaggcccgatgcacccgtcatcctccacctgatttttctgggcctgtgctgttccgctctgggctactggctctacgcccgttctcttgaagttttaggaatgtcagtttccgcgatatttattaatttaataccgatgattaccgttatttttggtttttttgttctgcacgatcgcctaacacttttgcaatggctcggcgcggttctggtaatcggcggtgtgtatctttcgatggttgagtcaaagaaaaaatcggctggttctcaaattggaacataa

SEQ ID NO: 26490 - protein, 271 aa, Unknown
  Obtained from environmental sample
  DOMAIN (133)...(258): Integral membrane protein DUF6
  misc_feature (1)..(271): Xaa is any amino acid
MSLGMLRFAIALIFLYFIKRKLAPHEKLRAQDIPLLVGASFSGVTFYFFCENNGVALVTASEASIAIGSIPVLTMIADWLSAKISRNNNFPRLGLRQWTGAFISIAGVWLVAGVSFALSGSILGYIYMAGSALCWVAYSLFTRPLFTRCSRIYIVFWQSLAGFIGFIPFSIFEFGSWGRPDAPVILHLIFLGLCCSALGYWLYARSLEVLGMSVSAIFINLIPMITVIFGFFVLHDRLTLLQWLGAVLVIGGVYLSMVESKKKSAGSQIGT

SEQ ID NO: 26491 - DNA, 432 bp, Unknown
  Obtained from environmental sample
  misc_feature (1)..(432): n is a, c, g, or t
atgaaaaacggcctgtgcgacgtagcgtttgttacatccggcctgagcaacgccaccatcaaggagctcggcgttaccaaaaccatttactttgtccctgttgagggtgccgctctcagaaggctccttagcctttaccccttttatgccgaagccattattcccaaggatgtttacggaaccgctgccgataccaccacagccgtggtaccgaatatcatgctggttgacaagaaactgcccaatgaagtggtttacgatatgctcaagaacttctattcagatgagggcgttgcggctatcggcgcttcgcacgctaccgcagccgagaacattatgctcagtacagctttgcgcggtatcgccggtacgaagatccaactacatgacggcgcaattcagttctacaaagaaaaaggcatgataaagtaa

SEQ ID NO: 26492 - protein, 143 aa, Unknown
  Obtained from environmental sample
  misc_feature (1)..(143): Xaa is any amino acid
MKNGLCDVAFVTSGLSNATIKELGVTKTIYFVPVEGAALRRLLSLYPFYAEAIIPKDVYGTAADTTTAVVPNIMLVDKKLPNEVVYDMLKNFYSDEGVAAIGASHATAAENIMLSTALRGIAGTKIQLHDGAIQFYKEKGMIK

SEQ ID NO: 26493 - DNA, 501 bp, Unknown
  Obtained from environmental sample
  misc_feature (1)..(501): n is a, c, g, or t
atgagacaagaatggaaaacagggttcgccctgttttccgcttgcgcggcgctaatattgttggcaggcgcagcgtactacagagctgtttcgcctcctgtgctgtacatttcggactggaaaacaggtgaagtgtatattgagcgtccggtttcgtcaggggacgagctttattttgggtggattcactcgcttgaaaaaattccgtgggatgaatactaccatattgacggggatcttaacctgattctcgatacgatccgttttcccgcgtttggcgcggggataccggaagacaaaggcgccgtttgttatatcaaggacggcttaatttatatgtccgaaataaatgagaaatttacggagtttgactggattaattctcaaacctatacgcaggagatacgcgtcgcgggtgagtatgttaccaggggcagcgagttaccgcatcagagacggctggttttaaatatcaaaaggaggaatttctttggaagataa

SEQ ID NO: 26494 - protein, 166 aa, Unknown
  Obtained from environmental sample
  SIGNAL (1)...(29)
  misc_feature (1)..(166): Xaa is any amino acid
MRQEWKTGFALFSACAALILLAGAAYYRAVSPPVLYISDWKTGEVYIERPVSSGDELYFGWIHSLEKIPWDEYYHIDGDLNLILDTIRFPAFGAGIPEDKGAVCYIKDGLIYMSEINEKFTEFDWINSQTYTQEIRVAGEYVTRGSELPHQRRLVLNIKRRNFFGR

SEQ ID NO: 26495 - DNA, 393 bp, Unknown
  Obtained from environmental sample
  misc_feature (1)..(393): n is a, c, g, or t
atggaaatagccggatttgattttaataacccaacatcactttatgctgataacatgcggttatcgtcaactccggccgtccacagccccgaaaagttttcggaagcgctgaaaagagcttcaactaataataacatcgttgaaaaacacgtgggtaaagagcctattgataaagaagacaagctctaccagttgtgccttgaactagaaacattcctagttaaaaatcttttaaccagcatgagaaatacggtacaaaaatccggccttgtggacgacagctttgccggtaaaatgtacgaagatatgctttacgatgaatacgccaaagattttaccagaagcgccaatttcgggcttgctgagcaggcttataggcagttaaaaagataa

SEQ ID NO: 26496 - protein, 130 aa, Unknown
  Obtained from environmental sample
  misc_feature (1)..(130): Xaa is any amino acid
MEIAGFDFNNPTSLYADNMRLSSTPAVHSPEKFSEALKRASTNNNIVEKHVGKEPIDKEDKLYQLCLELETFLVKNLLTSMRNTVQKSGLVDDSFAGKMYEDMLYDEYAKDFTRSANFGLAEQAYRQLKR

SEQ ID NO: 26497 - DNA, 432 bp, Unknown
  Obtained from environmental sample
  misc_feature (1)..(432): n is a, c, g, or t
gtgaaaagggtatatgtaaacgaaaaatggtgtttaggatgccatttgtgcgaatattactgcgcgttcgcggcaaccagcgaaagcgacatggcgcgcgcgcttaaaggaataaagataaatcccaaaattcgcatagaggaaaaagacggcatcagctttgccgtatcctgccggcactgcaaaacgccattatgcgtaaaagggtgcattacaggggctcttacaattcaagacggcgtaattcagattaacaaagataaatgcgttagctgctacacctgcatattaagctgtccttacggcgcggtgtcgccttcggaagacggcgcggtgcaaaaatgcgaactgtgcgtaagcaccaccgaaggaaccccggcgtgcgtaagaggctgccccaataacgcgattgtttttgaggaaaggggttag

SEQ ID NO: 26498 - protein, 143 aa, Unknown
  Obtained from environmental sample
  DOMAIN (4)...(27): 4Fe-4S binding domain
  misc_feature (1)..(143): Xaa is any amino acid
MKRVYVNEKWCLGCHLCEYYCAFAATSESDMARALKGIKINPKIRIEEKDGISFAVSCRHCKTPLCVKGCITGALTIQDGVIQINKDKCVSCYTCILSCPYGAVSPSEDGAVQKCELCVSTTEGTPACVRGCPNNAIVFEERG

SEQ ID NO: 26499 - DNA, 762 bp, Unknown
  Obtained from environmental sample
  misc_feature (1)..(762): n is a, c, g, or t
ttgaattatagagaagatgaattacacaagttagtgaataagttatcgcaatattatgaaaagagagacacaattgaagatatagttggaattggaaaaggagggaaatttgttcattttattacaaacaatacagaaactgttttcaaatatatgttgaggcatacagtatcaaaaccacgagatttaatcagaattgcttccactttaaaaatgaaaattaatccacaagctgaaagaaaagaaaagattaaagagcttagggatgcggtaaatgaagcggcggtaaaagtggcagaggaaatattttatgaaaagaaaagatttttagactgtcttcaaaatgataatgaaagagagcgttttctttctctaattccaaaaaatatattggatcaaaatacagtagataaaatttgcaaggaattcaatgataaaccgtcagaaaattgttcaaaagagaaatgtttaaaaaataaggaagaaagcggctgtaaacatcctttttgtgaattatataatattggtctattaggttatgttaacccggcagaagcaattcaaacatttaaagatcctgattcagacaatgtaaatcatcttacaggtcgttatagttactatattattcatccaagtttatatganattatcaaaagattaagacataactatggcaaaagaaattatacactaacaccggcaataacgacaggcaatgggtataagtgggaagaaaatactcagttatatcttatttga

SEQ ID NO: 26500 - protein, 253 aa, Unknown
  Obtained from environmental sample
  misc_feature (1)..(253): Xaa is any amino acid
MNYREDELHKLVNKLSQYYEKRDTIEDIVGIGKGGKFVHFITNNTETVFKYMLRHTVSKPRDLIRIASTLKMKINPQAERKEKIKELRDAVNEAAVKVAEEIFYEKKRFLDCLQNDNERERFLSLIPKNILDQNTVDKICKEFNDKPSENCSKEKCLKNKEESGCKHPFCELYNIGLLGYVNPAEAIQTFKDPDSDNVNHLTGRYSYYIIHPSLYXIIKRLRHNYGKRNYTLTPAITTGNGYKWEENTQLYLI

SEQ ID NO: 26501 - DNA, 921 bp, Unknown
  Obtained from environmental sample
  misc_feature (1)..(921): n is a, c, g, or t
ttgtggtcaacgaagacgtttacggttcgatggatccggcgaaaacaaaagcgcttattgaaaaaattcgaaaggaggaatccgcaaatgcctgaaaatttgacgttagaacaaaggaaggagcaatttgagcaatcggcggcatgtcaaaaaccgcgtattatcatttgcgccggaaccggctgtgtggcgggcggttcattaaagatttacgaccgtttccgcgaagagttggctaagcgcggtttaaaagtagccgtggcattggaacaagagcagggcgattattcaattgcggaaagcggctgtcagggtttctgccagatgggaccgcttgtaacgataaaaccgaaaggcatactttataccaaagtttctcccaatgacgtagaagaaattgtagagaaaacgcttgtcggtggcgattatgtggagcgtcttctctacacaagccccgatcatggcgcgccgatgaaagacatgaataaaatccctttttatcagcttcaacatcggttaacactcggactgtgcgggaatattgacgtaaagaatttaaacgaatacatctatcaaggcggctatttcatggcgcgtaaagcgttactggaaatgaaagacaaggaaatttgcgacttgattctcgcttcaggtcttaaaggacgcggtggcgcgggatttccaacggggcgcaaatgggatttaacccgtattcatgaaaacgaagtaaagtatgttgtctgtaacggcgatgaaggcgaccccggcgcgtttatggatcgctgtgtaatggaaggtaatcctcacgcagtactggaaggattgatgattgcggcgaaagcggtaaatgccacacacggatacatctatgtccgtatggaatatcccctttgcgtaaagcggctgagggcggcccattag

SEQ ID NO: 26502 - protein, 306 aa, Unknown
  Obtained from environmental sample
  DOMAIN (193)...(306): Respiratory-chain NADH dehydrogenase 51 Kd subunit
  misc_feature (1)..(306): Xaa is any amino acid
MWSTKTFTVRWIRRKQKRLLKKFERRNPQMPENLTLEQRKEQFEQSAACQKPRIIICAGTGCVAGGSLKIYDRFREELAKRGLKVAVALEQEQGDYSIAESGCQGFCQMGPLVTIKPKGILYTKVSPNDVEEIVEKTLVGGDYVERLLYTSPDHGAPMKDMNKIPFYQLQHRLTLGLCGNIDVKNLNEYIYQGGYFMARKALLEMKDKEICDLILASGLKGRGGAGFPTGRKWDLTRIHENEVKYVVCNGDEGDPGAFMDRCVMEGNPHAVLEGLMIAAKAVNATHGYIYVRMEYPLCVKRLRAAH

SEQ ID NO: 26503 - DNA, 909 bp, Unknown
  Obtained from environmental sample
  misc_feature (1)..(909): n is a, c, g, or t
ttgcggctcgtagaaatgcgctccattgcagatgaacatctgctgctgatgaaagatccgctgaaattatcagaaaaattgtccgaaaaattcaatgcacaagaaaggtatgcgttgctccattatcttgagattttgccaaagataagggaaaaatttaatttgcaaaaaatagacttgatttgcgataggcttgcttatgagcaggcaacagcaagagatatttcggagtataaagcgaagctgtggcagagcggcgctaaaattatggatttatgctgcggcatgggcggagatagtttttggctacccgctgacattgctgcaagcggtgtggatatagccccggaaagggttttgatgttcaacgaaaatatggaacgccttggtttgcctcatagggcagttttgcaaaacgctttggatgttgccggtggcgattttttttgcatagacccagcacgacgtggcgggttaaatccaaattttgaaagcgtcttggaactctccaaaaaattctgcggcggaatggtgaagctcccacccgcgtatgatgaaaacgaactcccaaaggaaagcgatgttctctatcttgggaatgcgagtgattgccgggaatgccttatgttgaccggaacattcggcaaaggaatgatttgtgcggtggctgtatgcaaagacaaaacctttgaatggcagtgcgagaaaaatgaattgcgggatataaatttagaggtgaaaaaacttgacaattttattttggaaccgaatcccgttttagtgcgtagtcatttattttttagcgaggcaaaaaaatacggcttttggcaaatagattcaacgctcgcatacctgtcttgcgaaacttgccgcctgagcacaatggatttgccgcctataaagccatag

SEQ ID NO: 26504 - protein, 302 aa, Unknown
  Obtained from environmental sample
  misc_feature (1)..(302): Xaa is any amino acid
MRLVEMRSIADEHLLLMKDPLKLSEKLSEKFNAQERYALLHYLEILPKIREKFNLQKIDLICDRLAYEQATARDISEYKAKLWQSGAKIMDLCCGMGGDSFWLPADIAASGVDIAPERVLMFNENMERLGLPHRAVLQNALDVAGGDFFCIDPARRGGLNPNFESVLELSKKFCGGMVKLPPAYDENELPKESDVLYLGNASDCRECLMLTGTFGKGMICAVAVCKDKTFEWQCEKNELRDINLEVKKLDNFILEPNPVLVRSHLFFSEAKKYGFWQIDSTLAYLSCETCRLSTMDLPPIKP

SEQ ID NO: 26505 - DNA, 453 bp, Unknown
  Obtained from environmental sample
  misc_feature (1)..(453): n is a, c, g, or t
atggctgaagaacaaaagaaaattatcgcggtggacgatgttcctgataatttggcggctatcagaaatacgctgaaggatatttatgaggtgtttccatgctcatccgcgacgaagatgtttgagttattggagcatgttcaacccgatttaatcatgctggacgttggaatgcccgatatgaacgggtatgaggcgataaagaaacttaaaagcgacgatagattcaaggaagtgcccgttattttcctttcagccatgagcgacgaaaaaagcgagatggaaggcttgaaactcggcgccgttgactatattcacaagccctttgttaccccgttattgctccagcgtattaaaattcatctttccatgacggaacaaaagaaaataatattggacagaaacaaagaaatcgaggatttcctgaaaaaaatctccaaaagtcctggttaa

SEQ ID NO: 26506 - protein, 150 aa, Unknown
  Obtained from environmental sample
  DOMAIN (6)...(119): Response regulator receiver domain
  misc_feature (1)..(150): Xaa is any amino acid
MAEEQKKIIAVDDVPDNLAAIRNTLKDIYEVFPCSSATKMFELLEHVQPDLIMLDVGMPDMNGYEAIKKLKSDDRFKEVPVIFLSAMSDEKSEMEGLKLGAVDYIHKPFVTPLLLQRIKIHLSMTEQKKIILDRNKEIEDFLKKISKSPG

SEQ ID NO: 26507 - DNA, 483 bp, Unknown
  Obtained from environmental sample
  misc_feature (1)..(483): n is a, c, g, or t
gtggaaccgatagaatggtttttaatgaccaacgagcctgtgaaaacggctgaggctgcatatgaacgggttaagtattatacgcaacggtggaagatagagaggtttcattatgtgctgaagtccggctgcgcggtggaaaagctgcaggaacggagtattgacaagacaacaatgctggtgctgatgtattcgatcatagcggtcggcattatgaatctgacgtatatagcccggatacatcctgaagaaccgtgtacgatattttttgaggaagaggaatggaagacgctgtattgtactgcgaacaagacgaagaagccgccacgaaagccttatagcatacaagaagcggtaacctatcttggccggttgggagggccgaagcgtgctctcagcgacggtccaccggggttgaaaacggtatggattggccttatgacgcttaacgctttattggcttatcaggagtggttgcggtga

SEQ ID NO: 26508 - protein, 160 aa, Unknown
  Obtained from environmental sample
  misc_feature (1)..(160): Xaa is any amino acid
MEPIEWFLMTNEPVKTAEAAYERVKYYTQRWKIERFHYVLKSGCAVEKLQERSIDKTTMLVLMYSIIAVGIMNLTYIARIHPEEPCTIFFEEEEWKTLYCTANKTKKPPRKPYSIQEAVTYLGRLGGPKRALSDGPPGLKTVWIGLMTLNALLAYQEWLR

SEQ ID NO: 26509 - DNA, 465 bp, Unknown
  Obtained from environmental sample
  misc_feature (1)..(465): n is a, c, g, or t
ttggggcaaatgccctacaaccgcgaacaggcgaaggacgacagccgcagccgcggcagtaaaaagagacgggcattggaagaaaaagaaagttaccggtgggtgaagacgctgcaagcaagcactgcggatctgcctgaaggggtcaaagtaatcaacgtctgcgatcgggaaggggatatgtacgagttgctggacgcggcggaaactgccgggcagttgtttcttatccgggcagcccacaacaggatgacggcggataaccggcggattttagacgctatccgtaagaaacactgcatggggaaggcagaaataacgataccgcgggattcccgcaggaatttggatggacgggaagtggtattgcagatacgctatagccggtttgaaatcaaacgccctaatatactggacaaaacgaggcgctcagagagtctgttgaagcgtgggttatttatgtga

SEQ ID NO: 26510 - protein, 154 aa, Unknown
  Obtained from environmental sample
  misc_feature (1)..(154): Xaa is any amino acid
MGQMPYNREQAKDDSRSRGSKKRRALEEKESYRWVKTLQASTADLPEGVKVINVCDREGDMYELLDAAETAGQLFLIRAAHNRMTADNRRILDAIRKKHCMGKAEITIPRDSRRNLDGREVVLQIRYSRFEIKRPNILDKTRRSESLLKRGLFM

SEQ ID NO: 26511 - DNA, 903 bp, Unknown
  Obtained from environmental sample
  misc_feature (1)..(903): n is a, c, g, or t
atgagcaatgtcttctggcgaacatttgttcattacctctatcggttttgggattggaacggggattatgttcaagggcaacttgaacgaagcaaatccatgggaaagaaacatgtcgctaattgccaaaccaggataaaacggtatattgaaccgtttttcaaagaaactttcctttgcgatattaccacaaacagccttgagcagtttatgaaatcattaccccggcgtgagattaaccccgaaaaagggttagcccgtaatactatcaacctcattatcaaactcatcaaaaaagcgttaagagaggcggttaggctggacataatcccccggaatccggctgataagatagaactgcttgcggatgataatagaaagcgcggtatattaaccccaaaggaattagagcagctatttcaacaaacatggcctgacgagaggagcgaaacagcctcaattctcgcgtctgtttctggaatgagggtgaatgaagttaccgctttacgaatagaggatttagacattgaacacggggttattcatgtccgtcacagcttttcgccgtatgaaaaacggctgaaaggaacaaaaaatgagaaatccagatttatctatactgataaatcaattctaaatatcctttctgccctttatcaaaagaatccctggaagaactcgtttattttttggggggataatgctgctatgccaatgagcaatggaaccataagcaaacattttaacagaactttggcgaagataatgggggagaagctaaagagcacagttaacgaagaatggcgggaccttgcggcgatattggcggaaagaattgagattgaacgccatgagatgatagcaatacagacaaataacctaaatacagggagaattatgtaa

SEQ ID NO: 26512 - protein, 300 aa, Unknown
  Obtained from environmental sample
  misc_feature (1)..(300): Xaa is any amino acid
MSNVFWRTFVHYLYRFWDWNGDYVQGQLERSKSMGKKHVANCQTRIKRYIEPFFKETFLCDITTNSLEQFMKSLPRREINPEKGLARNTINLIIKLIKKALREAVRLDIIPRNPADKIELLADDNRKRGILTPKELEQLFQQTWPDERSETASILASVSGMRVNEVTALRIEDLDIEHGVIHVRHSFSPYEKRLKGTKNEKSRFIYTDKSILNILSALYQKNPWKNSFIFWGDNAAMPMSNGTISKHFNRTLAKIMGEKLKSTVNEEWRDLAAILAERIEIERHEMIAIQTNNLNTGRIM

SEQ ID NO: 26513 - DNA, 525 bp, Unknown
  Obtained from environmental sample
  misc_feature (1)..(525): n is a, c, g, or t
atgatgggacgaaagaacaagcagttgtgtatggtcatgctagacatggaagacttgatacctgaaacacatcttctaagaaaaattaaaacaaagatagattttgattttatatatgaagaagccgaaagttattattccaatataggacgcccgtctgttgatcctgtttgtttaataaaaatgctgcttgttggttatttatacggggtaagatccgagaggcggctagaagaagaaattactttgaatatcgcctacagatggttttgcggctttgacctgatggatacgatacctgatcattcaatattcagccaaaacaggcggcgaagatttgcagacggttcaatattccgacaaatctttaaccggatagtaagagattgtatagaaaccggtttagtatcaggagaaacggcagtgagcgacgggtcattcattcccgcaaacgtgtcttggcagagcaaagtcgaagtaaccagactggtagaaaaaagtactgttgattaccttgaagtatag

SEQ ID NO: 26514 - protein, 174 aa, Unknown
  Obtained from environmental sample
  misc_feature (1)..(174): Xaa is any amino acid
MMGRKNKQLCMVMLDMEDLIPETHLLRKIKTKIDFDFIYEEAESYYSNIGRPSVDPVCLIKMLLVGYLYGVRSERRLEEEITLNIAYRWFCGFDLMDTIPDHSIFSQNRRRRFADGSIFRQIFNRIVRDCIETGLVSGETAVSDGSFIPANVSWQSKVEVTRLVEKSTVDYLEV

SEQ ID NO: 26515 - DNA, 810 bp, Unknown
  Obtained from environmental sample
  misc_feature (1)..(810): n is a, c, g, or t
atgggcgctatcattacacagctatgcgatgaggttaagctccccaggatgatcaaggtcaggcaaatttttgatccgcataaaatagaaacttctgatattcctgacgcggtttacgcgcaaatgtcgcgtaacggtcttggggattatataaagaaggacaaacgtatagcgattacctgcgggagccggggcgtcgccaacatagcggttatcacaaaggccattgccggctttgtaaagtccaaaggcgcgaagccttttgttgttcccgccatgggcagccatggcggggccagcgcggaaggacaaaaggcccttattgaaagttacggggtgacggaagaatttatcggctgccctattctttcctcaatggaaactgtcgtcataggcgaaagcggcgaagggcataaggtaaggattgacaaaaacgcggcggaagcggacgggattattgtggcgggacggattaagccccacactgattttcacggcgtttatgaaagcggaattatgaaaatgatggcgataggccttggcaagcgggaaggcgcggacatatgccatcaaaaggggtttgggcatatgcaccacatggttcccctttttggaaaaaccattttaaagaacgcgccaattgtccttggttttggcataatggaaaacgcgtacagcgagacatataaattcatcgcccttaggcctgacgaaattgaagaagaagagcctaaattgcttgacgaggccagaacccatcttcccttantanttttaaaactattgatgttttggttgttgaaaggatag

SEQ ID NO: 26516 - protein, 269 aa, Unknown
  Obtained from environmental sample
  misc_feature (1)..(269): Xaa is any amino acid
MGAIITQLCDEVKLPRMIKVRQIFDPHKIETSDIPDAVYAQMSRNGLGDYIKKDKRIAITCGSRGVANIAVITKAIAGFVKSKGAKPFVVPAMGSHGGASAEGQKALIESYGVTEEFIGCPILSSMETVVIGESGEGHKVRIDKNAAEADGIIVAGRIKPHTDFHGVYESGIMKMMAIGLGKREGADICHQKGFGHMHHMVPLFGKTILKNAPIVLGFGIMENAYSETYKFIALRPDEIEEEEPKLLDEARTHLPLXXLKLLMFWLLKG

SEQ ID NO: 26517 - DNA, 528 bp, Unknown
  Obtained from environmental sample
  misc_feature (1)..(528): n is a, c, g, or t
atgcactccccccgccctgtcaaggccggacagactaccttatatgattacgaatatgtgcgtaacggagtggtcaatctctttatgatgtttgagcctctggttggaatgcgtgaggttatggtaacggaacggcgtaccatgaaagacttcgcccattgtctgaggtatttggctgaagaacggtatccggacgttgagaaaataattgtggtgatggacaatcttaacacccactcgctggcttcattatacgccgcctttgaacctgaaacggcgttgcgccttgcccagcgatttgaaatccattacaccccaaaacacggttcctggcttaatatggctgagttggaaataggggtaatgagccgtcagtgccttaagcggagaatagcgactattgaaaagatgggaagtgaagtacaaacatgggtaactgaacggaacaatcataaaaccaccgttcattggcagttcactaccgcggatgcccgtattaaactcaggcatttgtacccatgtttatag

SEQ ID NO: 26518 - protein, 175 aa, Unknown
  Obtained from environmental sample
  misc_feature (1)..(175): Xaa is any amino acid
MHSPRPVKAGQTTLYDYEYVRNGVVNLFMMFEPLVGMREVMVTERRTMKDFAHCLRYLAEERYPDVEKIIVVMDNLNTHSLASLYAAFEPETALRLAQRFEIHYTPKHGSWLNMAELEIGVMSRQCLKRRIATIEKMGSEVQTWVTERNNHKTTVHWQFTTADARIKLRHLYPCL

SEQ ID NO: 26519 - DNA, 897 bp, Unknown
  Obtained from environmental sample
  misc_feature (1)..(897): n is a, c, g, or t
ttgcagcccgaggagtttagggttaacgatcctctgggtttatactccgatccccgcctgaatgtgttggcttttccgctcggcgatttcacagatattctggatattctcagcacggaattacaacagtatgccagggtattttttctgagcggatatttgggttcatttgccgatccggtgcgtaaagtttttccgaatttggcttgtttggacgacaaacttattgtggttgagcacaacaatgtgcccgacccggttttactggaaaaagggagagtggttaccctggcggaatatttgcccggcgccaaaatggttaatccgcatttttacggtcagattaaaataacgcccaagcaggccggggttactaattttctcataacttacagacacaaggaaaccaataacgatattctgctctctgcagtgcgccaactgcacgagaatgggattacaaattttaaagtaaccttaacaggcaaaattcctccggcggctatcccggcggaactgcagacctactttaagatttgcggttttctgtcttgtccggaattatatgctcaggcggagcaggcggattttcttttggccttgtttgacccggataacccgagcgaccagagatatatcgctgacggcacgagcggcatgtatcaactggcttacggctttggaaaaccagtcattattcagcaatattttgccgcgctgcctaagtttaccggagaaaacagcctgatttacgcgcaaaaaacagacttggccgcagctatgcaccgggcgatcgttatggatgcggaacagtacgccaaaatgcaaaagaaattaggcgagctggcggacagtatttatcagcagtcgctggccaatctgaggagcatgttatga

SEQ ID NO: 26520 - protein, 298 aa, Unknown
  Obtained from environmental sample
  misc_feature (1)..(298): Xaa is any amino acid
MQPEEFRVNDPLGLYSDPRLNVLAFPLGDFTDILDILSTELQQYARVFFLSGYLGSFADPVRKVFPNLACLDDKLIVVEHNNVPDPVLLEKGRVVTLAEYLPGAKMVNPHFYGQIKITPKQAGVTNFLITYRHKETNNDILLSAVRQLHENGITNFKVTLTGKIPPAAIPAELQTYFKICGFLSCPELYAQAEQADFLLALFDPDNPSDQRYIADGTSGMYQLAYGFGKPVIIQQYFAALPKFTGENSLIYAQKTDLAAAMHRAIVMDAEQYAKMQKKLGELADSIYQQSLANLRSML

SEQ ID NO: 26521 - DNA, 315 bp, Unknown
  Obtained from environmental sample
  misc_feature (1)..(315): n is a, c, g, or t
atggccgaggcgctgcatcctgcgctacgtagaataattataacggagatacaaaaccgtcctcatccgtctgttttgttattctcggacatagaaattgatcacccgtataatacatacattaagccgggtcttccgccgggaccgatttccgctcccggacttaccgccttgcaagccgcattttccccctcaaatacaaattatctgtatttccggcttgaagatgtcgcgagcggaagacattatttttcccggacttatgacgaacacataaaagccggtcagcttataacaaaaccatcatggcgttaa

SEQ ID NO: 26522 - protein, 104 aa, Unknown
  Obtained from environmental sample
  DOMAIN (1)...(98): Aminodeoxychorismate lyase
  misc_feature (1)..(104): Xaa is any amino acid
MAEALHPALRRIIITEIQNRPHPSVLLFSDIEIDHPYNTYIKPGLPPGPISAPGLTALQAAFSPSNTNYLYFRLEDVASGRHYFSRTYDEHIKAGQLITKPSWR

SEQ ID NO: 26523 - DNA, 1008 bp, Unknown
  Obtained from environmental sample
  misc_feature (1)..(1008): n is a, c, g, or t
atgacagatacgcaaattattaaaaaagttttttccagcgaaccatatacggactggcattgggataaattggcgggcgcgtttgggcctggtgtggaaatagtccgtgccgcacattctgatacacaggcggtaaaagagggaatcaaagacgccgatgtcgctattctggccggggacatatccagggaagtattggcggtggcgaataaactaaagtgggtacattgcgatcattcgggagtcaataattcagctcatcctgaattgtttgaaaggggaatatacctaacctcatcttccggccgttccgctccggtgttggcggaacacattttctttctcatgctttccctgacgtataattccaggacattggaacagcagcagcgggatcataactggaataatctttaccggaactgccggggactctatgccaaaaccatcggtatcatcggtatgggctataccggaaaggcccttgcagtccgcgccaaagcttttgatataaaagtactcggttatggccggaagccggggccgatccctgacggagtggacaagatatggtacgccggtaatggggatacaattgacgctctgctgaaggaaagcgatattgttgtcttaacggtgcggctctcggatgaaacctaccatttaattgatgaacgggcgcttggactgatgaagtccagcgcatatctggtgaacatggccagaggcgcggtagtagatgaaaaagcgcttcacaaggctctggtgaacaagaccatcgccatggcggcaagcgatgtatttgagaccgaacccctcccgaaggaaagtccgctttgggatctgcccaattttattatcactccgcactgtaccccggaagtaccggatctggcgcttaacggccttaacatcatctgtgaaaacattaagcgttaccgcgacggcgagccgctgctcaactgtcttacagctcaggatttgtataccaagggaacggagaaatag

SEQ ID NO: 26524 - protein, 335 aa, Unknown
  Obtained from environmental sample
  DOMAIN (147)...(315): NAD binding domain of 6-phosphogluconate dehydrogenase
  misc_feature (1)..(335): Xaa is any amino acid
MTDTQIIKKVFSSEPYTDWHWDKLAGAFGPGVEIVRAAHSDTQAVKEGIKDADVAILAGDISREVLAVANKLKWVHCDHSGVNNSAHPELFERGIYLTSSSGRSAPVLAEHIFFLMLSLTYNSRTLEQQQRDHNWNNLYRNCRGLYAKTIGIIGMGYTGKALAVRAKAFDIKVLGYGRKPGPIPDGVDKIWYAGNGDTIDALLKESDIVVLTVRLSDETYHLIDERALGLMKSSAYLVNMARGAVVDEKALHKALVNKTIAMAASDVFETEPLPKESPLWDLPNFIITPHCTPEVPDLALNGLNIICENIKRYRDGEPLLNCLTAQDLYTKGTEK

SEQ ID NO: 26525 - DNA, 513 bp, Unknown
  Obtained from environmental sample
  misc_feature (1)..(513): n is a, c, g, or t
ttgacacgacagattggccgaggacaacttctctttgactataccgaggaagaatacgattctgttatggaggtaaaccttaaaggctactggcgctgtattcaggaggccctgccctaccttaaacaggcggaatacggccggattatcaacgtggcttctatccacgccaaaaggccaacgggtttcgacgcgatctacggagccgccaagggcggcattaaaatgctcacacgcgaggcggctttagctttgggcaaatacggaataacagttaatactttaagtcccggctctatccagataactctccatgaaaaccggaaattgatcacaaaaagagccgccagggaagatctcgaatttaataattttccccccagcggttttctttccgggcggataggctttccacatgatatgggctattgcatcgtctttttagcggatgagcagagccaatacatcaccggctccacgatccgcgcggacggcggcgcaatgatgaattga

SEQ ID NO: 26526 - protein, 170 aa, Unknown
  Obtained from environmental sample
  misc_feature (1)..(170): Xaa is any amino acid
MTRQIGRGQLLFDYTEEEYDSVMEVNLKGYWRCIQEALPYLKQAEYGRIINVASIHAKRPTGFDAIYGAAKGGIKMLTREAALALGKYGITVNTLSPGSIQITLHENRKLITKRAAREDLEFNNFPPSGFLSGRIGFPHDMGYCIVFLADEQSQYITGSTIRADGGAMMN

SEQ ID NO: 26527 - DNA, 639 bp, Unknown
  Obtained from environmental sample
  misc_feature (1)..(639): n is a, c, g, or t
gtggcgcactttgactgttacgaactttccgaaaaggccgttgcgacgggcaggaatgaagccgcacggcgcaagctcggcgaacggattacctttcatctcggcgacgctttcaaggcgaacatgatgccggcaagctacgattgcatttattgggatgacgccatgcatcacatgcttgatgccgcagccgctatgcgatggagcagggacttactggcaaaggacggctgctttttcatgtatgatttcgtggggccgacccgttttcaatggacggacgaacaggtgcggattgtgaaagacatcctggcaagccttgatgatgcctatttcctcattccgggcggcgagtacatgtggaaaaaggaaccccaccgcatgagcgttgaggaaatgacgcgcgcagaccccagcgaggccgccgactcggattccatcctgcctgccttccgggaatattttcccgcaggcacggtcatacctttaggcggtttggtctatgtgcttggcctggacggcgtgatcgtcaatattccggaggacagcctgctcctgaaaaaaatgctgaacattgacgccatactctcgcggcagggacacaattacttcgccgttgcctattatgtacccttgtga

SEQ ID NO: 26528 - protein, 212 aa, Unknown
  Obtained from environmental sample
  misc_feature (1)..(212): Xaa is any amino acid
MAHFDCYELSEKAVATGRNEAARRKLGERITFHLGDAFKANMMPASYDCIYWDDAMHHMLDAAAAMRWSRDLLAKDGCFFMYDFVGPTRFQWTDEQVRIVKDILASLDDAYFLIPGGEYMWKKEPHRMSVEEMTRADPSEAADSDSILPAFREYFPAGTVIPLGGLVYVLGLDGVIVNIPEDSLLLKKMLNIDAILSRQGHNYFAVAYYVPL

SEQ ID NO: 26529 - DNA, 861 bp, Unknown
  Obtained from environmental sample
  misc_feature (1)..(861): n is a, c, g, or t
gtgattggagaagccgccggacacggtgacaaccttatcgccacaatgtcaaggaggcaaaaaaccttgagccggacaacgctacaaaaactttccttcctcgaccgttatcttaccctgtggattttcctcgccatgttcttgggcgttggtctcggatgggcagcgccgggaatacaaaacgtcatcaatttttttcaggtcggcacgaccaacatccctatcgccgtcgggcttatcctgatgatgtacccgcccctggccaaagtaaaatatgagcagttcgggcgggtattccgcgacagaaaggtgctgctcctctccctggcgcaaaactggattatcggcccgatgctgatgtttctgctggcggttgtctttctttccggcaacaacagttacatggtgggccttatcctcatcggcctcgcccgttgcatcgccatggtcatcatctggaacgaccttgccggaggcgaccgggaatactgcgccgggctggtggccttcaacgccgtgttccaggtgcttttcttcccggtttacgcctatgtgttcattaccgtgctgccgagcctgcttggcctgtccggggccgtagtgaacgtcagtatgggccggcttgccgaaagcgtcttcatctatctcggcattccctttatcgcgggtgtggcctcacgcttttacggcctcaaggtcaaggggcctgactggtacgaaaagagcttcctccccgcatcagtccctggacgctccgggcgctgctgttcaccatcctggtcatgttttccctcaagggtgaacatattcgtgcacctttcccctggaccgtggcgaaaggtcgccctttccccctgctga

SEQ ID NO: 26530 - protein, 286 aa, Unknown
  Obtained from environmental sample
  DOMAIN (76)...(273): Sodium Bile acid symporter family
  misc_feature (1)..(286): Xaa is any amino acid
MIGEAAGHGDNLIATMSRRQKTLSRTTLQKLSFLDRYLTLWIFLAMFLGVGLGWAAPGIQNVINFFQVGTTNIPIAVGLILMMYPPLAKVKYEQFGRVFRDRKVLLLSLAQNWIIGPMLMFLLAVVFLSGNNSYMVGLILIGLARCIAMVIIWNDLAGGDREYCAGLVAFNAVFQVLFFPVYAYVFITVLPSLLGLSGAVVNVSMGRLAESVFIYLGIPFIAGVASRFYGLKVKGPDWYEKSFLPASVPGRSGRCCSPSWSCFPSRVNIFVHLSPGPWRKVALSPC

SEQ ID NO: 26531 - DNA, 795 bp, Unknown
  Obtained from environmental sample
  misc_feature (1)..(795): n is a, c, g, or t
atgaagacaacggacagcatgcggcccgggccggacgagacgctggtcttcgatcgcacgccctgcctgatagacaaggctacgcactattgccccggctgccatcacggcatagcccaccgtatcgtggccgaagtcattgacgaactcgggctgcgggaaaaaaccattttagccgcttccgtgggttgttcggcctttctgtatgactatatggacgtggactgcatcgaggcgccgcatggccgcgcctccgccgtggcttgcggcgtcaagcgcgcccgtccggatcgcgtggtgttcgcctaccagggcgacggcgatctggcggccatcggcacgaacgaggccctgcacgccgccaaccggggcgaggccatcacgatcatcttcgtgaacaacaccgtgtacggcatgaccggcggacagatggcccccacgaccctgctgggacagaaaaccaccacgaccccgcgcgggcgctcctttgacaacgaaggcgctcccctgcgcatggccgagctgatgggtctgctggagggggtctccttctcggcccgttgcgccctgaataccgtcaaaaacatcatggccgcgaaaaaagccgtcaaagccgctttcgaggtgcaactgcaccagaagggctacggcttcgtcgagctgctcagcggctgtcccaccaactggcacatggacgcgcttgccgcgaacgcgcacatcggcaaggccatgattccggccttccctctgggaaccttcaaggacgcgcgcgcggcaaggaagcatgcggcatga

SEQ ID NO: 26532 - protein, 264 aa, Unknown
  Obtained from environmental sample
  DOMAIN (61)...(221): Thiamine pyrophosphate enzyme, C-terminal TPP binding domain
  misc_feature (1)..(264): Xaa is any amino acid
MKTTDSMRPGPDETLVFDRTPCLIDKATHYCPGCHHGIAHRIVAEVIDELGLREKTILAASVGCSAFLYDYMDVDCIEAPHGRASAVACGVKRARPDRVVFAYQGDGDLAAIGTNEALHAANRGEAITIIFVNNTVYGMTGGQMAPTTLLGQKTTTTPRGRSFDNEGAPLRMAELMGLLEGVSFSARCALNTVKNIMAAKKAVKAAFEVQLHQKGYGFVELLSGCPTNWHMDALAANAHIGKAMIPAFPLGTFKDARAARKHAA

SEQ ID NO: 26533 - DNA, 1143 bp, Unknown
  Obtained from environmental sample
  misc_feature (1)..(1143): n is a, c, g, or t
ttgaataatttgttaagaattttaccacgaaccactcgaatcgcttcggcacgcatacaaacaagaacaaacatggtttgtggtatattcttctctcttctctcttttctctccctctcttcctgttcaaagttaggttacggtgttttactttggtctacggaagatccggttattttgtcgggaaccgtgctgcctgtatatatcaagtcaaacattgaccaggtttgggttgtcggcgttccggaatcgaacagggttgataaaaaaggcaattccaaaattgaaatcccgctttcccagcttaattttgcgggcagcaaaaaaaaggcaagggcgcttgcggatgaattcgcgtattacgctccggcatacgccgaaaatttacaggacgggcttcccatccgcgataatcccgataacggagcgcggcgcgtatacaagttaagaacaggggaaataataaaaattctggataaggttgagggaaacccgcctataagcatgaccggagaccccttgcccggcgactggtataaagtattaacccaaaacggttatacaggttattgtttttcctacaggttaaaaatctttaatcattatgaggggcctattcaggctgtccacgccacgcgggttgaagccgctcccgatcccgatcttgacatggttttatcaaaaaagtggtcgcccgaatcatatttgcagatggtaaatacaaatcggataaatatcaacgaacttagaaaagattaccgctttgatcccggacaggataccggcatagctaaaattatactgcccgaactggaaatagaatttatttacgaaggaataattcccgacggggaaaaggcgtggcgttttgagggaaccagtctgcaaatgaacctgcgtacaaatacgactcttgtcgtgcagtttgccgaaggctctggagcaagacgcacctttttatttgtcgtcctctcctcggacacagacgatcttattttacaggaaaacgcgcgcagagaatcacaatactcggcaatctataatcaggggcccgtctttacaagcaataattaccgttccattacctttaccaatacgggtaaatttatatggacaggttttgatctccttgtccaagtgtaa

SEQ ID NO: 26534 - protein, 380 aa, Unknown
  Obtained from environmental sample
  misc_feature (1)..(380): Xaa is any amino acid
MNNLLRILPRTTRIASARIQTRTNMVCGIFFSLLSFLSLSSCSKLGYGVLLWSTEDPVILSGTVLPVYIKSNIDQVWVVGVPESNRVDKKGNSKIEIPLSQLNFAGSKKKARALADEFAYYAPAYAENLQDGLPIRDNPDNGARRVYKLRTGEIIKILDKVEGNPPISMTGDPLPGDWYKVLTQNGYTGYCFSYRLKIFNHYEGPIQAVHATRVEAAPDPDLDMVLSKKWSPESYLQMVNTNRININELRKDYRFDPGQDTGIAKIILPELEIEFIYEGIIPDGEKAWRFEGTSLQMNLRTNTTLVVQFAEGSGARRTFLFVVLSSDTDDLILQENARRESQYSAIYNQGPVFTSNNYRSITFTNTGKFIWTGFDLLVQV

SEQ ID NO: 26535 - DNA, 807 bp, Unknown
  Obtained from environmental sample
  misc_feature (1)..(807): n is a, c, g, or t
gtgggcattgtcaacctcatgcccacaaccattgacaccgagattcagcttttgcggcttttgggcaacagcccgttgcaggtggacatttctttcctgcgcatgggcagccatgaatcaaaaaacgcgccgccggggcatttggaaaaattctacctgaatgcggatgacgttataaataccgacacccgctatgacgggcttattattaccggcgcacccgttgaaacgctgccgtttgaggaagttgattactgggacgaacttgcccgcgttattgattactcggagaaaaaagttttttccacgctacacatctgctggggcgcacaggcgggcctgtaccgccgctacggcatccccaaaaagccgctgggcaaaaaattgttcggcgtttttccccacgcgacaaacgaacagtaccatatccttttccggggttttgacgatgaattcctcgccccgcagtcgcggcataccgccagcgaccgggacgcgattgccgccgagccgcgccttgccattcaatttgaaaccgaagagacgggggtatttatcgccactgcccgcggcaacagggagatatacgttacgggccacctggaatatgaccccctcacgcttgaccgggagtaccgccgcgatctggcaaaaggcctgcccatcgatccgccgaaaaattactaccccggcggcgatccgtcaaaaccgcccgtagtccgctggcgcgcccacgccaacctgttttttgacaactggcttaactatgtgtaccaggaaaccccttttgatctgggggagctgtaa

SEQ ID NO: 26536 - protein, 268 aa, Unknown
  Obtained from environmental sample
  DOMAIN (2)...(263): Homoserine O-succinyltransferase
  misc_feature (1)..(268): Xaa is any amino acid
MGIVNLMPTTIDTEIQLLRLLGNSPLQVDISFLRMGSHESKNAPPGHLEKFYLNADDVINTDTRYDGLIITGAPVETLPFEEVDYWDELARVIDYSEKKVFSTLHICWGAQAGLYRRYGIPKKPLGKKLFGVFPHATNEQYHILFRGFDDEFLAPQSRHTASDRDAIAAEPRLAIQFETEETGVFIATARGNREIYVTGHLEYDPLTLDREYRRDLAKGLPIDPPKNYYPGGDPSKPPVVRWRAHANLFFDNWLNYVYQETPFDLGEL

SEQ ID NO: 26537 - DNA, 738 bp, Unknown
  Obtained from environmental sample
  misc_feature (1)..(738): n is a, c, g, or t
atgtccgactacatggaaaagcacaacgcctcaaggctcgtaggcgcgcctccaggttatatcggttacgatgaaggcggctttctcaccgagcgcatcaggcgcaacccctacagggttgttctttttgacgaaatggaaaaagcccatctggacgtgtttaaccttcttttacaggtgcttgaggaaggggaactaaaagacagcctgggccacactgtaagtttcagaaacaccgtcataataatgaccagcaacgcgggggttcgggaaatttccagggattcgcgtctgggcttcggaagcggttccgggatgatgagttttgaagaaatcgagtcttcggccatgtcagaattaaaaaggctctttaacccggaatttttaaacagggtcgacgacgttgtggtttttcatcctttggacatcaagcaggtcgaggctatcctggatctgcaaatcgaagagctttccgcacgtctgtatgagcagggctatacgatccaggttatgcaggccgcaaagaaaattctgattgaaaaaggctgggatccgaaattcggcggcaggcctttgcgccgcgcccttcaaaaagagctggaagatcccctgtcactaaaaattttggaaggcgattatcatcccggcacggttttcacagcctcagcaaagaacggaaaaataacactcaaaacggaagcaggggtaattgccgataaaaaagtggttctaaaatag

SEQ ID NO: 26538 - protein, 245 aa, Unknown
  Obtained from environmental sample
  DOMAIN (1)...(135): ATPase family associated with various cellular activities (AAA)
  misc_feature (1)..(245): Xaa is any amino acid
MSDYMEKHNASRLVGAPPGYIGYDEGGFLTERIRRNPYRVVLFDEMEKAHLDVFNLLLQVLEEGELKDSLGHTVSFRNTVIIMTSNAGVREISRDSRLGFGSGSGMMSFEEIESSAMSELKRLFNPEFLNRVDDVVVFHPLDIKQVEAILDLQIEELSARLYEQGYTIQVMQAAKKILIEKGWDPKFGGRPLRRALQKELEDPLSLKILEGDYHPGTVFTASAKNGKITLKTEAGVIADKKVVLK

SEQ ID NO: 26539 - DNA, 1209 bp, Unknown
  Obtained from environmental sample
  misc_feature (1)..(1209): n is a, c, g, or t
atgaatttaacgtctgacaatattatcgcttactttcagcccattctttccgccgattcaaattatgtatacgcttttgaagtcctgggacgctatattgatgatgacggaactgtaaactccctgggtcctttttttacagaccccaatatatcgcatgatgaagccctcagggtacacagaatagtaagaagatacgccatgaaaaaatactccgaagaaaagcggaatgaatatctgtttatcaatatcacattggcatggcttctgccgtatttggaaaaaccggaagacatgataactttacagcttgcaaaacaattcggtattcccaatgacaggctggttattgaaattaccgaagaagattttaactcaaacgaggaatatcttcgcgccatattccattacaaaaaagccggctgccgcatcgcgcttgacgattaccgaaaggaagccagtaatattgacaggctggcaaaacttcagcccgacattattaaaataaatattgattatatccataacagcgagaagtcttatcattaccgtgatatnntgcgtccccttgccgcctttgccgattctgtaggtatcgaagtgctgtatgaaggcgttgagacacatcggcagcttgatatttgtatttcatcaaagggaaggttctatcagggatttttaattgccgaccctcaaccatctatgagcaatacggttattaactcgtttgtattctcggcgttaatcgaaaccacttataaggcgataaaaaacaaggcgatcaaagcggagtctgtgagaaaatcccttgacgtccaggttgagcgtttcctgtttgaaaatccgtttgattatgaaaaaataaactacgacgcatacctaataaaacttttcggtgaattaccggaggtgaaaaggatttatctgtgcagccaacaaggcgttcagctttccgataatattgagcggaattcggaagatatcgtatgtcgtgactacaaaaacaaaaattgggcatggcgcggatattttcacgaaagcctgacagcttttaccatgggcaggaaaagctgcgtatcaaatatctatcgcgattttacgacaaaagaacagatgttcacatattattacgcggtaagcgatgacgtatttttgttcgtggacattacagaagatatggaaaggatagaagcctatgccgctggataa

SEQ ID NO: 26540 - protein, 402 aa, Unknown
  Obtained from environmental sample
  DOMAIN (1)...(231): EAL domain
  misc_feature (1)..(402): Xaa is any amino acid
MNLTSDNIIAYFQPILSADSNYVYAFEVLGRYIDDDGTVNSLGPFFTDPNISHDEALRVHRIVRRYAMKKYSEEKRNEYLFINITLAWLLPYLEKPEDMITLQLAKQFGIPNDRLVIEITEEDFNSNEEYLRAIFHYKKAGCRIALDDYRKEASNIDRLAKLQPDIIKINIDYIHNSEKSYHYRDXXRPLAAFADSVGIEVLYEGVETHRQLDICISSKGRFYQGFLIADPQPSMSNTVINSFVFSALIETTYKAIKNKAIKAESVRKSLDVQVERFLFENPFDYEKINYDAYLIKLFGELPEVKRIYLCSQQGVQLSDNIERNSEDIVCRDYKNKNWAWRGYFHESLTAFTMGRKSCVSNIYRDFTTKEQMFTYYYAVSDDVFLFVDITEDMERIEAYAAG

SEQ ID NO: 26541 - DNA, 1470 bp, Unknown
  Obtained from environmental sample
  misc_feature (1)..(1470): n is a, c, g, or t
ttgtcttttgacgcacggaagatcattgacaacattttccacgagcaaaatttgcctgtcccgaattccttaaatgccgaactccggccttaccagaaacgcggctttaactgggtctgttcccttttgcattctggatttggctgcatacttgccgatgacatggggcttggcaaaaccgttcaatcaatcgcgacgcttttgcggctcaaggaagatgggcatctggacaagggctgccttgtacttactccggcctcccttttaagcaactgggaaaaagagcttgagcgttttgcccctactctgcttgtttcacgctttcacgggccgaaccgaattataaacagaaaattcaatgtttttcttaccaccttccaaacggcggttcgcgatgtggaaaaactaaaagatgtcgccttttccgttcttttggttgacgaagcccacctgatgaagaacgcagaaacccgcgtctcccgcgcagttaaactcctgcaatcccaataccgccttgcgctgtcgggaacgcccgtggaaaaccgccttgaagacctccgttccctttttgattttatcatccccgggtatctgggaaacgcgaagacatttcaaaagcagtaccgaatccccatagaggtgatgcgaagcctggagcaggcggaagccttgcgaaaaattacagcgccttttctactacggcgcgttaagacggacaaatcaatcatcaaagatctgcctgaaaagattgtttccaacgaatacgcagtactggaaaaagatcaggccgccctgtacgaaagcgtcgtttccgaatcaataaagaaatctgcgaaaatggaaagcaaggaacgctcctctttgattctttcgctactcacttcactaaagcagatctgcgatcaccccagggtgtttgacaaggaaagccctgcggtttcggagctttcaggaaaggcccagcttctccttaccctgctggaagagattttggcgagtcgtgaaaaagtcctgatctttagccaatacgttgaaaccctgaattgccttgacctaatcatcagaaacgaaatgaaagaagcggctctggtttaccatggcggcctaaaggagaatgtccgttctaccttggtaaaccgttttcaaaccgatcccgcttcaaagatttttcttgtaagcctgaaagcaggcggcctcggtctaaacctaacagcggcaagccgtgttatccactacgatctgtggtacaaccctgcggtggaaaaccaggctacagacagggccttccgtataggccaaaagcacaatgtctttgtccaccgctttatcaccaaaaacagtttcgaggaaaaaattgatgcaatgatttccggcaaaaaggaactggcggatatgaccgttgcgtccggcgaatcctggctggcacgtatgagccacgaggaactaaaagatttgtttgatagggggtaa

SEQ ID NO: 26542 - protein, 489 aa, Unknown
  Obtained from environmental sample
  DOMAIN (25)...(180): Type III restriction enzyme, res subunit
  misc_feature (1)..(489): Xaa is any amino acid
MSFDARKIIDNIFHEQNLPVPNSLNAELRPYQKRGFNWVCSLLHSGFGCILADDMGLGKTVQSIATLLRLKEDGHLDKGCLVLTPASLLSNWEKELERFAPTLLVSRFHGPNRIINRKFNVFLTTFQTAVRDVEKLKDVAFSVLLVDEAHLMKNAETRVSRAVKLLQSQYRLALSGTPVENRLEDLRSLFDFIIPGYLGNAKTFQKQYRIPIEVMRSLEQAEALRKITAPFLLRRVKTDKSIIKDLPEKIVSNEYAVLEKDQAALYESVVSESIKKSAKMESKERSSLILSLLTSLKQICDHPRVFDKESPAVSELSGKAQLLLTLLEEILASREKVLIFSQYVETLNCLDLIIRNEMKEAALVYHGGLKENVRSTLVNRFQTDPASKIFLVSLKAGGLGLNLTAASRVIHYDLWYNPAVENQATDRAFRIGQKHNVFVHRFITKNSFEEKIDAMISGKKELADMTVASGESWLARMSHEELKDLFDRG

SEQ ID NO: 26543 - DNA, 738 bp, Unknown
  Obtained from environmental sample
  misc_feature (1)..(738): n is a, c, g, or t
ttgaggccgacgttatcatccctcagggcctttatacgcaacgtatataaagagatgcaggattgttattacgatctggcgacctgcgaaatacgccccctctccaactacaggcttgaccgggtgctgcacaggatgataaacctcgcggtgatcctcaatttaaaagttgatcccaaggcgttcggtttttgtatctttgtcacaaagcgcctcttcgagagggtcggcgggtttgacgaaaccatttacgtggccgaggacaatgactttgtcaaaagggcatccgagttcaggtctttgcgttacctgagttccgcgcatataatggtaagcgtccgccgctttgaaaaagagggccgcttcgcttacatgaacaaggggattaaactgaacctgtaccgtaccttcaggggcgagatacggaacgcggaggttgttacatacgaatttgaggactataacaaaccggaagatcctgaagacaccgattttcttgactggctcgaaaaacgtttaataaagattgaggaaaattcgcagcgattcgtcaggaaaatccaaaagtattcccatgaaactgattataaacaaatacaaccgaggatcaacgaattctcccatttaatggaagacctggacgcttaccttagcaaggatgaacggaatgtgcggcgtctgattaaatggaagaattttttcaaacgcggcaatccgcataacacgtataaaaagtag

SEQ ID NO: 26544 - protein, 245 aa, Unknown
  Obtained from environmental sample
  misc_feature (1)..(245): Xaa is any amino acid
MRPTLSSLRAFIRNVYKEMQDCYYDLATCEIRPLSNYRLDRVLHRMINLAVILNLKVDPKAFGFCIFVTKRLFERVGGFDETIYVAEDNDFVKRASEFRSLRYLSSAHIMVSVRRFEKEGRFAYMNKGIKLNLYRTFRGEIRNAEVVTYEFEDYNKPEDPEDTDFLDWLEKRLIKIEENSQRFVRKIQKYSHETDYKQIQPRINEFSHLMEDLDAYLSKDERNVRRLIKWKNFFKRGNPHNTYKK

SEQ ID NO: 26545 - DNA, 870 bp, Unknown
  Obtained from environmental sample
  misc_feature (1)..(870): n is a, c, g, or t
ttgaacaatttattgagtaacgctatcaaatacacgcatggcggaaccatcgaattaagcgtgaactgtaaaagtgatggcggcgatctgattttggaagcgtctgtcaaagataccggtatcggtatcagcgaggaaaacctaaagaagctcttcgcggattacaatcaggtagacactcgtgccaaccgcaatatagaaggcacaggcctgggattggccattacgaagaggcttacggagcttatgggcggaaaaattcatgtagagagcgagtacggtaaaggctcgactttttctttttatatccggcagggttttgttagcgatacgccgatagggcctgtggtagcggaaaacctccgtaaattccgctatgccgatgacaaacgcgccgttataaaaaaattggcgcgccgtgatttgagcagcgccagggtacttgttgttgatgacatgcagaccaaccttgacgtggcggcgggcctcttgcggaaatataaaatgcaggtggattgcttgcacagcgggcctgaggccatcgagtgtgtaaatagcgggaatccggtttataacgccatatttatggaccacatgatgccggggatggacggcatagaagcggcaggagctattcgctcattaaatacggaatacgcccgtaaaataccgattatcgcccttacggcaaacgccattcagggaactgataatatgttttttgaacacggttttcaggcctttatatccaagcctattgacataatggaactggattccgttatcaaaaaatgggtgcatagcgaaccaacggaatccgctgcttccaataataataataacgaagacagccatgaaagccatgaataa

SEQ ID NO: 26546 - protein, 289 aa, Unknown
  Obtained from environmental sample
  DOMAIN (145)...(263): Response regulator receiver domain
  misc_feature (1)..(289): Xaa is any amino acid
MNNLLSNAIKYTHGGTIELSVNCKSDGGDLILEASVKDTGIGISEENLKKLFADYNQVDTRANRNIEGTGLGLAITKRLTELMGGKIHVESEYGKGSTFSFYIRQGFVSDTPIGPVVAENLRKFRYADDKRAVIKKLARRDLSSARVLVVDDMQTNLDVAAGLLRKYKMQVDCLHSGPEAIECVNSGNPVYNAIFMDHMMPGMDGIEAAGAIRSLNTEYARKIPIIALTANAIQGTDNMFFEHGFQAFISKPIDIMELDSVIKKWVHSEPTESAASNNNNNEDSHESHE

SEQ ID NO: 26547 - DNA, 318 bp, Unknown
  Obtained from environmental sample
  misc_feature (1)..(318): n is a, c, g, or t
atggacgcgcttttaagcctgccgggggtagggcgaaaaacagccaaccttgtgcttaccgaagctttcgatatgtacggcatttgcgttgacattcacgttcacaggatatgcaaccgggcgggctggctcgcagcgcaaacgcctgaaaaaacagaaatcgccttgcgggaaaaactgcccaaaaattactggaaaaagatcaacgggcttctggttctatacgggcaaaatgtctgccgccccgtaagccccttttgttcccgctgcgtaataaaagcccactgtctgcgagcaggcgtaacaaaaagtaggtaa

SEQ ID NO: 26548 - protein, 105 aa, Unknown
  Obtained from environmental sample
  misc_feature (1)..(105): Xaa is any amino acid
MDALLSLPGVGRKTANLVLTEAFDMYGICVDIHVHRICNRAGWLAAQTPEKTEIALREKLPKNYWKKINGLLVLYGQNVCRPVSPFCSRCVIKAHCLRAGVTKSR

SEQ ID NO: 26549 - DNA, 492 bp, Unknown
  Obtained from environmental sample
  misc_feature (1)..(492): n is a, c, g, or t
gtggcacttgcgggggcatgggcgctgcctgttttgggcggggatattgtcattgcgaccagtgccctccgaatggagggtacaaccaaggaatacgttcccgttgattttccggctgtggcgaaccttgacgttaccaatgcccttattgaagccgccaaaaagctgaaggcgcaatggcacgccggtatcgtccaatgcaaggattccttttacgggcagcacaaccccgaacgcattcccgtcggctatgatttaatgaacaagtgggacgcctggataaaagccggctgcctcgcgtcagaaatggaaagcgccgccctttttattgtgagccagatccttggcgcaaaggccggctgtgtgcttactgcggtgtggaaccaggaacgcgaacgcgccggcatgagcaacccccactgccacgacacaaccctcgcgatcaaaaccgcagtggaagcaatcaggattttaatagggaatggggagtag

SEQ ID NO: 26550 - protein, 163 aa, Unknown
  Obtained from environmental sample
  DOMAIN (2)...(155): Phosphorylase family
  misc_feature (1)..(163): Xaa is any amino acid
MALAGAWALPVLGGDIVIATSALRMEGTTKEYVPVDFPAVANLDVTNALIEAAKKLKAQWHAGIVQCKDSFYGQHNPERIPVGYDLMNKWDAWIKAGCLASEMESAALFIVSQILGAKAGCVLTAVWNQERERAGMSNPHCHDTTLAIKTAVEAIRILIGNGE

SEQ ID NO: 26551 - DNA, 366 bp, Unknown
  Obtained from environmental sample
  misc_feature (1)..(366): n is a, c, g, or t
atgtacagctctatcaaacttgttccacgggaaaggcagcttttacctcttaacccggaaataatgcaaaaagaatttgaaaaattcgggggaaagcgcgagaaactcagttttgaatattggccttcaaaagaagacgtatttgatgcccttgttcccctgtatgtaaaagggattatatacggctcccttgtggaagcttatgtaagcgaacaaagcgcccgtatgtccgcaatggacgaagccagcaagaacgcggaagaaatgctcggcgatttgcagataaactataaccgcgccagacaggcgggcattacccaggaaatgacggaaattgtcggcggggcggaagcgttgagcgactaa

SEQ ID NO: 26552 - protein, 121 aa, Unknown
  Obtained from environmental sample
  DOMAIN (1)...(119): ATP synthase
  misc_feature (1)..(121): Xaa is any amino acid
MYSSIKLVPRERQLLPLNPEIMQKEFEKFGGKREKLSFEYWPSKEDVFDALVPLYVKGIIYGSLVEAYVSEQSARMSAMDEASKNAEEMLGDLQINYNRARQAGITQEMTEIVGGAEALSD

SEQ ID NO: 26553 - DNA, 603 bp, Unknown
  Obtained from environmental sample
  misc_feature (1)..(603): n is a, c, g, or t
gtgctctgtcgcgatattgcggatcagctccatgatgagtaccgttttaccgaccccggcgcctccgaaaagccctatcttaccgcctttggcgtacggggctataaggtcgattacctttatgccggtttcaaaaacttcggtagccggcttctgatcggaaaattccggtgctttgcggtgaatggacgcgtattccttggcgctgaatggccctttgtcgtcaatggatctgcctgtaacgttgaacatccttcccaggatttcatcgcccaccggaacctgaatcgcgtgtccggtgtcgcttacttccatgccacggctaaggccctccgtcgcttccatggcaacgcagcggacacggttgtccccaatgtgctgcaggacttccagcacaacctttctgcttccggcgtttacttccagggcgttaagaattcccgggatgggctccgtagtgcttgcgctgaaactcacgtccacaacgggacctacaacctggatgatagaacctgtttttgccattttttccctctttttccaatctgctttagtcgctcaacgcttccgccccgccgacaatttccgtcatttcctgggtaa

SEQ ID NO: 26554 - protein, 200 aa, Unknown
  Obtained from environmental sample
  misc_feature (1)..(200): Xaa is any amino acid
MLCRDIADQLHDEYRFTDPGASEKPYLTAFGVRGYKVDYLYAGFKNFGSRLLIGKFRCFAVNGRVFLGAEWPFVVNGSACNVEHPSQDFIAHRNLNRVSGVAYFHATAKALRRFHGNAADTVVPNVLQDFQHNLSASGVYFQGVKNSRDGLRSACAETHVHNGTYNLDDRTCFCHFFPLFPICFSRSTLPPRRQFPSFPG

SEQ ID NO: 26555 - DNA, 699 bp, Unknown
  Obtained from environmental sample
  misc_feature (1)..(699): n is a, c, g, or t
ttgaggcgggccgcagcntactctacgaaaccgcccgctttcgttgacntaaaggaagcgctggaggattattcggaaaagcacccggaagacaaaagcgagattgtagaagataagaagaagtacgcgaaatacgcgggcttcttcaccccgctggttaagggttacgccactgaaatggcaaacagggttgccaatgacgcgattcaaatccacggcggcactggctacatgaaggagtttaacgccgaacgccactacagggacgctagaatcaccaacatctacgagggaaccactcagcttcaggttgtggctgccatcgggccggtgacttcaggtgtagcccaggctgtcctggacgaatacgacaaggcaaactacaaccacagccccgctttgcttgaaaaagtccgcgaagcccgcaagttttttgaagaagcccttgaatacgcaaagacctacgaaggccaccagcagtttctcacctaccattcacgccgccttgtggaaatggcgaccgatctcgtcatcagctacctttttcttcgtgacggcaaccacagcgagcgcaagcaaaaagcggcggctgtcttcattgccaggatgccctcacgggtaaaagcgagccgtgatttcattatgagcgaagatggggctttgctgaagaattacgaagcggtgattgggaagatttag

SEQ ID NO: 26556 - protein, 232 aa, Unknown
  Obtained from environmental sample
  misc_feature (1)..(232): Xaa is any amino acid
MRRAAAYSTKPPAFVDXKEALEDYSEKHPEDKSEIVEDKKKYAKYAGFFTPLVKGYATEMANRVANDAIQIHGGTGYMKEFNAERHYRDARITNIYEGTTQLQVVAAIGPVTSGVAQAVLDEYDKANYNHSPALLEKVREARKFFEEALEYAKTYEGHQQFLTYHSRRLVEMATDLVISYLFLRDGNHSERKQKAAAVFIARMPSRVKASRDFIMSEDGALLKNYEAVIGKI

SEQ ID NO: 26557 - DNA, 909 bp, Unknown
  Obtained from environmental sample
  misc_feature (1)..(909): n is a, c, g, or t
gtgctttccatcatcggcgaggtctcaggcgagttcgtcgcgcccgcagccccggcggtagatgaggccggtcccaccctggcgaacaatcaggtaacgctcaacccggcgacgcaaaaggcgtgggatatgctggctaaagccgacatgatgggctttggcataccacggcaatacggcggcattaatatgcccataacgatcctcagcatcgccgcggagatactttcccgcgctgacggctcctttctcaattttggccttcagcaggatattgccgagacgattaacaaattcgcctcggaagagcagaagcgggcctacctgcctaaactctgttccggcgagtgggactcctcgatgatccttaccgagccggacgcgggcagcgaccttcagtcggtgaacctgaaggccgtgcagggagcggacggcacgtggcgtcttaacggcgtcaagcgctttattaccaacggctgtggaacaatcgggcttgtcctggcccgcagcgaggaaaaaggcaaaggggcgcgggggctttcgttctttatttacaagcgcgacgagaaaatgatcatccggcggctggagcacaagctcggcatccacggttccccaacctgcgagttgcagtttaacaacgcgccggcggagttgctgggcgagcggcagcggggacttaccaaatacaccctgtggctgatgaacagcgcccggcttggcgttgccgcccaggcggtgggcattgccgaggcggcctacagggaggcggacctctacgccgccaagcgcatccagttcggcgtacctgtgcgggatctgcccccggttttcgaaatgctcacggaaatgaaaatcgcgcttgaggcgggccgcagcntactctacgaaaccgcccgctttcgttga

SEQ ID NO: 26558 - protein, 302 aa, Unknown
  Obtained from environmental sample
  DOMAIN (6)...(116): Acyl-CoA dehydrogenase, N-terminal domain
  misc_feature (1)..(302): Xaa is any amino acid
MLSIIGEVSGEFVAPAAPAVDEAGPTLANNQVTLNPATQKAWDMLAKADMMGFGIPRQYGGINMPITILSIAAEILSRADGSFLNFGLQQDIAETINKFASEEQKRAYLPKLCSGEWDSSMILTEPDAGSDLQSVNLKAVQGADGTWRLNGVKRFITNGCGTIGLVLARSEEKGKGARGLSFFIYKRDEKMIIRRLEHKLGIHGSPTCELQFNNAPAELLGERQRGLTKYTLWLMNSARLGVAAQAVGIAEAAYREADLYAAKRIQFGVPVRDLPPVFEMLTEMKIALEAGRSXLYETARFR

SEQ ID NO: 26559 - DNA, 834 bp, Unknown
  Obtained from environmental sample
  misc_feature (1)..(834): n is a, c, g, or t
atgtttgaattactccccgcgccgggcgttaagctctccagaattgtcaacctgcaggacaatatagccctgcgccttgccgcctcgtccgtgcgtattgtcgcgccgattcccggcaagcacgccgtgggtattgaggttccaaacgcaaagaggcacattgtttcgttcagggaaattatcgagagcgaacttcaacgtgagggcaaacgcccggaaattcccgtggttatggggaaggatgtttcaggcgatacggcgctgagtgttgatctgaccaagatgccacatctgctgatagccgggactaccggctcaggtaaatcggtctgcgtcaattcgctgatcctctcgatactgtaccagcttcctccttcggaatgccgcctaattctcatcgacccaaaaattgtggaactgaaactctacaatgatatcgcgcatctgctgacccccgtaatcaccgagccgaaaaaagcgtttcaggctttgcaatactgtatctatgaaatggaacggcgctatgcctgccttgattcaatgggggtgcgggacatacgcaattacaacaaacgcattaaggaaagaaacatagcccaggaacatatgccctatatcgttgtggtcatcgacgagtttgccgaccttatggcgaccaccggtaaggagcttgagtcgactcttgcccgccttgccgcaatgagccgcgccgtgngcattcatctggttctggcgacgcagcgcccctcaattgacgttatcaccggccttataaaatcaaatatccccagccgcatcgccttcatggttgccaacagattgacagccgtataa

SEQ ID NO: 26560 - protein, 277 aa, Unknown
  Obtained from environmental sample
  DOMAIN (56)...(251): FtsK/SpoIIIE family
  misc_feature (1)..(277): Xaa is any amino acid
MFELLPAPGVKLSRIVNLQDNIALRLAASSVRIVAPIPGKHAVGIEVPNAKRHIVSFREIIESELQREGKRPEIPVVMGKDVSGDTALSVDLTKMPHLLIAGTTGSGKSVCVNSLILSILYQLPPSECRLILIDPKIVELKLYNDIAHLLTPVITEPKKAFQALQYCIYEMERRYACLDSMGVRDIRNYNKRIKERNIAQEHMPYIVVVIDEFADLMATTGKELESTLARLAAMSRAVXIHLVLATQRPSIDVITGLIKSNIPSRIAFMVANRLTAV

SEQ ID NO: 26561 - DNA, 405 bp, Unknown
  Obtained from environmental sample
  misc_feature (1)..(405): n is a, c, g, or t
gtgggcgcggaaaaacttttgggcaagggcgacatgctttacgcgggaattacagatcccttcccgatccgtatgcagggggcctttgtatccgaggaggaagttgaggcggtggtcgcccatgttaaaacattcggcgaacctgattatattgatgatgaaatattttttgatgaggaagaggaagaagcggagccgtcccttttctccggcgcggatgaccctctgtacgaaaaagccctggagatcgtcatgcagcagggaaaggccagcgccagttacatacaacgccgcctgaaaatcggctacaaccgcgccgcccgccttgtggaagaaatggaacacaggggcgtcgtcggtccggcgcaaggctcaaaaccgagggaactactgcggggcgtgtaa

SEQ ID NO: 26562 - protein, 134 aa, Unknown
  Obtained from environmental sample
  misc_feature (1)..(134): Xaa is any amino acid
MGAEKLLGKGDMLYAGITDPFPIRMQGAFVSEEEVEAVVAHVKTFGEPDYIDDEIFFDEEEEEAEPSLFSGADDPLYEKALEIVMQQGKASASYIQRRLKIGYNRAARLVEEMEHRGVVGPAQGSKPRELLRGV

SEQ ID NO: 26563 - DNA, 531 bp, Unknown
  Obtained from environmental sample
  misc_feature (1)..(531): n is a, c, g, or t
ttgcagttaacggtgcgcggcacgccttccctgtatcagggcgacgaggcgggaactggcaatgtaaaattaaattctattaatgaaatcaccgatgtcgaaagcaaaggtctttacgcggaattgataaaaaccataccgcccgataaggcgttccggcagatacttgcaggaacccgcgatcatgcccgcgcccccatcgactgggaggaacacgagcgtcagcgcaatacggcggattcggtatggtgtttttaccgggatcttatcgctttacgccgttcatcgcgggcgctcatttacggcgaactggaattcctaaatccgcgtgacaaaaatttattgagttatatccgccgctccgaaaccgaatgttttttcattgaggcaaaccttagtcctgtcaagcgtaaaagcaaggcaaaagccggcgctgttctgaagttcggcagttatggcaagccggcggacaaggtactgcgcccatacgaagcgcgtgtatattccgtgctcttacacgccccgcagtag

SEQ ID NO: 26564 - protein, 176 aa, Unknown
  Obtained from environmental sample
  misc_feature (1)..(176): Xaa is any amino acid
MQLTVRGTPSLYQGDEAGTGNVKLNSINEITDVESKGLYAELIKTIPPDKAFRQILAGTRDHARAPIDWEEHERQRNTADSVWCFYRDLIALRRSSRALIYGELEFLNPRDKNLLSYIRRSETECFFIEANLSPVKRKSKAKAGAVLKFGSYGKPADKVLRPYEARVYSVLLHAPQ

SEQ ID NO: 26565 - DNA, 888 bp, Unknown
  Obtained from environmental sample
  misc_feature (1)..(888): n is a, c, g, or t
gtgcatattttgatgaaggtggaaacccataaccacccaacggcaattagccccttccctggtgcagcaaccggaagcggcggcgaaataagagacgagggcgcaacaggcataggttcaaaacccaaagcaggcttgtgcggattctctgtttccaatttaaaaatacctggatatattcagccttgggagcgtgactttggaaaacccggccgcatagaaagccctttgcaaataatgattgacgggcctctcggagcggcggcttttaacaatgaatttggcagaccaaatatctgcggttattttagaacttatgagcaagaggtgaacggaaaaattcgcggctaccataagcccataatgcttgcaggcggaataggaaacataaaagctcgccacgttcaaaaaggctctctcaaagaaggcgatttgttaattgtgctgggcggccctgctatgctcattgggctggggggaggggcagcaagttccatggcaaccggaagtggcggtgaagatttggattttgcaagcgttcagcgcggcaatgcagaaatgcagcggcgttgtcaagaggttatagaccggtgctgggctttggaagaaaaaaatcccatagcctttatccacgatgtgggggcaggcggtctttcaaatgcactccccgaattggtgaaagacgctggctttggcggcaaattccgtttgcgcgatattccaagcgaagaaagaggaatgagccccttggaaatatggtgcaacgaggctcaggagcgttatgtgctggcaatttccaaagaaagcctgccaacattcaaagaactatgcgaaagagaacgctgcccctttgccgtagcaggcgaagccataacggaacagaattaa

SEQ ID NO: 26566 - protein, 295 aa, Unknown
  Obtained from environmental sample
  DOMAIN (1)...(131): AIR synthase related protein, N-terminal domain
  misc_feature (1)..(295): Xaa is any amino acid
MHILMKVETHNHPTAISPFPGAATGSGGEIRDEGATGIGSKPKAGLCGFSVSNLKIPGYIQPWERDFGKPGRIESPLQIMIDGPLGAAAFNNEFGRPNICGYFRTYEQEVNGKIRGYHKPIMLAGGIGNIKARHVQKGSLKEGDLLIVLGGPAMLIGLGGGAASSMATGSGGEDLDFASVQRGNAEMQRRCQEVIDRCWALEEKNPIAFIHDVGAGGLSNALPELVKDAGFGGKFRLRDIPSEERGMSPLEIWCNEAQERYVLAISKESLPTFKELCERERCPFAVAGEAITEQN

SEQ ID NO: 26567 - DNA, 870 bp, Unknown
  Obtained from environmental sample
  misc_feature (1)..(870): n is a, c, g, or t
atgactatgaagaagaaaggattgtttgcgattctggcggtactcgccgtattcgcgctggtcatgacgggatgcgatactggcggcggaggcggagatacaaagtacacggttacgtttgacgttaacggtgcaaccggcggaacgggtcctgcagacataacgcaggcatctgtaggcgccaatataacgatacccgacagtaatctgaccaaagaccccgcagtgttttcaggttggaataccaaaacggatggtacaggaactacttacgctgtcggcgctacctttaaacctaccaaaaacaccattctctatgcaaaatgggaatctgtgggaaccacagaagaagtatccctgacgaacgccatgcaggtaatttactattttcaactgccctcaaacaaaacatggggtgattataaagagataactgcagactatatgttcccaaatgacgaagattttgaggcggaaaattccggaagagcaatccgcttgtacggtaattatgacattgatttctttagcattaacgaaacaaccgccggaaacaaatatgcctatgccgccttggctggcactctcaataacaatgcatatattatggctcaagaaggcggcgattggaaacctttagctgacgagttgataaagctgttaggcgagtgccccacaggcggtgactggtttaccattaaatacaccattgacggttcaaagtcaaaccaaaaaccgcatccgcatttaccgagtgctacagacaaaggcaccttcattttcggtctcggtttaccgggcgccggtggtataaatactttccagcttaagaatgtgaagctggtcggcactgttgccgcagatacctaa

SEQ ID NO: 26568 - protein, 289 aa, Unknown
  Obtained from environmental sample
  SIGNAL (1)...(19)
  misc_feature (1)..(289): Xaa is any amino acid
MTMKKKGLFAILAVLAVFALVMTGCDTGGGGGDTKYTVTFDVNGATGGTGPADITQASVGANITIPDSNLTKDPAVFSGWNTKTDGTGTTYAVGATFKPTKNTILYAKWESVGTTEEVSLTNAMQVIYYFQLPSNKTWGDYKEITADYMFPNDEDFEAENSGRAIRLYGNYDIDFFSINETTAGNKYAYAALAGTLNNNAYIMAQEGGDWKPLADELIKLLGECPTGGDWFTIKYTIDGSKSNQKPHPHLPSATDKGTFIFGLGLPGAGGINTFQLKNVKLVGTVAADT

SEQ ID NO: 26569 - DNA, 948 bp, Unknown
  Obtained from environmental sample
  misc_feature (1)..(948): n is a, c, g, or t
gtgatgcgcttttcgcacagggagcgtcatcatgtttttatcgagccggaaggacttgcaactaacgagatgtacatgaacggcgcgtccagttccctgcccgaagacgtgcagagcgattttattcacagcatccgagggcttgagaaggcgcacatagtccgccccggctatgcggtggagtacgattacattgatcctctcgatctttttccatcgctggagtcaaagcgcctgtccggttttttcaccgcgggtcagaccaacggttcttccggttatgaggaagccgccgcccagggaataatcgccggaatcaacgccgcgatgaaaatgcagggaaagccgccctttatcctcggccgcgccgaagcctacatcggcgtgcttgttgacgatcttaccacgcttggaacaaaggaaccgtaccgcatgtttacaagccgcgccgaacaccgtttaatgctccgccacgacacagccgacacaaggcttactcccaaagggcgagaagccggccttgtagacgacgcccgctgggaacactttttggaaaagacaaaaaaactcgacgaaataaaagaacttcttgcacagcgaaaagctgacgaagtttcagctaacgcgcttgaaggcaaggagcttgaaagcaaaacgtttgcaggcaagtcccttgccgactatcccgcggaactggtggagcgcgctcttttggacaaaaagtatgcgggctacatcgaaaaggaaatccgtttcgccgcaaaagccgccaaaatggacgcgattaaacttaatcctaatacggactactccgccgtcagcggactctcgtcagaggcaaaagagaaactccaatccgtgaagtcgttaaacgtgggacaagcggcgcgaatcccgggcgtaaggcagggggatatagctatgttaattattctggcaaggaaatga

SEQ ID NO: 26570 - protein, 315 aa, Unknown
  Obtained from environmental sample
  DOMAIN (1)...(116): Glucose inhibited division protein A
  misc_feature (1)..(315): Xaa is any amino acid
MMRFSHRERHHVFIEPEGLATNEMYMNGASSSLPEDVQSDFIHSIRGLEKAHIVRPGYAVEYDYIDPLDLFPSLESKRLSGFFTAGQTNGSSGYEEAAAQGIIAGINAAMKMQGKPPFILGRAEAYIGVLVDDLTTLGTKEPYRMFTSRAEHRLMLRHDTADTRLTPKGREAGLVDDARWEHFLEKTKKLDEIKELLAQRKADEVSANALEGKELESKTFAGKSLADYPAELVERALLDKKYAGYIEKEIRFAAKAAKMDAIKLNPNTDYSAVSGLSSEAKEKLQSVKSLNVGQAARIPGVRQGDIAMLIILARK

SEQ ID NO: 26571 - DNA, 1026 bp, Unknown
  Obtained from environmental sample
  misc_feature (1)..(1026): n is a, c, g, or t
ttgtctttattctcaacaattatgccaaccaatataacaactttagttttaatgttgccaaccttgccgcttatgtttatacggctgttaaattacctgtgcttattctggatgatacaggcgatattatgctctgcaacactggcttctgaaagttttttcaggaaaaacaccgaacagcttactaaattaaaattgtttgacctgtttgattttgcggataactcgttatctgacgcttcattgtcattgcaccgtaataaaaaagacgcgacagttttcaactgcgacgccgtttgccgcgtcgaagggcgaaaatgccaaatttcgctgaattatgtttatgataaatttgacgaaatgatatgcactgtcgtgatagtgacagacatcacggaaaaagaagatctgatacgccagcttaacgaatctcacgtcaagattgagcaatttaacaaagaacttcagtccgaggttgacaggcagacagaaagcatccggaatcttcaaaaagcgattgtatattcgatgagtgatttaatagaaaagaaagacggttacacgggggtgcacacaaaacgggtaagcgaatatgtagctattttactgcgggaattggcgcgtcgcggctatcagtttaccgaatccgaaattcaaagaatggcagaatcttccctgttacatgatatgggaaaaatagctatacccgacagtatacttcttaaaaacggaaaattaaccgatgacgagtttgatgtaatgaaaagccacagcgcgaaaggcgcggattccctgcaaaattcaatgcagttcgccaaggataacgattttttgaaaaacgcgttcataatggccaagcatcaccatgaaaagtggaacggaggcggctatcctgacgggaaaaaagaaaatgagataccccttcttgcccgtgtaatagccattgcggacgtttatgacgcgctgcgttcgcagcgttcttataaatcggcgttcagccgcgaaaaacaaaatcaatcattctga

SEQ ID NO: 26572 - protein, 341 aa, Unknown
  Obtained from environmental sample
  DOMAIN (188)...(322): HD domain
  misc_feature (1)..(341): Xaa is any amino acid
MSLFSTIMPTNITTLVLMLPTLPLMFIRLLNYLCLFWMIQAILCSATLASESFFRKNTEQLTKLKLFDLFDFADNSLSDASLSLHRNKKDATVFNCDAVCRVEGRKCQISLNYVYDKFDEMICTVVIVTDITEKEDLIRQLNESHVKIEQFNKELQSEVDRQTESIRNLQKAIVYSMSDLIEKKDGYTGVHTKRVSEYVAILLRELARRGYQFTESEIQRMAESSLLHDMGKIAIPDSILLKNGKLTDDEFDVMKSHSAKGADSLQNSMQFAKDNDFLKNAFIMAKHHHEKWNGGGYPDGKKENEIPLLARVIAIADVYDALRSQRSYKSAFSREKQNQSF

SEQ ID NO: 26573 - DNA, 390 bp, Unknown
  Obtained from environmental sample
  misc_feature (1)..(390): n is a, c, g, or t
atgaacagactctattttgcgctggttttaacgcttttattttccgcttgcgcgtcaacaataaatataagccaagatttgtccccagccgaattgattcaacgcgcccatgaagccatggacaggaatcgttacaaaatagcaatacagtattatcaggctttgcatgaccgtaacccaagtaatatagaccttattataacggctgaatatcatattgcgtttatcaattataaacaaaaaaaatacgaacaggccaaagagggctttaacggcattctggcgtattatgatactccggatgaagaactcctccccaaacattttaaacggctttcccaaatagtccttaacaacattaacgaaaagcaaataaaaaataagaaataa

SEQ ID NO: 26574 - protein, 129 aa, Unknown
  Obtained from environmental sample
  SIGNAL (1)...(24)
  misc_feature (1)..(129): Xaa is any amino acid
MNRLYFALVLTLLFSACASTINISQDLSPAELIQRAHEAMDRNRYKIAIQYYQALHDRNPSNIDLIITAEYHIAFINYKQKKYEQAKEGFNGILAYYDTPDEELLPKHFKRLSQIVLNNINEKQIKNKK

SEQ ID NO: 26575 - DNA, 306 bp, Unknown
  Obtained from environmental sample
  misc_feature (1)..(306): n is a, c, g, or t
atgccgctttcaaacgaggttgaattaaaaaccgctgaaatccgcgaaatttatattgatttttataaggatgaaccgtttattcggatacttccgtccggtcttaccgcagccaccaaccgggtgcggatgtcaaattactgcgacatttccgttcatgttgacattaacggctccacgctgataataaccgccgccattgataatatggttaaaggcgccgccggtcaggccgttcaaaatatgaacattttattcggttttgacgaaaaagccggtcttgacgcgataccgagtattttttag

SEQ ID NO: 26576 - protein, 101 aa, Unknown
  Obtained from environmental sample
  misc_feature (1)..(101): Xaa is any amino acid
MPLSNEVELKTAEIREIYIDFYKDEPFIRILPSGLTAATNRVRMSNYCDISVHVDINGSTLIITAAIDNMVKGAAGQAVQNMNILFGFDEKAGLDAIPSIF

SEQ ID NO: 26577 - DNA, 702 bp, Unknown
  Obtained from environmental sample
  misc_feature (1)..(702): n is a, c, g, or t
gtggaggaatttgttgttgagcatatcagtataatcataatgaaaaatgtgttaataacaattcaggaaatacccggcgactcattcggggatatcaggaaacggattttgggaaacatcgggcggatccgtaaaatggggacggactatcttgcctattcattgattgacactgtagttgacgaatatttcattacattgcagcattttgaagacgatattgaagaccttgaagatcgcgccacaaaaacagataatgacacgttcatatcagaaatacaggatacaaagaaatacatttttcagataaaacgggcaatgctcccgttgagggagaaccttatgattatttcccgacaggatatgctgtcagtaaacgaagaattgaggccattccttcaggacttgcgggaaaatttatcaaacgcgatagtctccgtagagacctaccgtgaatggctgacaaacataatggacgtaaacctttcggttttgtcataccaattaaacaaggtgatgaaaatactggctgtaatatccgcgatatttattccattaacttttatcgcggggatatacggcatgaattttgaatttatgcctgaaataaggcatcctttgggctatcctattgtgcttggatgtatggtatctattgcgctggcaatgctcatcttatttaaaacacggaaatggttttaa

SEQ ID NO: 26578 - protein, 233 aa, Unknown
  Obtained from environmental sample
  DOMAIN (1)...(233): CorA-like Mg2+ transporter protein
  misc_feature (1)..(233): Xaa is any amino acid
MEEFVVEHISIIIMKNVLITIQEIPGDSFGDIRKRILGNIGRIRKMGTDYLAYSLIDTVVDEYFITLQHFEDDIEDLEDRATKTDNDTFISEIQDTKKYIFQIKRAMLPLRENLMIISRQDMLSVNEELRPFLQDLRENLSNAIVSVETYREWLTNIMDVNLSVLSYQLNKVMKILAVISAIFIPLTFIAGIYGMNFEFMPEIRHPLGYPIVLGCMVSIALAMLILFKTRKWF

SEQ ID NO: 26579 - DNA, 885 bp, Unknown
  Obtained from environmental sample
  misc_feature (1)..(885): n is a, c, g, or t
ttgtcttcggtaagcgggcagatagctcttgcagccgaaggaagcgcatccaaaggtacaatggttgcaagtgccaccgagcaaacggcaaccaacataaattctatagcgagcagtgcagaagaaacctccgtttgcgcgggagaggtagcgcacgaagttgaacaactatcagcaaacataagtgctatggcaagtacagccgaagaaacctctgtgaatgcgggtgaggttgcaggtgctgcagagcagatgtctgtgaatatgaacaccatagcctctgccattgaagaaatgagtgcaagcataggtcaaatatccagcaatgcaggcgaagctggaaaagttgcaagtgaagccacatctaaatctcataatgccaccaacgttatgaacaagctcggtattgccgcaaaagaaatagggcaggtgaccgatgttataaaaaagatagcagacaaaacaaatttgctcgctctaaatgcgaccatagaggcagcgagcgcaggtgtggcagggaagggctttgcggttgtggcgggcgaaatcaaggagcttgccaaccaaagtgccgctagcgcaaacgatatcgctcgccgcatagaaagtattcaagcgggcacccgcgaggctgtggctgtgatagacgatgtttccaatattataacagcaatcaaccacagcgtggaatccatatctgccagtgttgttgaacaaaccaaggcgagcaatgaaatagcttgncatgttgcagaggcaaataccggagccnaacgagttgcttctgccataggcgaggtagccaaaggtagcagggacatagctcgcaacgtgggcgaagcggcaaagggaacaagccaagtaatcaaagctcaagcgatttag

SEQ ID NO: 26580 - protein, 294 aa, Unknown
  Obtained from environmental sample
  DOMAIN (76)...(294): Methyl-accepting chemotaxis protein (MCP) signaling domain
  misc_feature (1)..(294): Xaa is any amino acid
MSSVSGQIALAAEGSASKGTMVASATEQTATNINSIASSAEETSVCAGEVAHEVEQLSANISAMASTAEETSVNAGEVAGAAEQMSVNMNTIASAIEEMSASIGQISSNAGEAGKVASEATSKSHNATNVMNKLGIAAKEIGQVTDVIKKIADKTNLLALNATIEAASAGVAGKGFAVVAGEIKELANQSAASANDIARRIESIQAGTREAVAVIDDVSNIITAINHSVESISASVVEQTKASNEIAXHVAEANTGAXRVASAIGEVAKGSRDIARNVGEAAKGTSQVIKAQAI

SEQ ID NO: 26581 - DNA, 735 bp, Unknown
  Obtained from environmental sample
  misc_feature (1)..(735): n is a, c, g, or t
atgaaaattgccattattggttacggaaaaatgggaaagatggttgaacggatagccatggatcaggggcataccgttaccgcccttgtagaccccctttcgcaagactcaaatccgccgataggcgcgccgtccggcgcgaaaatgtttcaggaaatcgccgcagcaggagacctctgcggtgctgaagccgcgatagaatttacccaacccggcacggcgcttgccaatatcaaggctctggcggacaagaaaattccctcggtcattggcactacgggctggtataatcagcttgacgaggcccgccaggcggtagaacaggccggcgcggcgcttatatgggcatccaatttttctctgggcgttaatattttttaccgtatcgcctggcatgccgcgcagcttgccgattcttttcccgaatacgacgtgggcggctttgagtctcatcacaataaaaaactggacagcccatcgggaacggcgaaaactctggtcgaaggggtacttgcccgaatcaaacgaaaagacacagccgtgtgggaaacccttgaccgccgcccacagcccaatgaactgcactttcccagtctgcgcctcggttccatacccggtcagcacagccttgtgtttgactctccggcggacaccatcgaaaatacccacaccgcccgcagccgcgaaagtttttgcctccggcgccgtccgcgccgcccaatggctgacaggtga

SEQ ID NO: 26582 - protein, 244 aa, Unknown
  Obtained from environmental sample
  DOMAIN (122)...(243): Dihydrodipicolinate reductase, C-terminus
  misc_feature (1)..(244): Xaa is any amino acid
MKIAIIGYGKMGKMVERIAMDQGHTVTALVDPLSQDSNPPIGAPSGAKMFQEIAAAGDLCGAEAAIEFTQPGTALANIKALADKKIPSVIGTTGWYNQLDEARQAVEQAGAALIWASNFSLGVNIFYRIAWHAAQLADSFPEYDVGGFESHHNKKLDSPSGTAKTLVEGVLARIKRKDTAVWETLDRRPQPNELHFPSLRLGSIPGQHSLVFDSPADTIENTHTARSRESFCLRRRPRRPMADR

SEQ ID NO: 26583 - DNA, 432 bp, Unknown
  Obtained from environmental sample
  misc_feature (1)..(432): n is a, c, g, or t
gtgctttttcaaaccgggaccggattggcggctggtttgaaaggcagaggggtagagatggacattggatcaataacgtcattccatgcgtttcccactatagaatatgcgataaatgcctcaagcggtgtttctcaaggtgttaaggcatccctgccggtggctccatcggccgctatttacgcgcattttaagcatatttccggcgtaccggctcctgacggggtacaaggggtgaatatcaacaaactgaaaattatcgacacccttattgagcagatttccaaaatgaaaaaacagccggatttttcggatgtacatcagctgagcgatataaacggacaaagtgatgaaaagcgtatcaacgcccttattgataaattccagaaccaggtgcggcaggcggaaacgccagcactcggccgattctga

SEQ ID NO: 26584 - protein, 143 aa, Unknown
  Obtained from environmental sample
  misc_feature (1)..(143): Xaa is any amino acid
MLFQTGTGLAAGLKGRGVEMDIGSITSFHAFPTIEYAINASSGVSQGVKASLPVAPSAAIYAHFKHISGVPAPDGVQGVNINKLKIIDTLIEQISKMKKQPDFSDVHQLSDINGQSDEKRINALIDKFQNQVRQAETPALGRF

SEQ ID NO: 26585 - DNA, 972 bp, Unknown
  Obtained from environmental sample
  misc_feature (1)..(972): n is a, c, g, or t
gtgtatgttgacgggcgcgtgaccggcggcggcaatgtgggaatgcttgtcgggatgtgcgtcaatacggtgatagacagttgcggggccgcgggcgcggtgcgcggtcggtcgggcgtgggggggcttgtgggcgtcagcgtaggttcgcttataagccgctcatattcaacggcgtcggttgacggatcggagacggaggtcgggggtcttgtcggcggcgcgcgcgggtcgtttttggcgcagtgttattccgccggcaatgtgagcgggtccgcgtatgtgggcggtgttgtcggcagcggcgcgggggggcatatacaagagtgctatgcggttgggagtgttgtcggcggcggggcgacgggcggtttcatcggttcggcggtcggcggtatgtgcgtgttgcgcggttactccgccggttatgtgaccgggatcgggatagggtcgggcggttttgtgggaacgctcggcggtagcgggggcggtttttcgggcggcgtagtctctatatcggattgttactgggatgtggagcggtcggcgaaaggcgtgtccgccggcggtgctggcaggggtacggcggagatgttgttgagggatacgtacgcgggatggaatttttcggaagtttgggatataggcgaaggcgggtacccgtggctgaggggccttgtgccggaggcggttccgggcgtttcttttgagaagaagcgcgttgttatgccgtttgttgtttccggcaagccgcttgtgcgtgtggtaggcagggcgatttacgtgaacgcgcctaagggcgatgcggtgcggatcaagttgattgacatgaggggaaaaacggtcgcgaggtacgatgtggtcggtacgaagaagctgtcgttggataagttggcgtcaggtaggtacatagtggaggcgaggctgcgcggcaggcgggagtttgtgtcgcctgtgaggatttttaaatga

SEQ ID NO: 26586 - protein, 323 aa, Unknown
  Obtained from environmental sample
  misc_feature (1)..(323): Xaa is any amino acid
MYVDGRVTGGGNVGMLVGMCVNTVIDSCGAAGAVRGRSGVGGLVGVSVGSLISRSYSTASVDGSETEVGGLVGGARGSFLAQCYSAGNVSGSAYVGGVVGSGAGGHIQECYAVGSVVGGGATGGFIGSAVGGMCVLRGYSAGYVTGIGIGSGGFVGTLGGSGGGFSGGVVSISDCYWDVERSAKGVSAGGAGRGTAEMLLRDTYAGWNFSEVWDIGEGGYPWLRGLVPEAVPGVSFEKKRVVMPFVVSGKPLVRVVGRAIYVNAPKGDAVRIKLIDMRGKTVARYDVVGTKKLSLDKLASGRYIVEARLRGRREFVSPVRIFK

SEQ ID NO: 26587 - DNA, 453 bp, Unknown
  Obtained from environmental sample
  misc_feature (1)..(453): n is a, c, g, or t
ttggtaaaaacaagactttatttagacaattgttgttttaacagaccttatgatgatcaaacaaatctaaatattcgcttggaagcagaagcaaaaatctttatacagaatgaaatattagaaaaaagttatgagcttgcatggtcttttatgatggattatgaaatttctgctaatccgttttatgacagacaattagcttttatgaaatggaaaaatatagcaattttagatattgacccagaagaagggttattaataaacagcagagaaataatgaaaaaaaatataaatcaaaaagatgcaatacatattgcttgtgcaataaaagcggaatgtgattattttctaacaacagacagaaaagtactaaataaaaatataccggaaataaagttaataaacccgcttgattttatacgtcaattttacattggaggcgatgagaaatga

SEQ ID NO: 26588 - protein, 150 aa, Unknown
  Obtained from environmental sample
  misc_feature (1)..(150): Xaa is any amino acid
MVKTRLYLDNCCFNRPYDDQTNLNIRLEAEAKIFIQNEILEKSYELAWSFMMDYEISANPFYDRQLAFMKWKNIAILDIDPEEGLLINSREIMKKNINQKDAIHIACAIKAECDYFLTTDRKVLNKNIPEIKLINPLDFIRQFYIGGDEK

SEQ ID NO: 26589 - DNA, 552 bp, Unknown
  Obtained from environmental sample
  misc_feature (1)..(552): n is a, c, g, or t
atgttttcttttgagaatataatttatatgaaattcggttaccatgctgaagaaggtgaagatagtattattaagcggaaacagatggagtttgaaaatgcaggtagaatattttggggttatggaggtgttatatgccatccattgaagcaagttcaaccattcgtaggaaatgtgaataaacgtaatttgaaagcatatttggcgatgagctttactccttcaaaaccattaataaatgggatcaaagcggaggagtattcaatagatggagtaaattgggatagtttgccaaaaggaattattgtcaagggttcaaaatatgcaattgtctgttccaggctatatacaataaatgaagaaataaatttatatgattataatatcgctattggtcaatcagaaggaaaaaatgcaggtgactatattcgctacagagtagacaagggctgtttaacaagaaatcttgattttcaacaaagaaaatcggatataaaagaaattaaattgtatgctgaaataatatatccatatgcagtttttattagatga

SEQ ID NO: 26590 - protein, 183 aa, Unknown
  Obtained from environmental sample
  misc_feature (1)..(183): Xaa is any amino acid
MFSFENIIYMKFGYHAEEGEDSIIKRKQMEFENAGRIFWGYGGVICHPLKQVQPFVGNVNKRNLKAYLAMSFTPSKPLINGIKAEEYSIDGVNWDSLPKGIIVKGSKYAIVCSRLYTINEEINLYDYNIAIGQSEGKNAGDYIRYRVDKGCLTRNLDFQQRKSDIKEIKLYAEIIYPYAVFIR

SEQ ID NO: 26591 - DNA, 366 bp, Unknown
  Obtained from environmental sample
  misc_feature (1)..(366): n is a, c, g, or t
atggaattatgtaaacatgcgccaagttggggaatcgcactacttccttttgcccacaaagaagattggagtagaaatgcaatgtataatattcaatgtttcttaacaggaaatggatatgtcgtatcagaaatgattagggaaattcatcaatatcatcttgatgataggccaaatttgatgtcatcaaatgttattgttgatagaataaaaaatatagaccctccattttctaaaattagaatagaagatgataagttattgcacttttatggtagttctacagattctatgcctgagtatgtttcgaaggatggttatcttgtatataaaaatggaaagaaaataccgatagaagggaggtaa

SEQ ID NO: 26592 - protein, 121 aa, Unknown
  Obtained from environmental sample
  misc_feature (1)..(121): Xaa is any amino acid
MELCKHAPSWGIALLPFAHKEDWSRNAMYNIQCFLTGNGYVVSEMIREIHQYHLDDRPNLMSSNVIVDRIKNIDPPFSKIRIEDDKLLHFYGSSTDSMPEYVSKDGYLVYKNGKKIPIEGR

SEQ ID NO: 26593 - DNA, 1056 bp, Unknown
  Obtained from environmental sample
  misc_feature (1)..(1056): n is a, c, g, or t
ttgccgtacaaaatccaagcgcccaaatcaataccggaaggggtttttatgttaaaggctggtaagaaatcgacggcggcgttatccgtactgtcggcgtttatcatcatcctcgtctccgcgtcggctgtccgcgccgacgccgagtttgataacctctactccacgcggaagtacaaagaggcattggcctacgcggaagagaaactgccctacaacaagcgcgatccgcagctttggattaagattgggcatataaacgaggcgctcggctttattgagaaggcgctggcctgctacatggtggcttggcgtagcatgccggacgattataacgcgctgtacggcattgcccgcgtgtacaacaagatggagcagccggaagacgcggcggctatggcggagcgggcgctaaaggtaaattttacggcggatgtcagctgggagtacgctaaagcctgcatagcgttaaagaggcccgccgacgccaagagggcgcttgaaaaggtcatttccacagattcttcaaacgttatcgccaaccgcgagttgggcaatatctactattccggcggggagtacgccaacgccattccgcttatgaagcgctcctacaaagagaaggccgacggcgaggtggccttcaggataggcagggcgtacgtggaggccggcgttccggacagcgccttggtctacctgaaaatcgccgtggaccgcaagtcgaacgtttcggaggcgtcgcgtttcatagcccgcgcgcggttcgggcagaagaagtcggcgaggtcatttccgggtactcgaacgtctcgcaggatcttatggacgccatggatttttatatgttcgcctttgccaaggagaagaccaacgacgccgccggcgcgtccgtggcctacaagtcggcggtggcgatgttcgggaacgacaagaggaaagaggctctcttggctcgcgccaatgtcgcgcgggcgcagctcaagagcaaggccgtctccttcgcgtttccgcacttgcagtttatcgcggcggcggatgagaagggcgccgtag

SEQ ID NO: 26594 - protein, 351 aa, Unknown
  Obtained from environmental sample
  misc_feature (1)..(351): Xaa is any amino acid
MPYKIQAPKSIPEGVFMLKAGKKSTAALSVLSAFIIILVSASAVRADAEFDNLYSTRKYKEALAYAEEKLPYNKRDPQLWIKIGHINEALGFIEKALACYMVAWRSMPDDYNALYGIARVYNKMEQPEDAAAMAERALKVNFTADVSWEYAKACIALKRPADAKRALEKVISTDSSNVIANRELGNIYYSGGEYANAIPLMKRSYKEKADGEVAFRIGRAYVEAGVPDSALVYLKIAVDRKSNVSEASRFIARARFGQKKSARSFPGTRTSRRILWTPWIFICSPLPRRRPTTPPARPWPTSRRWRCSGTTRGKRLSWLAPMSRGRSSRARPSPSRFRTCSLSRRRMRRAP

SEQ ID NO: 26595 - DNA, 810 bp, Unknown
  Obtained from environmental sample
  misc_feature (1)..(810): n is a, c, g, or t
atggacgccatggatttttatatgttcgcctttgccaaggagaagaccaacgacgccgccggcgcgtccgtggcctacaagtcggcggtggcgatgttcgggaacgacaagaggaaagaggctctcttggctcgcgccaatgtcgcgcgggcgcagctcaagagcaaggccgtctccttcgcgtttccgcacttgcagtttatcgcggcggcggatgagaagggcgccgtagtgaacgatatctatttccttttggccgaagcgtacgtggagtctaaggacatcccgaaggctatatcgagcttggaaaaagcaatatccataaactcgcgcaacgtagaggcttacgcgaggctggccgagctttacgagaagaacgggcagagcgacagggccaagaagatctacgagcagatgatggcgataagccccaacgaccccaaggttttcgttacgctgggcaactacaacatcaaggccaagaagtggaaagacgccgtcacgatgtttgagaaggccaacaacctcaaggagacggcccccgcctttgagggcatcgccgtggcctactatggcgccggcgacatgggcaaggcggctttggcggcggcgaagagcgccatagcccttgatccggacgccatagaggcgcgcgcggtaatgacgcgggtgctcatggacgataagaactacaaggccgctcaggaacacgcggagtttttgagcaagaaagccccgaacaacctcgagtatttgaggatgcttgccgagtgctgcgagaaaacgacgctaaagccatgctggcggtag

SEQ ID NO: 26596 - protein, 269 aa, Unknown
  Obtained from environmental sample
  DOMAIN (79)...(112): Tetratricopeptide repeat
  misc_feature (1)..(269): Xaa is any amino acid
MDAMDFYMFAFAKEKTNDAAGASVAYKSAVAMFGNDKRKEALLARANVARAQLKSKAVSFAFPHLQFIAAADEKGAVVNDIYFLLAEAYVESKDIPKAISSLEKAISINSRNVEAYARLAELYEKNGQSDRAKKIYEQMMAISPNDPKVFVTLGNYNIKAKKWKDAVTMFEKANNLKETAPAFEGIAVAYYGAGDMGKAALAAAKSAIALDPDAIEARAVMTRVLMDDKNYKAAQEHAEFLSKKAPNNLEYLRMLAECCEKTTLKPCWR

SEQ ID NO: 26597 - DNA, 690 bp, Unknown
  Obtained from environmental sample
  misc_feature (1)..(690): n is a, c, g, or t
atggttttgtatataattaaaagagcggcgttcgtcgtcattactcttttgtttatcatttgtttaacttacattctgatgaatacggttcccggcggtccgtttttgggtgaaaaagccatttcgcccagagtattaaaagagctggagcttaaatacgggctggataaaccgcttcccgtgcagattcgtaattatgttttaagcctgctcaagggggacatgggcgtatcgttaaaaatgcagaaaaacaggcctgttaccacaattattaaggaaatgttccctgtttccgcaaaagtgggattttttgccgttttatgggcggttatagtcggtattacattgggctgtctggcggcatattaccgggggaaatggcaggacagtcttttacaggtactcactacgctcggcatagcttttccggcatttgtaatagctacggcgttattgatacttttcgcgggaggcgtgtttaaattcttccccggttcgggcctgggccggggagcgtccggttttattcttccgtgctttaccctcggactacagccgatgtgttcaatcgcgcgttacacccgttcgtcaatgctggaaactctcggcaagccgtacataaaaaccgcctacgcttacgggctcccggttccgcggatcatcttaaacacgcccctcggccgaatctga

SEQ ID NO: 26598 - protein, 229 aa, Unknown
  Obtained from environmental sample
  SIGNAL (1)...(27)
  misc_feature (1)..(229): Xaa is any amino acid
MVLYIIKRAAFVVITLLFIICLTYILMNTVPGGPFLGEKAISPRVLKELELKYGLDKPLPVQIRNYVLSLLKGDMGVSLKMQKNRPVTTIIKEMFPVSAKVGFFAVLWAVIVGITLGCLAAYYRGKWQDSLLQVLTTLGIAFPAFVIATALLILFAGGVFKFFPGSGLGRGASGFILPCFTLGLQPMCSIARYTRSSMLETLGKPYIKTAYAYGLPVPRIILNTPLGRI

SEQ ID NO: 26599 - DNA, 1269 bp, Unknown
  Obtained from environmental sample
  misc_feature (1)..(1269): n is a, c, g, or t
gtggcaaatggcgcgaaggctgtcaacttcagcattggtgccagaaactacccatatagcacagagcaagacgcgctctattccgccgcgatgcggaacctgctggacaggggctatgacttcgtggtcgtccacgcagctggcaatgagacgcacgatgcaggtctcagcggcttgttcgcgcacatcacagacccagcattgcgacagaggataatcacagtcggcgccgtagacagtgcctaccagatggcctatttcaccaactatgggtctctggtcgatgttgtggcgccaggcgtgagtgtctatagcagtgtagcggaaagcgattcatcgtatgccaactacaacggtacttcaatggccgcgccccacgtcactggcctggcgggtcttgtgtggtctgcggatcctggtctcacggggcccaaggtgaagcaggtcattgtcgattccgcgctggagagcggccgcgcaatatacgacaacaggtctgatgtcccttccagtgcgcgacggacgtattacttcgtcaacgccaaggcggcggttgacagagttgtcggcggtgcaaacgtcttggtcagtggcatcacactggacaaaacggcaacaaccatcggcacaggcgcactcgacaccttggtggccacaatccagccgagcaacgccacaaacaagaacgtcacatggtcaaccagcaacgccaacgtcgccacggtcagcgcggcgggcgtggtgacggcaaccggcaggggcaccgccacgataacggccacatctgtcgccgaccccaccaagacagccgcctgcgaggtgacgctggtgaacgtgtacgtgtcaagcgattacgacaacgacaccggtgctgcaaggatactgaaaaacggctcgggttcgcccttggaacggttgtccagcgaaaacctttcctatcccagtgaatcaaacatggttttcgtgacagaaagcggagacgtgtacgcgacaggtgtcacgggggaagagatcatcagccagaacaggtatgtccagtgcctgcgcgtgtggaagaacggcctagtccaccagaccatacgcaacgaggcatttcacgactattcgtataaccgacagggcgggctgatgttccaggcaaactcctttctttgtcaccggcgccagcgatgtattactggcgggcatatccgtcagttctccccgttccctctcggcgaccaatctaatgctcctggaagaaccggcttccagcaaaccattgaataa

SEQ ID NO: 26600 - protein, 422 aa, Unknown
  Obtained from environmental sample
  DOMAIN (195)...(274): Bacterial Ig-like domain (group 2)
  misc_feature (1)..(422): Xaa is any amino acid
MANGAKAVNFSIGARNYPYSTEQDALYSAAMRNLLDRGYDFVVVHAAGNETHDAGLSGLFAHITDPALRQRIITVGAVDSAYQMAYFTNYGSLVDVVAPGVSVYSSVAESDSSYANYNGTSMAAPHVTGLAGLVWSADPGLTGPKVKQVIVDSALESGRAIYDNRSDVPSSARRTYYFVNAKAAVDRVVGGANVLVSGITLDKTATTIGTGALDTLVATIQPSNATNKNVTWSTSNANVATVSAAGVVTATGRGTATITATSVADPTKTAACEVTLVNVYVSSDYDNDTGAARILKNGSGSPLERLSSENLSYPSESNMVFVTESGDVYATGVTGEEIISQNRYVQCLRVWKNGLVHQTIRNEAFHDYSYNRQGGLMFQANSFLCHRRQRCITGGHIRQFSPFPLGDQSNAPGRTGFQQTIE

SEQ ID NO: 26601 - DNA, 606 bp, Unknown
  Obtained from environmental sample
  misc_feature (1)..(606): n is a, c, g, or t
atgcagtctgtcgctcccaaaataaaggaactgcaggaaaaatacaaggataaccgccagaaaatgaatgtggaaatggctgagttgtacaaaaaagaaggttacaacccgctttccggatgccttcccatgctgctccagattcccattttcttcgctatgtataatctttttaacaatcattntgatctgcggggcgcgatgtttatccccggctggattcccgatctttcactgcctgagtcgatttttaattttccatcagattttcggctgccgctgcttggctggaccgcgctgcgtcttttgccctttatctatcttggttctcaactgctctacggcaaagtgacacagactcccgatcagaaaagcaatacccagatgaaaatgatgttatatgttatgccggcagttttcttttttatcctgtacgatgtgccgtcgggcctgttgatatactggattttctccaacttgcttaccatggttcagcaggtggcgattaacaagtacattgctccccggcgggcggcggaagcggcgcagcgagcggcaaattccgcgccgactgtcaatgtaccgccaaagaagaaaaagcgttaa

SEQ ID NO: 26602 - protein, 201 aa, Unknown
  Obtained from environmental sample
  DOMAIN (1)...(174): 60Kd inner membrane protein
  misc_feature (1)..(201): Xaa is any amino acid
MQSVAPKIKELQEKYKDNRQKMNVEMAELYKKEGYNPLSGCLPMLLQIPIFFAMYNLFNNHXDLRGAMFIPGWIPDLSLPESIFNFPSDFRLPLLGWTALRLLPFIYLGSQLLYGKVTQTPDQKSNTQMKMMLYVMPAVFFFILYDVPSGLLIYWIFSNLLTMVQQVAINKYIAPRRAAEAAQRAANSAPTVNVPPKKKKR

SEQ ID NO: 26603 - DNA, 921 bp, Unknown
  Obtained from environmental sample
  misc_feature (1)..(921): n is a, c, g, or t
gtggtttcatggaaacttaaaaacacaaaagataataatgatcttgtagaaatggttctttcggaaataaatgaagcccatgcgtttaccgtcgcctttggcggtttgggcgctcagccgctttcatcattgttttatgtgaatcgcgtttcggaatattcggtggaattttaccgggacttttccattcccaataatgaagcggcgcgctttcgcctgataaaacggtatgactttaaaccccgggattatatgtttgagcttaccatttccctggatggcggctataccgtgccgggcttcaattttggcggcagcgcgtataccctttcctttggcccccagatagggccgcactttgtaaaactcgataaccgttacgactaccgccagtacattacctttaacggccgcaaacgaaaaatggaaaagccgggcgaatcggcaatcatcggcacaaatcccacatgggcggcaatttccggcaaatattttgcctgtatcgccattccgttgcttgcccagtatgatataaatttttccgaaagacccgagccgggtattccctccgcgtcgcggcttaacattatacgtccggtgttgaacagccctcgtgcggaagataaatattatttctatctcggccccaaaaatcaggatacgcttaacctttataacaatggggacaacggtttcggcctgaccgataagcagcttattgaagtcgccaataccaggggcatattaagtccattggaaaaaatccttaaatggctgcttcttgttttttacaaaccggtacacatattacggcgttgccataattttattaacattatttgtcaagatagttttctttccccttaccaaaaaatcgtccgaggcgaccttggcgtatgcagtctgtcgctcccaaaataa

SEQ ID NO: 26604 - protein, 306 aa, Unknown
  Obtained from environmental sample
  misc_feature (1)..(306): Xaa is any amino acid
MVSWKLKNTKDNNDLVEMVLSEINEAHAFTVAFGGLGAQPLSSLFYVNRVSEYSVEFYRDFSIPNNEAARFRLIKRYDFKPRDYMFELTISLDGGYTVPGFNFGGSAYTLSFGPQIGPHFVKLDNRYDYRQYITFNGRKRKMEKPGESAIIGTNPTWAAISGKYFACIAIPLLAQYDINFSERPEPGIPSASRLNIIRPVLNSPRAEDKYYFYLGPKNQDTLNLYNNGDNGFGLTDKQLIEVANTRGILSPLEKILKWLLLVFYKPVHILRRCHNFINIICQDSFLSPYQKIVRGDLGVCSLSLPK

SEQ ID NO: 26605 - DNA, 990 bp, Unknown
  Obtained from environmental sample
  misc_feature (1)..(990): n is a, c, g, or t
gtgaaggggggacgatacctttcgggcgaaggggcgcgttgcttctcaggatgcttttggttgataaactggggtataaatccggtttccgcaaacctggaatccgttgcttccgatcttcccgcccttgcgtctgaattcagcaagtggaacggagtggatcttatcgccgcatattaccaccctgatcttgggttattgatagccaatcccaaaatagccgaggagctggcaaattttggcatgcttcgcaaaagagagctattggttttatatgccggtaagggcgccaaccccgcggatgcgagctgtcaaaaggcagcggaactggcggttaagctttttgaaggcaagaaagccaaggcgtcgtcggaccttttgcagggcgaattcaccgtaaaagagctcaagaagagcaaggaagaaacggaagaaaaagccgaaggagaagcgccggttaaggccgccaaagccaaaaagaaagcgccgggcaggggcaggaaagccgcgtcaaaagccggcgcaagggcgcagcaagccgccgccgaggaagatgaagaagaagaggaagaagcccctgaagccgcgccaaaagaaggcgcccgcgttgcgccgcctgtggttaccgccgccgctcccgcgatttcaaaaggccctgtgaggatgacgccgatgtattcggtggttgttgccaacgagctcttccataacggaaacgtggaggcctggaaacgcattgtagcaagttataacgccaaatacccggcgcttcaggtgtatatttattatgaaggcgagcgcattctggacattaactccctgtttaagtgggggaaggtgaagcacggaagctcgattcagtttgctgtttccggcaatgatattaaagacgtagccaaattgcagcgttatctggttcagggagccagcaagcagtttgaagcgttcctgcacggccctgtgaacaacgtgtttaagctttttggttag

SEQ ID NO: 26606 - protein, 329 aa, Unknown
  Obtained from environmental sample
  misc_feature (1)..(329): Xaa is any amino acid
MKGGRYLSGEGARCFSGCFWLINWGINPVSANLESVASDLPALASEFSKWNGVDLIAAYYHPDLGLLIANPKIAEELANFGMLRKRELLVLYAGKGANPADASCQKAAELAVKLFEGKKAKASSDLLQGEFTVKELKKSKEETEEKAEGEAPVKAAKAKKKAPGRGRKAASKAGARAQQAAAEEDEEEEEEAPEAAPKEGARVAPPVVTAAAPAISKGPVRMTPMYSVVVANELFHNGNVEAWKRIVASYNAKYPALQVYIYYEGERILDINSLFKWGKVKHGSSIQFAVSGNDIKDVAKLQRYLVQGASKQFEAFLHGPVNNVFKLFG

SEQ ID NO: 26607 - DNA, 366 bp, Unknown
  Obtained from environmental sample
  misc_feature (1)..(366): n is a, c, g, or t
gtggctttcaagaacagagaagggaaaagcatgagcgaatctccatacatttctgcccttctgccagtttggacaggtgccgaatatttggacgaaagcataaacagcatccagtcgcaaacctttacggattgggaactgttcataatcggggaaccggacgggccaaatgaaataaaacatactgcctttagccgcgcagccactgacaacaggataaggtgggtagaaaatgagacacatcttggtttggctgcctctctcaataaaggcattgaacttgcccgaggaaagtacattgcccggattgacgtggacgacatatcatttccggctcgttttgagaaacaagcgcggatcggatga

SEQ ID NO: 26608 - protein, 121 aa, Unknown
  Obtained from environmental sample
  misc_feature (1)..(121): Xaa is any amino acid
MAFKNREGKSMSESPYISALLPVWTGAEYLDESINSIQSQTFTDWELFIIGEPDGPNEIKHTAFSRAATDNRIRWVENETHLGLAASLNKGIELARGKYIARIDVDDISFPARFEKQARIG

SEQ ID NO: 26609 - DNA, 972 bp, Unknown
  Obtained from environmental sample
  misc_feature (1)..(972): n is a, c, g, or t
atgggcattgtggcaatggacgccgcgcaggagcacatttcgctgacggagcacggcgccgctttgtctcacgagtacctgatgcgcgaccaggtggggaccgaggcccactgggcgcctttttcagttacggctccgctggtggcgcaggccacgctggagctgctcacgccggctgtgcaggacacgcaccgcctgctgaggctggcgcagttggcggacgtcgagaccactgacacgatgatgaccttccgcttcggccccggcaccttcgccagggcgctggatgcgggaataacgcttgaagaggcgcgcgcctgcataaagggcggcaacgggcccgagctgccccagccgctggagagcctcatgcagtacctggctgaccgcatgggcgaggtggaggtcgagcagggggtcaggctggtcaagaccaaaagggcagaactggccgcggaactgtgcgtgcgccctgaactggagcagctcgagctagagccgataagcgaaactgtgctgcaggtcaggggtggcggcaacgcctacgcgctgctgaagcaggctggctttgtgcccaagcccgtgcgcttcctgccggtcagcatcgacgagaacgagaggctttacatctggtccatggcctgcctttccctggtcatcgaaaagggcatgagtagctacctggagccggtgcagcagttgataaaggacgccctgcagcgcgtgcagaccaacgaccccgcgctgtttcacgaaatccggcgcagggtgcccatgctgcacccggagggcggctcgcaggcaatggaggaactacagcggatactggagtacgcgggcgagcacgacctgactgtggagataacctacatgcctgtggccaacgagcgcgcgcaggagcgccgcgtcaccccaaaatcatcgagggcgagcaccctgaagcttactgccacctgcacccagagaaaatga

SEQ ID NO: 26610 - protein, 323 aa, Unknown
  Obtained from environmental sample
  misc_feature (1)..(323): Xaa is any amino acid
MGIVAMDAAQEHISLTEHGAALSHEYLMRDQVGTEAHWAPFSVTAPLVAQATLELLTPAVQDTHRLLRLAQLADVETTDTMMTFRFGPGTFARALDAGITLEEARACIKGGNGPELPQPLESLMQYLADRMGEVEVEQGVRLVKTKRAELAAELCVRPELEQLELEPISETVLQVRGGGNAYALLKQAGFVPKPVRFLPVSIDENERLYIWSMACLSLVIEKGMSSYLEPVQQLIKDALQRVQTNDPALFHEIRRRVPMLHPEGGSQAMEELQRILEYAGEHDLTVEITYMPVANERAQERRVTPKSSRASTLKLTATCTQRK

SEQ ID NO: 26611 - DNA, 546 bp, Unknown
  Obtained from environmental sample
  misc_feature (1)..(546): n is a, c, g, or t
ttgaaatttgaaagcggcgctcacagggttcagcgggttccagaaaccgaatctcaggggcgtgtgcatacctcggcggcaacggttgcggttatgccagaagccgaggaagttgatgttgaagttaggactgaggatttgaaagttgatgtttatagggcaagcggagcgggtggccaatacataaacaaaactgattctgcggttcgcataactcatattccaagcggcgtggttgtatcttgccaaaccgagcgtagccaaattcaaaaccgctcaaaagccatggaacttttgcgttcccgcttgctagaccacgctatttccgaaaagcaaaaaaaagaatctgctgaaagaaaaagcctcgttggtacaggagaccgcagcgataaaattcgcacatataattttccacaaaacagagtaaccgaccaccgcataaacttaactctttataacctagacaacatagtaacaggcgatttacaagagataatagatgctctgcacttggcagatgcccagagcaaactggcaagtagttga

SEQ ID NO: 26612 - protein, 181 aa, Unknown
  Obtained from environmental sample
  DOMAIN (33)...(146): Peptidyl-tRNA hydrolase domain
  misc_feature (1)..(181): Xaa is any amino acid
MKFESGAHRVQRVPETESQGRVHTSAATVAVMPEAEEVDVEVRTEDLKVDVYRASGAGGQYINKTDSAVRITHIPSGVVVSCQTERSQIQNRSKAMELLRSRLLDHAISEKQKKESAERKSLVGTGDRSDKIRTYNFPQNRVTDHRINLTLYNLDNIVTGDLQEIIDALHLADAQSKLASS

SEQ ID NO: 26613 - DNA, 549 bp, Unknown
  Obtained from environmental sample
  misc_feature (1)..(549): n is a, c, g, or t
atggcaataattggaattttgcttagaattaccggcagcctttgcatatttctttacggaatgaagattatgagcgagggtattcaacgagccgccggagaccggcttaagcgctttcttaactttatgaccggcaacagattcatggctgtgttgaccggatttgccattactgccattatccagtcttcttccgccactaccgttatggttgtgtcccttgtaaatgcgggattgttgagccttacccagtcaataggcgtaataatgggcgcaaatgtcggtacgacagttaccgcatggattgtttctttgattggattttcacttaaactctccgaattggccattcccgcagtcgggattggttttatttgcagtattgtaaagtggaaacaccgcgatttgggcaactttattcttggttttggctttctttttttaggacttgattttctttaccagtctatgcccgttatcggagacaactttgattttattgcggaaagtttcaatatgggttttttatctaatcttatagaatggtag

SEQ ID NO: 26614 - protein, 182 aa, Unknown
  Obtained from environmental sample
  DOMAIN (16)...(177): Na+/Pi-cotransporter
  misc_feature (1)..(182): Xaa is any amino acid
MAIIGILLRITGSLCIFLYGMKIMSEGIQRAAGDRLKRFLNFMTGNRFMAVLTGFAITAIIQSSSATTVMVVSLVNAGLLSLTQSIGVIMGANVGTTVTAWIVSLIGFSLKLSELAIPAVGIGFICSIVKWKHRDLGNFILGFGFLFLGLDFLYQSMPVIGDNFDFIAESFNMGFLSNLIEW

SEQ ID NO: 26615 - DNA, 474 bp, Unknown
  Obtained from environmental sample
  misc_feature (1)..(474): n is a, c, g, or t
ttgtattcagatgcagaaggacgtctggaaatagcattacgtttcaacgaaatggtacgtaaaggcgaagttggcgctataatgctgggacgcgaccaccacgacgtcagcggcacagattctccatttcgcgaaacggcgaatatcaaagacggaagcaatgtaatggctgatatggctgtccagtgtttcgcaggaaacgccgcgcgcggaatgagtttgatagccctgcacaacggcggaggcactggtataggaaaagcaatcaacggcggtttcggaatggtgctggacggcagtgcgcgagtggatgaaatactgaaaacggcaatgttgtgggatgtcatgggaggagtagcacgccgctcctgggcgagaaacgaacatgctatggaggtttgtcgcgaatttaatgagaaatataaagacgagtatataattacaatgccttatgttaatctatattatagataa

SEQ ID NO: 26616 - protein, 157 aa, Unknown
  Obtained from environmental sample
  misc_feature (1)..(157): Xaa is any amino acid
MYSDAEGRLEIALRFNEMVRKGEVGAIMLGRDHHDVSGTDSPFRETANIKDGSNVMADMAVQCFAGNAARGMSLIALHNGGGTGIGKAINGGFGMVLDGSARVDEILKTAMLWDVMGGVARRSWARNEHAMEVCREFNEKYKDEYIITMPYVNLYYR

SEQ ID NO: 26617 - DNA, 333 bp, Unknown
  Obtained from environmental sample
  misc_feature (1)..(333): n is a, c, g, or t
ttgtggtacatgatttactataaaggaagcggtgagaaagcagctaccggaaagatagcaactattgaatatacagtatcgttgcttgacagcattaatactgtttgttattcgtcggcaatatcaggaccaaaaatatttaaaataggctatggcggtgtcaaaggcagtgtcgaatcaggcttggaggaaggtgttcttctgttgcgcgttggcgacaaagcacgaatgattatgcctccgcatctcgctcacggactaataggagacaacgactgtatcccaaaaaggacgattattatttatgaaatagaactgttaaatctgaagtaa

SEQ ID NO: 26618 - protein, 110 aa, Unknown
  Obtained from environmental sample
  DOMAIN (9)...(107): FKBP-type peptidyl-prolyl cis-trans isomerase
  misc_feature (1)..(110): Xaa is any amino acid
MWYMIYYKGSGEKAATGKIATIEYTVSLLDSINTVCYSSAISGPKIFKIGYGGVKGSVESGLEEGVLLLRVGDKARMIMPPHLAHGLIGDNDCIPKRTIIIYEIELLNLK

SEQ ID NO: 26619 - DNA, 654 bp, Unknown
  Obtained from environmental sample
  misc_feature (1)..(654): n is a, c, g, or t
gtgtcagatcggccgagaacctcgtcagcgacagatatccttaaccagtttcgcagtttgccgcagcacgaaaatctgacaaatatcgttttcatgggtatgggcgaacctttcgataatatcgccgaagttatgaaaagtatcgaaatacttactgccgactacggatacacgtgggcgccaaaaagaatcacagtttcaacaatcggaattattccgggtataaagcaattcatggaaaacagtcgctgtcaactcgcagtgagccttcatcaccccaatccggaggaacgccgtaaacttgtgcctgctgagaacaaatatccggtaaaggaagtcatcgaactgcttaagacatacaatttgaataaacaaagacgcatctctttcgaatatgttatgctcgccggagttaacgattctcctattcaggcgaacgataccgtgcgtctgctttctggattgaaatgccgtgtaaatctgctacgcttccacactattgcagacagtgattttaaaccgtcgagcgaaacggcagtacagcagtttgccgatgcgctcaaccgtaaaggtataatcacaaccgtacgtcaatcgcggggaatggatatagccgctgcgtgcggtatgctttcaacaaacttgaaactctaa

SEQ ID NO: 26620 - protein, 217 aa, Unknown
  Obtained from environmental sample
  misc_feature (1)..(217): Xaa is any amino acid
MSDRPRTSSATDILNQFRSLPQHENLTNIVFMGMGEPFDNIAEVMKSIEILTADYGYTWAPKRITVSTIGIIPGIKQFMENSRCQLAVSLHHPNPEERRKLVPAENKYPVKEVIELLKTYNLNKQRRISFEYVMLAGVNDSPIQANDTVRLLSGLKCRVNLLRFHTIADSDFKPSSETAVQQFADALNRKGIITTVRQSRGMDIAAACGMLSTNLKL

SEQ ID NO: 26621 - DNA, 765 bp, Unknown
  Obtained from environmental sample
  misc_feature (1)..(765): n is a, c, g, or t
ttggcgttagtcagtatcgagaaaaagggatacttaagcntaaagctttcggtttctcaggaaccggggcattcttcaagaccgcctaaagttcaggcggcggcggtacttgggcgcgccttgtgtaaaatcgccgggaaacctttccctttcaggttaggtacaacaactgaagcattcttcaggcaaatagcgccgatggttccgggtattcaaggctttgttatgcgtcacgcaagagcgtttggatcgctcttttttaaagccgccgcatccagtcctgaagcggcatccatgctgcgtaccacaacagcaattacccagcttaaaggaagcgccgccgacaatgtgatgccgtcgcaggttgacgcggtaatcaatctcaggctgttgtatccgtggacgacagagactgcttgcaattttatcaggaaagcaattaatgacgagagagtaagtatcaatatttacggaacggcctcaaaccctgttatggcgggtaacaattatgaacagcatggctgggcgcaggtaaaggctgctctggaagaagtgtatccggggattcccgtgataccattcatcatgacagcgattacggattcacgtcattatcaaaaactatgtaacagtacattccgatttattccgtataaactggactcaaaagaattaagcggaatacacggacacgacgagcatatatcagaagaaaatctccgccgaggattgatgttttataccacattgatgaggttactatga

SEQ ID NO: 26622 - protein, 254 aa, Unknown
  Obtained from environmental sample
  DOMAIN (6)...(155): Peptidase dimerisation domain
  misc_feature (1)..(254): Xaa is any amino acid
MALVSIEKKGYLSXKLSVSQEPGHSSRPPKVQAAAVLGRALCKIAGKPFPFRLGTTTEAFFRQIAPMVPGIQGFVMRHARAFGSLFFKAAASSPEAASMLRTTTAITQLKGSAADNVMPSQVDAVINLRLLYPWTTETACNFIRKAINDERVSINIYGTASNPVMAGNNYEQHGWAQVKAALEEVYPGIPVIPFIMTAITDSRHYQKLCNSTFRFIPYKLDSKELSGIHGHDEHISEENLRRGLMFYTTLMRLL

SEQ ID NO: 26623 - DNA, 504 bp, Unknown
  Obtained from environmental sample
  misc_feature (1)..(504): n is a, c, g, or t
gtggcggcccgctggcttgatgaattctacgacaacgaggcgactattcagaatttctggggcgctataggaacggtaatctccaaaaactcagacggtacctattcgttgaatgatccgcccgcaggaaccagcgccgatgcatggtactgggccgagagtctgcgtgactttggacctgggtatgtggaagccagttttaacgacaagataaaactctctccgttaagcggagacgggctcaaatgggaaaccgccaaaaaaacagacccctatgtaatggaaacgtatcctgatgttatccttactcccaaggaaaccgaagaaatgtcaactttggcgaccgacatcggcgcttatgtggggcagatgcgggcaaaatgggttacccagggaggcattgatgcggaatgggatgcctatcttcgccagcttgataacatgggccttccgcgctttattcaaataagaatggatgcatacaaccggtataaatcacagtag

SEQ ID NO: 26624 - protein, 167 aa, Unknown
  Obtained from environmental sample
  misc_feature (1)..(167): Xaa is any amino acid
MAARWLDEFYDNEATIQNFWGAIGTVISKNSDGTYSLNDPPAGTSADAWYWAESLRDFGPGYVEASFNDKIKLSPLSGDGLKWETAKKTDPYVMETYPDVILTPKETEEMSTLATDIGAYVGQMRAKWVTQGGIDAEWDAYLRQLDNMGLPRFIQIRMDAYNRYKSQ

SEQ ID NO: 26625 - DNA, 1404 bp, Unknown
  Obtained from environmental sample
  misc_feature (1)..(1404): n is a, c, g, or t
gtgtttgcctacgggcgggactaccgcctctgcctgaaggatttttaccgacttaccggccctactcctctgttgccccgttatgcccttggaaactggtggagccgctatcaccgctacacagagcaatcctacaaggaactgatagaacgcttcgaaaacgaaaaaattcccttttccgtatcggtaatcgatatggattggcatcacacaaatattgaccccgctctgggcagcggctggaccggtttttcctggaaccgggagctgtttcccaaccccgaagctttccttgcctggctgcacaaaaagaacctgcgcattaccatgaatctgcacccggcggacggcatccgggcccacgaagacgcgtatgaccgcatcgccaaacgaatgggagttgataccgaacgccgcaaaccggtagaatttgacgccgcaaacccggattttatgcaggcctattttgaagaggtattgcatccgctggaagaacaaggggttgatttttggtggatagactggcagcagggcaataccacaggcattcccgggcttgatcccctctgggttctaaaccacttccattatctggacagcgctcgccgttcaaagcgcgcgttgactttctcccgctacgcggggctgggcagccaccgctatccggtgggcttttccggggacagcatcattagctgggcttccctggactttcagccttattttaccgcgaccgcttcaaacgccggctacggctggtggagccacgacataggcgggcacatgggcggcatccgggatgacgaactggcggttcgctgggcacagttcggcgtgttttcccccattaaccgcctgcacagcaattccaatcccttcaacagcaaggaaccctggcattttaacctcatagcacgcagcacaatgacagaattcctgcggcttaggcaccgacttgtgccttacctttacgcgatgaaccggcgggcgagatacgagggggaaccgctcatccagcccctgtactacgccgaaccgtataacgatatagtctaccgcattcccaatgaatattacttcggcaccgagctgctctgctgccctctgacgactcccataaaccgcgagacccagaccgccggttttaaggcgtggctccccgccggcttttggattgattttttcaacgggcgcatatattcaggcggacgctttttggaaatctggcgcggcctggacgccatgccggtactggcaaaggccgggggcattatcccgctggcggacgcggagccttttaccaactcagttgaaaacccaagcgctctggaactgcatgattcgccggctctgacggaagtttcacgcttgggagattccgagatactccgctcggccatctga

SEQ ID NO: 26626 - protein, 467 aa, Unknown
  Obtained from environmental sample
  DOMAIN (1)...(425): Glycosyl hydrolases family 31
  misc_feature (1)..(467): Xaa is any amino acid
MFAYGRDYRLCLKDFYRLTGPTPLLPRYALGNWWSRYHRYTEQSYKELIERFENEKIPFSVSVIDMDWHHTNIDPALGSGWTGFSWNRELFPNPEAFLAWLHKKNLRITMNLHPADGIRAHEDAYDRIAKRMGVDTERRKPVEFDAANPDFMQAYFEEVLHPLEEQGVDFWWIDWQQGNTTGIPGLDPLWVLNHFHYLDSARRSKRALTFSRYAGLGSHRYPVGFSGDSIISWASLDFQPYFTATASNAGYGWWSHDIGGHMGGIRDDELAVRWAQFGVFSPINRLHSNSNPFNSKEPWHFNLIARSTMTEFLRLRHRLVPYLYAMNRRARYEGEPLIQPLYYAEPYNDIVYRIPNEYYFGTELLCCPLTTPINRETQTAGFKAWLPAGFWIDFFNGRIYSGGRFLEIWRGLDAMPVLAKAGGIIPLADAEPFTNSVENPSALELHDSPALTEVSRLGDSEILRSAI

SEQ ID NO: 26627 - DNA, 1380 bp, Unknown
  Obtained from environmental sample
  misc_feature (1)..(1380): n is a, c, g, or t
atggcacaacaccaatttcagaccgaagtaagccggttgctgcaccttatcatccactctctttattccaaccgggagatttttcttcgggagcttgtttccaacgcctcagatgccttggacaagcttaaatacctgactgtcgcggacgaaaagtacaaaaccatcaattttgatccgcgcatcgatatttccttcaataaagaagcgaaaacattgactgtttccgacaacggaatcggcatgaatgaagccgatttaatcgactcgcttggaactatcgcgcgttctgggacaagagtgttccttgaaaaacttgccgaagacgctaaaaaagactccaacctcatcggccagtttggcgtgggtttttattccgcttttatggtcgcggaaaaaattgaggtgattagccgcaaggcaaacgaagatgccgcatggaaatggataagcgacggcaaagaaggttttgaaattgagggcgcgtcgcgcgacactcaggggacgacagttcttcttcatttgaccgaagagggaacagagtacgccaaccgctggtcaattgaggatattatcaagcgttactccaaccatgtggcttttccgatcttccttacctacgatgaaaaagagtatgacgacaaagggaaagagaaaggcagtaagataaagaccgacaggataaattcgggaacagcgctttggcgtcgcgctaagaacgaactaaagcccgaagattacaacgagttttacaaacagcttggtcatgacagcgaagagcctttgcactacattcacacaaaagccgaaggaacgcttgaatacgcaacattgttttatatacccaaaaaagcgccgtttgatttgtacaatgtggattacaaacccggcgtaaaactctatgtaaagcgcgtctttattaccgatgacgacaaggagcttatgcctacctacctgcgttttgtgcgcggcgtaattgactccgaagatttgcctttgaacgtaagccgcgaaattttgcaacagaacaaggtcttactcaacattaaaaacgcttccgtaaaaaaattgctttccgaattcaagcagatggcggataacgccgcttccggctccgacgacgcanagcaaaagtgggaaacatttgtttctcagtttaaccgtccgcttaaagaggggctttatcaggattttacaaaccgcgaggcgatacaggaaattgtccgttttaagagcagtacggttgacggatggacaagttttgccgattatgtctcccgcatgaaaagtgatcaaaagcatatttactacattacgggcggcgacgaaaaacactgcgatcttctccgcttttggagcctaccgcgcgaaagagattga

SEQ ID NO: 26628 - protein, 459 aa, Unknown
  Obtained from environmental sample
  DOMAIN (24)...(178): Histidine kinase-, DNA gyrase B-, and HSP90-like ATPase
  misc_feature (1)..(459): Xaa is any amino acid
MAQHQFQTEVSRLLHLIIHSLYSNREIFLRELVSNASDALDKLKYLTVADEKYKTINFDPRIDISFNKEAKTLTVSDNGIGMNEADLIDSLGTIARSGTRVFLEKLAEDAKKDSNLIGQFGVGFYSAFMVAEKIEVISRKANEDAAWKWISDGKEGFEIEGASRDTQGTTVLLHLTEEGTEYANRWSIEDIIKRYSNHVAFPIFLTYDEKEYDDKGKEKGSKIKTDRINSGTALWRRAKNELKPEDYNEFYKQLGHDSEEPLHYIHTKAEGTLEYATLFYIPKKAPFDLYNVDYKPGVKLYVKRVFITDDDKELMPTYLRFVRGVIDSEDLPLNVSREILQQNKVLLNIKNASVKKLLSEFKQMADNAASGSDDAXQKWETFVSQFNRPLKEGLYQDFTNREAIQEIVRFKSSTVDGWTSFADYVSRMKSDQKHIYYITGGDEKHCDLLRFWSLPRERD

SEQ ID NO: 26629 - DNA, 621 bp, Unknown
  Obtained from environmental sample
  misc_feature (1)..(621): n is a, c, g, or t
ttgaacaaaaacacaacttttatccgcgtgtatcgttctgcaagcgttacggcgtatttcacgaagagtattgtttacgggacgctcacagacagtagggatggtaagaaatacaggacggtgaagatcggcgatcagacatggatggcggagaatctgaattggggggaggcggcgagcggttcttggtgttatggtgacgagcctaataattgcaatacatacggtatgttgtacacttgggacgcggcgatgacagcttgcccaacgggttggcacttgcccacgcgtaccgagtggggaacgttggctaaagccgccggagggacgggtgattacggtgctggcggtgtggcaggtaaggcgttgaagtcgacaagcggttggaacaataaccgcaatgggacggatgatttcggattttcggccttgcccggcggcggccgtctctccaatggcaatttcagcaatgctggcaacggcggctactggtgggctgctacggagggcggtgataactacgcctacttccggggcatggtctacaacaacgacctcgtggacgaggacggaaacggcaagagctacggcttctcggtgcggtgtgttgccgattattag

SEQ ID NO: 26630 - protein, 206 aa, Unknown
  Obtained from environmental sample
  misc_feature (1)..(206): Xaa is any amino acid
MNKNTTFIRVYRSASVTAYFTKSIVYGTLTDSRDGKKYRTVKIGDQTWMAENLNWGEAASGSWCYGDEPNNCNTYGMLYTWDAAMTACPTGWHLPTRTEWGTLAKAAGGTGDYGAGGVAGKALKSTSGWNNNRNGTDDFGFSALPGGGRLSNGNFSNAGNGGYWWAATEGGDNYAYFRGMVYNNDLVDEDGNGKSYGFSVRCVADY

SEQ ID NO: 26631 - DNA, 681 bp, Unknown
  Obtained from environmental sample
  misc_feature (1)..(681): n is a, c, g, or t
gtggaatcccgcataggcatcggggacagggttggcataggcaacgtggtggctatggttgatccctcgcggccgggcgaggtttattcgctcagccccgttgtttccaccatatcggggaccgtgctgcaggctccttacagcatcggcgataccgtttcgtcgcagtcatcgctgtttgtggtgggcgacctttccgtcctgcgggtggaaacctttgtgccggagcgttttgtctcatcgatcaggccggggcttggcgcgctggtgaaccttgaagcccttcccggcgaaacctttccggcggagatagacgaagtaaaccccgtgcttgatccggcaagcagaaccctgcggataaggctccgctttgtcaacaggacgggcagtggcgcgacagacacgcggattaaggcgggaatgttcgcgacaatcagccttgtcaccagaaccagggccaacgtgcctgtcataccaaggacttcggtaatcaacacctacggttcatggatagcctttataatagatgaaaacaacatcgcccgccggcgcgcgctggaattgggtattgaaaacgaaagattttttgaagtgataagcggtatcagccttggggaacgaattgtaaccgccggacagaactttcttacggacggcgaccctgtccgcattgtggaatag

SEQ ID NO: 26632 - protein, 226 aa, Unknown
  Obtained from environmental sample
  misc_feature (1)..(226): Xaa is any amino acid
MESRIGIGDRVGIGNVVAMVDPSRPGEVYSLSPVVSTISGTVLQAPYSIGDTVSSQSSLFVVGDLSVLRVETFVPERFVSSIRPGLGALVNLEALPGETFPAEIDEVNPVLDPASRTLRIRLRFVNRTGSGATDTRIKAGMFATISLVTRTRANVPVIPRTSVINTYGSWIAFIIDENNIARRRALELGIENERFFEVISGISLGERIVTAGQNFLTDGDPVRIVE

SEQ ID NO: 26633 - DNA, 468 bp, Unknown
  Obtained from environmental sample
  misc_feature (1)..(468): n is a, c, g, or t
ttggaaacaacctttaaggaagaaaccgaaacggaccttttcggcgagcaggccgtcctctgcggcggcgtttccgcgctgatgaaggccggctacgaggtgcttgtggaatcgggctatcagccggaaagcgcctatttcgaggtaatgcacgagatgaagctcattatcgatcttgtaaaccgcggcgggctttccttcatgcgttattcgatctccgacacggcggaatacggcgactatgtcacaggcccgaagatcatcaccaaagaaacaaaggacacgatgcgccaggtgttaaaaaatattcagaacggcagttttgcccgggactggatactcgagaaccaggtgaaccgtcctttctttaaccgcatgagggcgcttgaacaggaacaccccatcgaaaaaacgggaaaagagcttcgcgccatgatgccctggttaaaaaagaacgaggaaaaataa

SEQ ID NO: 26634 - protein, 155 aa, Unknown
  Obtained from environmental sample
  DOMAIN (5)...(150): Acetohydroxy acid isomeroreductase, catalytic domain
  misc_feature (1)..(155): Xaa is any amino acid
METTFKEETETDLFGEQAVLCGGVSALMKAGYEVLVESGYQPESAYFEVMHEMKLIIDLVNRGGLSFMRYSISDTAEYGDYVTGPKIITKETKDTMRQVLKNIQNGSFARDWILENQVNRPFFNRMRALEQEHPIEKTGKELRAMMPWLKKNEEK

SEQ ID NO: 26635 - DNA, 1575 bp, Unknown
  Obtained from environmental sample
  misc_feature (1)..(1575): n is a, c, g, or t
ttgcccccagaaaacaggagtttgaaaatgattgagtatattgcgaataaaaacgaatgggctgcacatttcggagttgatcccaataacggccttacagacgcaaaggtaaaagaaaatgccgcgaaatacggcgttaacgcgcttacgaaaacaaagcctgtgtctttgataaaacgtatttgggagtccttaaaagagccgatgcttttacttcttgtatttgcggctataatagcgcttgcggttaacgtatttaatgagttatcaaacggtcagggcgatttctttgaagtagcgggtatctttacggcgattttcctttctgtcgccattaccgtggtaatggaaggaaagagcgctaaagcgtttgaagcgctgaataaaatcaacgaggacattgtcgtaaaagttttgcgtaacggtaacgccgttacgattaatcagcgggatgttgtcgcgggagacatacttatactttccaccggagataaaatcccggcggacggaaggcttcttgaaagtacggaacttgccgccgatgaatcggctcttacgggcgagagcgtaccggctaaaaaaaacttctcctgtgtcattacagacgaaaaaacccctgtcgccgaaagacacaacatgctctattcgggcacatttattacaagcggtttcggaaaattgctggtaacggcagtcggaggaaaaaccgagttcggcaaaatagcgcatgagctcggcagcgcgggaaaaacctctaccccgcttcaggaacggcttgagcgcatggggaaaatgattaccatattcggcgctattgccgcaacggtggttttcattgctcagattgtatcttttatcttccatggtgaattagtttttcaaaacataatcgacgcgtttatcacaagtatcgttcttattgtcgcggccgttcccgaggggcttcccaccatagtcgccgtctcgctctcgctcaatattatcaagctgtcaaaacagaacgctcttgtaaagaaaattatcgcttcagaaacagtcggttgtataagcgttatctgctcggacaagacgggaaccttaaccgaaaataaaatgacagttaacggcgagattaccgacgaaaacatattggcaaatatctgcgtaaacagcacggcggagatcggggaaacaggcctttttgtcggtaaccctaccgagtgcgcccttctttccgctgcgaaaaaagcgggatggaattaccatgaacagcgctcaagcgcaaatatagtccaagtgttttcattttcatctgaaagaaagaggatgactaccattgtaaaggggcaaaaaggctttaccgtctacagcaagggaagcccgggaaaattattccatcattgcaaaatggacgaagcaaaacgcgccgaaattgaaaagcagataacgtttatgcaggaaaaagcctgccgtatcatcgcctttgcgcacagggattttgctgagttatcatcttttgacgataatactgtagaaaaagacatgatattcgacggttttgccgccatttcagaccctctccgcgccgagtcttga

SEQ ID NO: 26636 - protein, 524 aa, Unknown
  Obtained from environmental sample
  DOMAIN (14)...(85): Cation transporter/ATPase, N-terminus
  misc_feature (1)..(524): Xaa is any amino acid
MPPENRSLKMIEYIANKNEWAAHFGVDPNNGLTDAKVKENAAKYGVNALTKTKPVSLIKRIWESLKEPMLLLLVFAAIIALAVNVFNELSNGQGDFFEVAGIFTAIFLSVAITVVMEGKSAKAFEALNKINEDIVVKVLRNGNAVTINQRDVVAGDILILSTGDKIPADGRLLESTELAADESALTGESVPAKKNFSCVITDEKTPVAERHNMLYSGTFITSGFGKLLVTAVGGKTEFGKIAHELGSAGKTSTPLQERLERMGKMITIFGAIAATVVFIAQIVSFIFHGELVFQNIIDAFITSIVLIVAAVPEGLPTIVAVSLSLNIIKLSKQNALVKKIIASETVGCISVICSDKTGTLTENKMTVNGEITDENILANICVNSTAEIGETGLFVGNPTECALLSAAKKAGWNYHEQRSSANIVQVFSFSSERKRMTTIVKGQKGFTVYSKGSPGKLFHHCKMDEAKRAEIEKQITFMQEKACRIIAFAHRDFAELSSFDDNTVEKDMIFDGFAAISDPLRAES

SEQ ID NO: 26637 - DNA, 801 bp, Unknown
  Obtained from environmental sample
  misc_feature (1)..(801): n is a, c, g, or t
atgaaattctttgatgattttctgtatcaaaaaaataaaaaaaaacatagagtctgcggggatttctgtctttatgagcgaacggcgatagggactgtctatgtgttgtgcgacggagtaggttcggggatttatgcaaatatctcagccatcacctgcgccaaccgtattctggaactgattcgcaggggaatgtccctccgcatgaccagcgaaattgtcgccgcgtccatgcatcgcgcccgtaaagaagacattccgttctcggccttctcggcggttttaatttcccccgatggtcaattcaccgtttattcctatgaatcgccaaatccaattttaatgcaaaacggccacgcgaaagtccttaccccccgtttttacaccgccggctttgaagtaatcggcgaatcttccggcatccttaacatgggagactcccttttaatgttttccgacggcgtaagccaggccggtcttgggcacggtcaagggatgggcatcggttcggatggagtttcctcttatatcaacctgaaccataaaccgcacgacagtatctccaccctctccaagcgcattgttgaaatgtgcaaaaccgtatcgggcggaaaccacgaagacgacactacgcttattctgctcaactgccgcgaagcgaatgaattaacgctgttgacgggtccgccctccaaccgctcgatgaatcataattatgcgttaaagtttatgagtatgccaggcaagaaaatcctcagcggctccacaaccacggatattatttctgaagagttaggttaa

SEQ ID NO: 26638 - protein, 266 aa, Unknown
  Obtained from environmental sample
  DOMAIN (28)...(218): Stage II sporulation protein E (SpoIIE)
  misc_feature (1)..(266): Xaa is any amino acid
MKFFDDFLYQKNKKKHRVCGDFCLYERTAIGTVYVLCDGVGSGIYANISAITCANRILELIRRGMSLRMTSEIVAASMHRARKEDIPFSAFSAVLISPDGQFTVYSYESPNPILMQNGHAKVLTPRFYTAGFEVIGESSGILNMGDSLLMFSDGVSQAGLGHGQGMGIGSDGVSSYINLNHKPHDSISTLSKRIVEMCKTVSGGNHEDDTTLILLNCREANELTLLTGPPSNRSMNHNYALKFMSMPGKKILSGSTTTDIISEELG

SEQ ID NO: 26639 - DNA, 378 bp, Unknown
  Obtained from environmental sample
  misc_feature (1)..(378): n is a, c, g, or t
gtgcacaacggcattttaggaaggcgcatatcgtatcttgtaaacgcggacggttttgaaaacttgcattccggcgctacggataaatatgaatcaatgcagacaaaatacggtatcaagtatcatgagatcctttacgcgctgagggaagaaaagcagtatgtcggcatttattcggatatttccaaactcaagtttgattccgggcagttggatacgataaaatcgcaaaccttaaaacacgcgcaggaatttttggatcatcaggtgcggttcgcgcaggagatggcgcattatcttggaaagagcaccgcgcaaagcgaggagatcgcaaaacgtctgattgggctgtatgaagaggacggcgattcggcataa

SEQ ID NO: 26640 - protein, 125 aa, Unknown
  Obtained from environmental sample
  misc_feature (1)..(125): Xaa is any amino acid
MHNGILGRRISYLVNADGFENLHSGATDKYESMQTKYGIKYHEILYALREEKQYVGIYSDISKLKFDSGQLDTIKSQTLKHAQEFLDHQVRFAQEMAHYLGKSTAQSEEIAKRLIGLYEEDGDSA

SEQ ID NO: 26641 - DNA, 897 bp, Unknown
  Obtained from environmental sample
  misc_feature (1)..(897): n is a, c, g, or t
ttgacgataacgcagtttttgccgacctacgtttattattccaatgaagcgaaaccgtatatgtgcgatgcgttctttgttatcattacgattntgctttaccacatgtacacgcaaaaaaagctgcctcttatagtgttaacgctctgttattcgttgattttgggattttgttccccgtctgtattttttataggcgggatattggcgagtgagtttttgaccgctgtgtttgctaaaaacaaaaaacttgcgctttcggtattgatatcgggagtgtcgattttagcggtcttttatttgtatttccattggtggatgttgccggcgttggattttatgaccggatattggggtgagtacggaactaagcgaagcgccgtcgcggcgattgcgggtattttttcgccgggtctggccgccagcaacgcgttaatttggatttttgtcccgtttgcgttgcgcggcgcctatcttttgataaagcggaaagataaggtcgcgtattccgtggcgttgtccttattgctcgctttttcggtttcttttgtaggaatgtggccgcttatcgggcgtttgtggctgtttttgccggcgcttgttttaacatattctttggttgggctggatttcggctcaaaaagcgccaaaaaggcgatagatatagcggggttttgcctatgttcgattatagcagtttactacgctatatcatgtataggcaaagccggggacatggtgtaccttgataagcaagaggtaaatccgttgattctttatgtcaaggaacatataaaggaagatgaaaaattgtatgtttattcgccggcgcaatacgcgctgaagtttaaaaacnggttatacggccgggaagatagggaattccgctcgcgataa

SEQ ID NO: 26642 - protein, 298 aa, Unknown
  Obtained from environmental sample
  misc_feature (1)..(298): Xaa is any amino acid
MTITQFLPTYVYYSNEAKPYMCDAFFVIITIXLYHMYTQKKLPLIVLTLCYSLILGFCSPSVFFIGGILASEFLTAVFAKNKKLALSVLISGVSILAVFYLYFHWWMLPALDFMTGYWGEYGTKRSAVAAIAGIFSPGLAASNALIWIFVPFALRGAYLLIKRKDKVAYSVALSLLLAFSVSFVGMWPLIGRLWLFLPALVLTYSLVGLDFGSKSAKKAIDIAGFCLCSIIAVYYAISCIGKAGDMVYLDKQEVNPLILYVKEHIKEDEKLYVYSPAQYALKFKNXLYGREDREFRSR

SEQ ID NO: 26643 - DNA, 1650 bp, Unknown
  Obtained from environmental sample
  misc_feature (1)..(1650): n is a, c, g, or t
atgacgatttatcatgggcatggcagccagattgagattgtcataaaggacggaacggcaaaggtaagggattacggtcggggcatccccctgggaaaactggtggagtgcgtttcagtgatcaacaccggggcaaagtacaacgacgatgtgttccagttttccgttggtctgaacggggtgggaaccaaggcggtgaacgctctttcttcgcattttagggttgtggccgtcagggacggcgagtttgccgaggcggtttttcaacggggcgatcttgtaagtgaaaggaagggtcgcttaaaggaaaagcaaaaaaacggcacctatgtggagtttaccccggatgcggaaattttcggcacctacgaattttatcctgagttcgtcgaaaagcgcatcctgaattacgcctaccttaacgccgggcttaccctttcgtataacggaaagccgtatgtgtccaagcgcgggcttttcgatcttttaagcgaagaaaccggggacgactgcatttatccaatgggttactacaagggcgaacacattgaatttgcttttacccataccaacaactatggcgaggaatatttttcttttgtgaatggccagtttaccagcgatggtggaacccacctctcggcttttaaggaaggctttttaaaagggatacaggcttacttcaagaaagattaccgcagcgaggacatacgtgaaggcacggcagcggcggtggcggtgaagctgaaaaacccggtttttgaaagccagacaaaaaacaaacttggaaactcggatatacggagctggatagtccaggaagttaaagacgctaccgaggactggcttcataaaaatgtcgaggcggccaaaaagcttgagcgcaagattctggcaaacgaaagcctccgcaccgagcttaatgccgtcaagaaagaggcgcgggaggcggcgaagaaaatcgccctgaagatacccaagctgaaagactgcaagtatcaccttgaggacggtaaagacggcgccgaatcgacgatattcataaccgagggggattcggcctccggttccattgtttccagccgcgacgtgatgacccaggcgatcttctccctgcgcggcaaggtcgaaaacatgtacggcaaaaaacgcgccgccatctacaaaaacgaggaactctacaatatgatgatggcgctgggcatagaaaacgatgtcgagggcctgcgttacgcgaaaattgtcctcgccaccgacgctgatttcgacggcttccacatacgcaacctcctgctgaccttttttctttcgttctttgaggaacttgttaccgccggaaggatatatatccttgagacgcccctgttccgcgtgaggaccaaaaaagagacccgttactgctacacggaaaaagagcgcgacgaggcgtccgccgccctgggctcccaatgcgagataacccgcttcaaggggctgggcgagatcagccccaaggaattcggccagtttatcggcaaagacatgcgacttgtgccggtgtcgattaacaccctcaaagccgtgccccaggtgctgactttctacatgggcaagaacacccccgagcgccgcgactacatcatgaaaaatttgattgaagacgcgggatag

SEQ ID NO: 26644 - protein, 549 aa, Unknown
  Obtained from environmental sample
  DOMAIN (158)...(313): DNA gyrase B
  misc_feature (1)..(549): Xaa is any amino acid
MTIYHGHGSQIEIVIKDGTAKVRDYGRGIPLGKLVECVSVINTGAKYNDDVFQFSVGLNGVGTKAVNALSSHFRVVAVRDGEFAEAVFQRGDLVSERKGRLKEKQKNGTYVEFTPDAEIFGTYEFYPEFVEKRILNYAYLNAGLTLSYNGKPYVSKRGLFDLLSEETGDDCIYPMGYYKGEHIEFAFTHTNNYGEEYFSFVNGQFTSDGGTHLSAFKEGFLKGIQAYFKKDYRSEDIREGTAAAVAVKLKNPVFESQTKNKLGNSDIRSWIVQEVKDATEDWLHKNVEAAKKLERKILANESLRTELNAVKKEAREAAKKIALKIPKLKDCKYHLEDGKDGAESTIFITEGDSASGSIVSSRDVMTQAIFSLRGKVENMYGKKRAAIYKNEELYNMMMALGIENDVEGLRYAKIVLATDADFDGFHIRNLLLTFFLSFFEELVTAGRIYILETPLFRVRTKKETRYCYTEKERDEASAALGSQCEITRFKGLGEISPKEFGQFIGKDMRLVPVSINTLKAVPQVLTFYMGKNTPERRDYIMKNLIEDAG

SEQ ID NO: 26645 - DNA, 381 bp, Unknown
  Obtained from environmental sample
  misc_feature (1)..(381): n is a, c, g, or t
ttgtcccccgggatggttcatcttgaggcaggcttcccgcttagatgccttcagcggttatcccttccgaacgtagctacccagcacttgcccttggcaggacaactggcacaccagcggttcgtccatttcggtcctctcgtactaaaaacagaccctctcaaccatccaacgcccatggcagatagggaccgaactgtctcgcgacgttctgaacccagctcacgtaccgctttaattggcgaacagccaaacccttgggacctgcttcagccccaggatgcgatgagccgacatcgaggtgccaaaccttcccgtcgatgtgaactcttggggaagatcagcctgttatccccggagtaccttttatccgttaagtga

SEQ ID NO: 26646 - protein, 126 aa, Unknown
  Obtained from environmental sample
  misc_feature (1)..(126): Xaa is any amino acid
MSPGMVHLEAGFPLRCLQRLSLPNVATQHLPLAGQLAHQRFVHFGPLVLKTDPLNHPTPMADRDRTVSRRSEPSSRTALIGEQPNPWDLLQPQDAMSRHRGAKPSRRCELLGKISLLSPEYLLSVK

SEQ ID NO: 26647 - DNA, 303 bp, Unknown
  Obtained from environmental sample
  misc_feature (1)..(303): n is a, c, g, or t
gtgccaaaccttcccgtcgatgtgaactcttggggaagatcagcctgttatccccggagtaccttttatccgttaagtgacggcgcttccactcgctaccgccagatcactaagacctactttcgtacctgctcgacctgtcagtctcgcagtcaagcctccttgtgcctttacactcatacgatgatttccaaccaccgcgagggaaccttcgcgcacctccgttatgctttgggaggcgaccgccccagtcaaactacccaccagacagtgtcccttcgccagatcatggctgaaggttag

SEQ ID NO: 26648 - protein, 100 aa, Unknown
  Obtained from environmental sample
  misc_feature (1)..(100): Xaa is any amino acid
MPNLPVDVNSWGRSACYPRSTFYPLSDGASTRYRQITKTYFRTCSTCQSRSQASLCLYTHTMISNHREGTFAHLRYALGGDRPSQTTHQTVSLRQIMAEG

SEQ ID NO: 26649 - DNA, 306 bp, Unknown
  Obtained from environmental sample
  misc_feature (1)..(306): n is a, c, g, or t
gtgggagactttgaaccctgtacgccagtatggggggagtcaaccttgaaataccacccttgtttgttcaggaccctaaccttcagccatgatctggcgaagggacactgtctggtgggtagtttgactggggcggtcgcctcccaaagcataacggaggtgcgcgaaggttccctcgcggtggttggaaatcatcgtatgagtgtaaaggcacaaggaggcttgactgcgagactgacaggtcgagcaggtacgaaagtaggtcttagtgatctggcggtagcgagtggaagcgccgtcacttaa

SEQ ID NO: 26650 - protein, 101 aa, Unknown
  Obtained from environmental sample
  misc_feature (1)..(101): Xaa is any amino acid
MGDFEPCTPVWGESTLKYHPCLFRTLTFSHDLAKGHCLVGSLTGAVASQSITEVREGSLAVVGNHRMSVKAQGGLTARLTGRAGTKVGLSDLAVASGSAVT

SEQ ID NO: 26651 - DNA, 300 bp, Unknown
  Obtained from environmental sample
  misc_feature (1)..(300): n is a, c, g, or t
ttgactccccccatactggcgtacagggttcaaagtctcccacctatcctacacatgcaggttcaaaacccaatgtcaagctatagtaaaggtgcacagggtctttccgtctttctgcgggaacgcggcattttcaccgcgacttcaatttcaccgagtctctggccgagacagtgtggagatcgttacgccattcgtgcaggtcggaacttacccgacaaggaatttcgctaccttaggaccgttatagttacggccgccgtttaccggggcttcgattcaaagcttcgcttgcgctga

SEQ ID NO: 26652 - protein, 99 aa, Unknown
  Obtained from environmental sample
  misc_feature (1)..(99): Xaa is any amino acid
MTPPILAYRVQSLPPILHMQVQNPMSSYSKGAQGLSVFLRERGIFTATSISPSLWPRQCGDRYAIRAGRNLPDKEFRYLRTVIVTAAVYRGFDSKLRLR

SEQ ID NO: 26653 - DNA, 675 bp, Unknown
  Obtained from environmental sample
  misc_feature (1)..(675): n is a, c, g, or t
ttgatgacgacgggggcgcttgtcgcctccgccctgcgggagactacgattaaagcggaaaggcgcagattttatttcgccaaaaagttttacaagtattatatgctggaagttttttacggctcgagaaagcagatatttcttacctttgccccatacgtgctgatactgcaatacggggcggacccttcgattatgtcgattttatacgcaatctgcgccggattcggaatgttatgcagtacgcttatcggaagaattatcgacaaggttggatacaaagcggtcatggtcggcgacactctcattttaatagttgtctgccttctttacggtttcgcgcacaggctgttcccgcccaacatcgccttttatgtcgtctgctgtaactttgtgctggactcgattatctccatagcgagcatggcgagtaacatctatgttcagcgcatctcgtccaatcaggaggaaattaccgctaccctatcaacgggtatttccgtaaaccacattatcagtatttttatcgcgctcatgggcggctggatttggaaagttacgggtattgaggttcttttctcgttatccgctttccttgggcttctaaacagcgtttacgccgtgacaatcaaaaaagaagaagaagttcagtctgtttcaactactggtaaataa

SEQ ID NO: 26654 - protein, 224 aa, Unknown
  Obtained from environmental sample
  misc_feature (1)..(224): Xaa is any amino acid
MMTTGALVASALRETTIKAERRRFYFAKKFYKYYMLEVFYGSRKQIFLTFAPYVLILQYGADPSIMSILYAICAGFGMLCSTLIGRIIDKVGYKAVMVGDTLILIVVCLLYGFAHRLFPPNIAFYVVCCNFVLDSIISIASMASNIYVQRISSNQEEITATLSTGISVNHIISIFIALMGGWIWKVTGIEVLFSLSAFLGLLNSVYAVTIKKEEEVQSVSTTGK

SEQ ID NO: 26655 - DNA, 423 bp, Unknown
  Obtained from environmental sample
  misc_feature (1)..(423): n is a, c, g, or t
atgctttcgataagctcaggcggattttggggcaagggcatcgggcaaggaacacgaaaaatcgcgagcgttcctgaaattcattctgattttattttctcgtctttcgccgaagagatgggatttttgggagttatgttcttttttgttttgtttgcgattttcgccgtccggggatacgttgattccatgaacaacgaaaagccctttaatcggcttttgggctgcggccttgttactatgattgtttcgcaggtactaatgaatatagccgttaccgccggcgctttgcccgcgaccggaattcccctgccgtttttttccgccggcggatcctcgttggctactacgcttgtaatggccggtcttgtggtgaatgtttccaggtcttcaagaaaccgcgtaaacggggaggaaagctga

SEQ ID NO: 26656 - protein, 140 aa, Unknown
  Obtained from environmental sample
  DOMAIN (1)...(133): Cell cycle protein
  misc_feature (1)..(140): Xaa is any amino acid
MLSISSGGFWGKGIGQGTRKIASVPEIHSDFIFSSFAEEMGFLGVMFFFVLFAIFAVRGYVDSMNNEKPFNRLLGCGLVTMIVSQVLMNIAVTAGALPATGIPLPFFSAGGSSLATTLVMAGLVVNVSRSSRNRVNGEES

SEQ ID NO: 26657 - DNA, 825 bp, Unknown
  Obtained from environmental sample
  misc_feature (1)..(825): n is a, c, g, or t
atggccggcgattatgattatgtattggatgattcggatgccccgaccggatttggaaggttcattaaaatattcattgtgattgcggctatctgcctttgcgcggagctaatctggcttcttgggattagcccttttagaccgtttaccaaaattgatatttcaggcttagaggggattggcagggaagaaattctcgcaatagcgggaataaacgcttcttcttcgtatttttcaacgaatgtaattaaaattgaaaatgcgctgatgaggatcagttcagttgagtccgccagagttttcaaattcttcccgagcaggctcaggattgtccttgacgcccgcaaacccgtcgcctttgctctcgcgtccattaataacaaaacagtgcctgtggtgtttgacagccagggcgtaatttacgaagtcggcggaaaaaaccttccggacttttacccggtgatttcagggctcgttattgataatcctgttccgggtatgaggcttcccgggctttttattccctttttaaaagagcttgaaaagatagaaatgtccgctccggagctgctttccgcagtatcggaattcagaataaacaggaaactttttgatggctttgatttgatcctttatccggctcacaaaaggataaaggtcataatgtcggaattaaacgaagatttgctgcgttatgcccttttgatggtggatgtactgtcatccagggaaagcggaatagatactttagattttcgctccggtaatatagcttcatatatcccggtggatgtgcagacatccaaggaggcttatcctgagtaa

SEQ ID NO: 26658 - protein, 274 aa, Unknown
  Obtained from environmental sample
  DOMAIN (47)...(115): POTRA domain, FtsQ-type
  misc_feature (1)..(274): Xaa is any amino acid
MAGDYDYVLDDSDAPTGFGRFIKIFIVIAAICLCAELIWLLGISPFRPFTKIDISGLEGIGREEILAIAGINASSSYFSTNVIKIENALMRISSVESARVFKFFPSRLRIVLDARKPVAFALASINNKTVPVVFDSQGVIYEVGGKNLPDFYPVISGLVIDNPVPGMRLPGLFIPFLKELEKIEMSAPELLSAVSEFRINRKLFDGFDLILYPAHKRIKVIMSELNEDLLRYALLMVDVLSSRESGIDTLDFRSGNIASYIPVDVQTSKEAYPE

SEQ ID NO: 26659 - DNA, 375 bp, Unknown
  Obtained from environmental sample
  misc_feature (1)..(375): n is a, c, g, or t
atgtgcagacatccaaggaggcttatcctgagtaatgaagagttggtggtcggcctggacattggtacgaccaaggtatgtgcggtaatcggcgaaataggcgaaaacggccttttggaaattaccggtgtcgggacttccccttccacggggctcaggaagggcgtggtggtaaacattgaagcgacgctgcactctgtttcacaggccattgaggctgccgagatgatgagcggcagggaagtacatgaagcgtggacaggcatcggcggcagccatatcgaagggataaattcccgcggggttgtggcagtaacaggcaggaatcgggagacccgcgagatcggtagcgacgatataaagcngggttcttga

SEQ ID NO: 26660 - protein, 124 aa, Unknown
  Obtained from environmental sample
  DOMAIN (16)...(124): Cell division protein FtsA
  misc_feature (1)..(124): Xaa is any amino acid
MCRHPRRLILSNEELVVGLDIGTTKVCAVIGEIGENGLLEITGVGTSPSTGLRKGVVVNIEATLHSVSQAIEAAEMMSGREVHEAWTGIGGSHIEGINSRGVVAVTGRNRETREIGSDDIKXGS

SEQ ID NO: 26661 - DNA, 348 bp, Unknown
  Obtained from environmental sample
  misc_feature (1)..(348): n is a, c, g, or t
atggttacaaaaacaaaagaacaggaaatttttgcggaaacttgcggaactgtggaatgccgtgttgaaaaaacgctcaatgtaattgggggcaaatggggatttcttattctcaaaaatcttttttcaggtaaaaaaaggtttggcgaattaaggcggcttctacataatattaatgccaagtcgcttacagttagtttaaggttattggaggaaaatacccttattaacaggaaagtttttgctactgtccccgcaacggttgaatattctctaactgaaaagggagaggacttgaaagaaattcttatgaggatgtatttgtggggcgaaaaatgggtaaaatga

SEQ ID NO: 26662 - protein, 115 aa, Unknown
  Obtained from environmental sample
  DOMAIN (28)...(115): HxlR-like helix-turn-helix
  misc_feature (1)..(115): Xaa is any amino acid
MVTKTKEQEIFAETCGTVECRVEKTLNVIGGKWGFLILKNLFSGKKRFGELRRLLHNINAKSLTVSLRLLEENTLINRKVFATVPATVEYSLTEKGEDLKEILMRMYLWGEKWVK

SEQ ID NO: 26663 - DNA, 858 bp, Unknown
  Obtained from environmental sample
  misc_feature (1)..(858): n is a, c, g, or t
atgaatagcctaaaattcaacattttgcagttaatacaggataaaattattgaagtaaaccccattgatatggctgccattgaagtattgcgtgtttttgaaccggactattataattatctttctaagaacaaaagtctttttacagacctcaaatcgccgtttggagatgaaaaatcatttcgtgaagaacggaaaaaacatattcaggaaagttttcttaattttgcaagtgataaaaatagaacgcatttacaggatttaatttatgaactttttcctcaaataaaaagtatagcgcttggaagcggaattaatttcagttccggttctttggaatgggttcatgaattaagaatttgttcaagtacggcatttgactcttattttaattttatcccgggcggtgatgaaaaagaagtaagtatttatgaacttgaacaggctgttgttgcgtcaaataattatacttcatttaacgaacttgttgatacatatacaaaaaacggacgaatcatgaattttttaacgaagatgtttgatttttcttccaaggatgaatattttacaagtgagaatttttataatataacccttgcgttacttaatagttttgtcaatttatcagtaaatagggattttatagtttttgatcggcaggattatatgacaattgccgtaatatacaggctattaaaaagaaatgataatcttgaaaaaaattatcaattattatcggatgccataaatgaaactaattcactatatggttcaacatatttattaaatcaaattgaaaatgaactcaaagccaatccaaaaaatcggaaattgttcagatatcatcttgaagattaa

SEQ ID NO: 26664 - protein, 285 aa, Unknown
  Obtained from environmental sample
  misc_feature (1)..(285): Xaa is any amino acid
MNSLKFNILQLIQDKIIEVNPIDMAAIEVLRVFEPDYYNYLSKNKSLFTDLKSPFGDEKSFREERKKHIQESFLNFASDKNRTHLQDLIYELFPQIKSIALGSGINFSSGSLEWVHELRICSSTAFDSYFNFIPGGDEKEVSIYELEQAVVASNNYTSFNELVDTYTKNGRIMNFLTKMFDFSSKDEYFTSENFYNITLALLNSFVNLSVNRDFIVFDRQDYMTIAVIYRLLKRNDNLEKNYQLLSDAINETNSLYGSTYLLNQIENELKANPKNRKLFRYHLED

SEQ ID NO: 26665 - DNA, 738 bp, Unknown
  Obtained from environmental sample
  misc_feature (1)..(738): n is a, c, g, or t
gtggcccgaatgtccgccatgaccgccgctgtgagaaccgccgccattgccgctgtggctcttcgggctggaatcggcgccatccgggtcgatagcgtcaatatacgaaaggttaagcctgcccattttgtcaatttcggtaagcttgacgggaatctcctgcccttccttcagcacgtcggtgacattggctatacgctggcgggaaagcttgctgatatgcaccagtccttccctgccgggcagaatctccacaaaggcgccaaagtccataatccgttttaccgtgccgttgtacaccctgtcaatttccgggtcggaagtaatgcccgtaacggcgattttggcttcctccgcgtctttggtgtttttgccgaaaatcgtaacggtgccgtcatcctcggtattgatcttcacgctgtactgctcgcacagggctttgatgttcttcccgccggggcctataagcgtgcctatcttgtcgatgtcaatacgcagggtaacgatcttcggcgcgtattcgctgatctcttccgccgggcggctgatcgtcttgttcataatcgaaaggatgtgcattctgccccgcttggcctgatccagagccttacgcataatttccgggctgacaccggcgatcttaatatccatctggaaaccggttatgccgtcctcggtgccggcgaccttgaagtccatatcgcccaggtggtcttcctcgcccaaaatgtcagataa

SEQ ID NO: 26666 - protein, 245 aa, Unknown
  Obtained from environmental sample
  SIGNAL (1)...(17)
  misc_feature (1)..(245): Xaa is any amino acid
MARMSAMTAAVRTAAIAAVALRAGIGAIRVDSVNIRKVKPAHFVNFGKLDGNLLPFLQHVGDIGYTLAGKLADMHQSFPAGQNLHKGAKVHNPFYRAVVHPVNFRVGSNARNGDFGFLRVFGVFAENRNGAVILGIDLHAVLLAQGFDVLPAGAYKRAYLVDVNTQGNDLRRVFADLFRRAADRLVHNRKDVHSAPLGLIQSLTHNFRADTGDLNIHLETGYAVLGAGDLEVHIAQVVFLAQNVR

SEQ ID NO: 26667 - DNA, 318 bp, Unknown
  Obtained from environmental sample
  misc_feature (1)..(318): n is a, c, g, or t
atgcacgaaaaagcctatgcccggctctacgcctacgactggcccggcaatatccgcgagcttcgcaactgcatagaaagcgccgtggtcatgtgccgcaaaccgattatcgccgtggacgatcttccccccgccctgcaagcttactctgacgatgaaggctgggtaaaggttcccctggattgcagtcttgaggaggatgaaaaaattattatcaaggcggcgattggctatcacaagaacaagacaaaggccgccgaagtccttggcatcgggcgaaagacgctgcataggaaaattcttgacaatgagcaatga

SEQ ID NO: 26668 - protein, 105 aa, Unknown
  Obtained from environmental sample
  DOMAIN (64)...(103): Bacterial regulatory protein, Fis family
  misc_feature (1)..(105): Xaa is any amino acid
MHEKAYARLYAYDWPGNIRELRNCIESAVVMCRKPIIAVDDLPPALQAYSDDEGWVKVPLDCSLEEDEKIIIKAAIGYHKNKTKAAEVLGIGRKTLHRKILDNEQ

SEQ ID NO: 26669 - DNA, 336 bp, Unknown
  Obtained from environmental sample
  misc_feature (1)..(336): n is a, c, g, or t
atgcataatcagcatcttatagatgaaatgactgaaaggctcaaggaattaaagcctcttaaggttattttgttcggttcttacgctaggggtaatcctacggaagatagtgatttggatgtacttgtagtattagattcagaagaaatggctaaaaatcttgacgaaaaaataaagcgagatatgccaatttccaaaatgctcataaatatcaacagaaaaatagcaatggatttaataacatactcaaaagctgaatatgaataccttattaagcaaaacgattttttcgtaaaggaaataaacaatacagggtctattctttatgaaaggtaa

SEQ ID NO: 26670 - protein, 111 aa, Unknown
  Obtained from environmental sample
  DOMAIN (3)...(82): Nucleotidyltransferase domain
  misc_feature (1)..(111): Xaa is any amino acid
MHNQHLIDEMTERLKELKPLKVILFGSYARGNPTEDSDLDVLVVLDSEEMAKNLDEKIKRDMPISKMLININRKIAMDLITYSKAEYEYLIKQNDFFVKEINNTGSILYER

SEQ ID NO: 26671 - DNA, 300 bp, Unknown
  Obtained from environmental sample
  misc_feature (1)..(300): n is a, c, g, or t
atgcgccgaatttggcggttgagcccctgcgtaagtattatgcgaaagcgcgtatcggtttcgcgcgtaagcttgcagggcttggttaccgttcccaaaatgggaacgccgcgctgcatacgcttttcaaactcaggcgtgatgggcttatccaccgttaccacgtactccttttcgtgcatatttcctgcacgcagaattttgtttacaatatcgccgtcattggtgagaaaaatcagcccctctgagggcttgtctaacctcccgatgttgaaaatgcgctcagggaagttgatgtag

SEQ ID NO: 26672 - protein, 99 aa, Unknown
  Obtained from environmental sample
  misc_feature (1)..(99): Xaa is any amino acid
MRRIWRLSPCVSIMRKRVSVSRVSLQGLVTVPKMGTPRCIRFSNSGVMGLSTVTTYSFSCIFPARRILFTISPSLVRKISPSEGLSNLPMLKMRSGKLM

SEQ ID NO: 26673 - DNA, 399 bp, Unknown
  Obtained from environmental sample
  misc_feature (1)..(399): n is a, c, g, or t
atggtaagtaaactttacgtcattcccacgcctgtcggcaatcttgaggacattaccctgcgtgcagtgcgtctgctcaaagaggttgacctgatacttgctgaggacacgcgcaccacaggatttttgctcaagcacttgggcgtggaaacgcgtatgcagtcgcaccacaagtttaacgagcatcaggctgtggagcgcgtagccgacctcattgcgcagggcaaaagcgttgcgctggtgagcgatgcaggtactcctgctatttccgacccgggatttttactcgtgcgcacctgcgttgaaaaaggcgttgaggtggaaacgctgccgggggcaacagcctttgttcccgcgctggttagctccggcttgccctgcgacaggtttttgctttga

SEQ ID NO: 26674 - protein, 132 aa, Unknown
  Obtained from environmental sample
  DOMAIN (4)...(132): Tetrapyrrole (Corrin/Porphyrin) Methylases
  misc_feature (1)..(132): Xaa is any amino acid
MVSKLYVIPTPVGNLEDITLRAVRLLKEVDLILAEDTRTTGFLLKHLGVETRMQSHHKFNEHQAVERVADLIAQGKSVALVSDAGTPAISDPGFLLVRTCVEKGVEVETLPGATAFVPALVSSGLPCDRFLL

SEQ ID NO: 26675 - DNA, 447 bp, Unknown
  Obtained from environmental sample
  misc_feature (1)..(447): n is a, c, g, or t
atgaaatattttatttggttctttttttattttttatttatttttttattaggtgtatttgattttccttttcctgtttttattaatatttttattttcttttttatagtaattttgatgcctataagtctatatttaatttttttcaaaataaaaaataatcttttcatttatttcatatgtgttttttttgcatattatttgttttatattgggactagtataataacagaaaaatatttagatatgaaaattacagaatttgcgcaagatgaatatcaatatgaattgttaacaccagaacaaaaatctatgatagattatcaaattggtgatggaggaagaaaaacatttcttttatattttggttggattccaccaattattttgtcattaatttcttgtatgtttgtaaaaataattaaatttttatataanaagacgtaa

SEQ ID NO: 26676 - protein, 148 aa, Unknown
  Obtained from environmental sample
  misc_feature (1)..(148): Xaa is any amino acid
MKYFIWFFFYFLFIFLLGVFDFPFPVFINIFIFFFIVILMPISLYLIFFKIKNNLFIYFICVFFAYYLFYIGTSIITEKYLDMKITEFAQDEYQYELLTPEQKSMIDYQIGDGGRKTFLLYFGWIPPIILSLISCMFVKIIKFLYXKT

SEQ ID NO: 26677 - DNA, 426 bp, Unknown
  Obtained from environmental sample
  misc_feature (1)..(426): n is a, c, g, or t
atgacgcctgtcgggaggcttttggatcagaacattgtgaaggagcttgccgggagggaatcgctaatactcctctgcggccgttacaaggggatcgaccagcgcatagtcgataattacgtcgacatggaactctccataggcgactacgtgctgtccggcggcgagattcccgctatggctgtggtagacgcggtgacgcgcctgatccccggggttctaggcaacatggactccgcggagactgactcgtttcacagcgggttgttgagccacccgcactacacgaggccggaggtttttgagggaatacgcgtgccggaggtgcttatcagcggccaccacgcgaacattagggagtggcaaaaagagaaatcgatagagataacgagggagcgtaggcctgatttgcttaaaaaaccataa

SEQ ID NO: 26678 - protein, 141 aa, Unknown
  Obtained from environmental sample
  DOMAIN (1)...(135): tRNA (Guanine-1)-methyltransferase
  misc_feature (1)..(141): Xaa is any amino acid
MTPVGRLLDQNIVKELAGRESLILLCGRYKGIDQRIVDNYVDMELSIGDYVLSGGEIPAMAVVDAVTRLIPGVLGNMDSAETDSFHSGLLSHPHYTRPEVFEGIRVPEVLISGHHANIREWQKEKSIEITRERRPDLLKKP

SEQ ID NO: 26679 - DNA, 357 bp, Unknown
  Obtained from environmental sample
  misc_feature (1)..(357): n is a, c, g, or t
atgatgaacgacatcatcagggcagtggagagaaagcagttgcaggaccgcaaggtcgagtacggcgcgggcgatactatcaacgtctcttttaagatccgcgagggcgacaaggagcgcatccagcagtttcagggcgtcgttgtgcagacgagcggttccgggttgggcgagaccgttaccgtccgcaaatcgagcggaaacgtctacgttgagcgtatcttcccgatgcactctccgcttatagccgagatcaaggtgctcaagcgcgggcgcgtgcgtagggcgaagctctactacttgcgcgggctgaccggaaaggctacgcgtattaaggagaagaaggcgaaagcataa

SEQ ID NO: 26680 - protein, 118 aa, Unknown
  Obtained from environmental sample
  DOMAIN (3)...(115): Ribosomal protein L19
  misc_feature (1)..(118): Xaa is any amino acid
MMNDIIRAVERKQLQDRKVEYGAGDTINVSFKIREGDKERIQQFQGVVVQTSGSGLGETVTVRKSSGNVYVERIFPMHSPLIAEIKVLKRGRVRRAKLYYLRGLTGKATRIKEKKAKA

SEQ ID NO: 26681 - DNA, 528 bp, Unknown
  Obtained from environmental sample
  misc_feature (1)..(528): n is a, c, g, or t
atgatgatacttttgcaactcttaaagagttttttgataatcggcgtcggcgcctacggcggcgggttggtcactatccccatgatagaacatcaggccgtcgccgtccacgggtggataaccgcctcagaactttcggaactcatagccgtggcgcagatgacccccggcccgatagggatcaacgccgccacctacaccggctacagggtcgccggaatcgccggcgctaccgccgccaccttagggtttgtgattccgtcgctagtcctatgcctgacgctggtgtacatcctatcaaggttcggcggcgttacgtgggtggagaccctgaagaagtccgtccaacccgccgtcgccggactcatcatagccgcggtgctgacctacggaagggcggcggtgacggacgtttgggcggcggttatcgcagtcgcggcctttgtgatacttctcctatcaaaagacaaaatacacccggcgctgttaatccttttgggagggttcgtcggggtgtttatttactaa

SEQ ID NO: 26682 - protein, 175 aa, Unknown
  Obtained from environmental sample
  DOMAIN (2)...(175): Chromate transporter
  misc_feature (1)..(175): Xaa is any amino acid
MMILLQLLKSFLIIGVGAYGGGLVTIPMIEHQAVAVHGWITASELSELIAVAQMTPGPIGINAATYTGYRVAGIAGATAATLGFVIPSLVLCLTLVYILSRFGGVTWVETLKKSVQPAVAGLIIAAVLTYGRAAVTDVWAAVIAVAAFVILLLSKDKIHPALLILLGGFVGVFIY

SEQ ID NO: 26683 - DNA, 381 bp, Unknown
  Obtained from environmental sample
  misc_feature (1)..(381): n is a, c, g, or t
gtgtgggtgcgccgcctttcgtcccgcgcctcgggcccgcgcggcccgggcttcccttggccgcgccctcggcgcgtctcacagggcgttccgttgccctgcgcggctgccctcctgcgtccccgcatcgtccaaacggaccgcgcgcggcgccggaatgttcgccggcttcccatcgcccacgcccttcggcctcggcttagggaccggctgacccagcgcggattgaccttgcgctggaaaccttggtcttacggcggacggggttctcgcccgtcttctcgctacttatgccgacagagtctcttcccatgcctccagccgtcctcgcggtcggccttcgcgggcctagggaatgctcccctaccatcaatgaattga

SEQ ID NO: 26684 - protein, 126 aa, Unknown
  Obtained from environmental sample
  misc_feature (1)..(126): Xaa is any amino acid
MWVRRLSSRASGPRGPGFPWPRPRRVSQGVPLPCAAALLRPRIVQTDRARRRNVRRLPIAHALRPRLRDRLTQRGLTLRWKPWSYGGRGSRPSSRYLCRQSLFPCLQPSSRSAFAGLGNAPLPSMN

SEQ ID NO: 26685 - DNA, 372 bp, Unknown
  Obtained from environmental sample
  misc_feature (1)..(372): n is a, c, g, or t
ttggcctttcacccctaccctcgggtcatccaagcggttttcaacccacactggttcgggcctccatccggtgtcacccggacttcgccctgcccaaggatagatcatcccgtttcgcgtctgctcccagcgactgcggcgccctgttcggactcggtttccctgcggctccgcctcgtcggcttagcctcgccgctgaaagcaactggccggctcattatgcaaaaggcacgaggtcccacttgctcgcgcaatagtggtcccactgcttgtagattgacggtttcaggttctgtttcactcccctggccggggttcttttcgcctttccctcacggtactggttcgctatcggtctggcggcctgtttag

SEQ ID NO: 26686 - protein, 123 aa, Unknown
  Obtained from environmental sample
  misc_feature (1)..(123): Xaa is any amino acid
MAFHPYPRVIQAVFNPHWFGPPSGVTRTSPCPRIDHPVSRLLPATAAPCSDSVSLRLRLVGLASPLKATGRLIMQKARGPTCSRNSGPTACRLTVSGSVSLPWPGFFSPFPHGTGSLSVWRPV

SEQ ID NO: 26687 - DNA, 414 bp, Unknown
  Obtained from environmental sample
  misc_feature (1)..(414): n is a, c, g, or t
atgactacacggtggatgacagctatgaatgcggccatcgagcttttggggactgaggtaaaatcgtttcgggatgggagaatctcttttcccgacgcctgggcggaaatagtacacggggaagtttggctcaattccctccagattgcggaaaatcccttttcttcgatattcaaccatgatccggctcgaaaaaaaaagctccttctccataaagacgagataaaacgcctccaccggaaaaccgaggaaaaaggctataccttgattcctctttcattttacttcaaaaagggccgggttaaggtggaattgggtctttgcaaggggaaaaaggcctatgataaacgggcggatatacgggagcgggatttaaaacgggaagtatcccgtgaattccggcacaattactaa

SEQ ID NO: 26688 - protein, 137 aa, Unknown
  Obtained from environmental sample
  DOMAIN (1)...(58): SmpB protein
  misc_feature (1)..(137): Xaa is any amino acid
MTTRWMTAMNAAIELLGTEVKSFRDGRISFPDAWAEIVHGEVWLNSLQIAENPFSSIFNHDPARKKKLLLHKDEIKRLHRKTEEKGYTLIPLSFYFKKGRVKVELGLCKGKKAYDKRADIRERDLKREVSREFRHNY

SEQ ID NO: 26689 - DNA, 492 bp, Unknown
  Obtained from environmental sample
  misc_feature (1)..(492): n is a, c, g, or t
gtgattcttccgattagcatttacggttctccaattttgagaaaaaaagccgaacctgttaaggagataaccccagagcttgtggaactctcgcataatatgcttgaaactatgtacaaagctaatggcataggcttggctgcgccgcaagttggcaaaaatattcgccttgttgtgatagatttgtcaaaagaagaagatgaacgcagacccattgtgcttttcaatccagaagttgtgcccgaagaaggcgaaaatcctattgaaatagatgaagaaggctgcctttccgtacctgatatttgggcaaatgtctcaagaccgggtcgggtgagcataacttacacgaacgaaaaaggcgaaaagattgctctgcaaaacataactggcaaatttgcccgctgtgcccagcacgaacaagaccatttgaacggagttttattcacagataaaatatccgttgcagataaagctatgaacgcatctaaatga

SEQ ID NO: 26690 - protein, 163 aa, Unknown
  Obtained from environmental sample
  DOMAIN (2)...(158): Polypeptide deformylase
  misc_feature (1)..(163): Xaa is any amino acid
MILPISIYGSPILRKKAEPVKEITPELVELSHNMLETMYKANGIGLAAPQVGKNIRLVVIDLSKEEDERRPIVLFNPEVVPEEGENPIEIDEEGCLSVPDIWANVSRPGRVSITYTNEKGEKIALQNITGKFARCAQHEQDHLNGVLFTDKISVADKAMNASK

SEQ ID NO: 26691 - DNA, 801 bp, Unknown
  Obtained from environmental sample
  misc_feature (1)..(801): n is a, c, g, or t
ttgcgaaaaccacgggttttcccccgaaaggccgctcgtacgcaggtgaggagttttatcgccgatctttccgccgaaggagcccgcttcgtaagcgtcaaccgctctctttcttccatccgtggcttttaccgctggatgctgcgtttcggcttccgtaatgacgatccctcttcccccttaaaaaatctaaaaacgccaaaaacgcttcccgtctttctttgggaagcggagatggcccacttttcaacgctccccgaaaaggcggggatactctggcccgaacgggacaaggcgctgatccttgctatgtactccggcggccttcgcatatccgaggccgcttcaataaatcttaaaaacctggcccatgatttttcaggcgcgaggattatagggaagggaaacaaggagcggcaggtgtttttctccgaggaagcgaaagaagccctgctcgcatatctgcctgtcaggaaggcccgtataaaagcggaacgcccaacggacaggctctttatcagcctcaagggagatccgatttccgttcccggcctgcgctggattattacaaagtattcggaaagatcgggactggataaaaatattcacccacactccctgcgccacagcttcgcgacccatttggtaaactctggctgtgacgtgcgggtggtgcaggaactcctgggccatgccagtatcagcacaacacagcgctatacccatgttaacatggagaatttaaaaaaggtttacaaaaaggcgcatccacacggaggagaaaaaagtgaaggcgaataa

SEQ ID NO: 26692 - protein, 266 aa, Unknown
  Obtained from environmental sample
  DOMAIN (79)...(250): Phage integrase family
  misc_feature (1)..(266): Xaa is any amino acid
MRKPRVFPRKAARTQVRSFIADLSAEGARFVSVNRSLSSIRGFYRWMLRFGFRNDDPSSPLKNLKTPKTLPVFLWEAEMAHFSTLPEKAGILWPERDKALILAMYSGGLRISEAASINLKNLAHDFSGARIIGKGNKERQVFFSEEAKEALLAYLPVRKARIKAERPTDRLFISLKGDPISVPGLRWIITKYSERSGLDKNIHPHSLRHSFATHLVNSGCDVRVVQELLGHASISTTQRYTHVNMENLKKVYKKAHPHGGEKSEGE

SEQ ID NO: 26693 - DNA, 462 bp, Unknown
  Obtained from environmental sample
  misc_feature (1)..(462): n is a, c, g, or t
gtggatgaggttgttaaaacgctggaatcctttaagggagctctggatgaggaaacggattatgtctgtgaaaaatgtggcaggaagcttgtaaaaaaacttggccgcttcggtttcttcctggcctgcccaggtttccccgaatgcaagaacaccaagtcaatacctctggccaaatgcccgaaatgttccggggatgtagtttcccggaaaacgaagggccgtggtaaggagttttatggatgcaccaggtaccccgaatgcgatttcatcagccattttaagcctataaatcaaaactgtcccaaatgcgggcagtttttggttgaaaaatacgacaagaaaaacgggagccacaaggcctgtataaacccgcaatgcgattttcttcattccagagatgatgtaggcgacgatgttggctataatagttatagcaaggatgaaaacaatggcgaataa

SEQ ID NO: 26694 - protein, 153 aa, Unknown
  Obtained from environmental sample
  DOMAIN (98)...(136): Topoisomerase DNA binding C4 zinc finger
  misc_feature (1)..(153): Xaa is any amino acid
MDEVVKTLESFKGALDEETDYVCEKCGRKLVKKLGRFGFFLACPGFPECKNTKSIPLAKCPKCSGDVVSRKTKGRGKEFYGCTRYPECDFISHFKPINQNCPKCGQFLVEKYDKKNGSHKACINPQCDFLHSRDDVGDDVGYNSYSKDENNGE

SEQ ID NO: 26695 - DNA, 945 bp, Unknown
  Obtained from environmental sample
  misc_feature (1)..(945): n is a, c, g, or t
atggctgaaaacgggacttctcagggttatatacccatcaatactgttgatcctccttcgatagtattggaattaatctatcagcttaaaataaaggatgtgatgactaccgctgtgatttacgccggaaaggatgataccttgcggcatatccaggcgataatgcgggaaaactacattagcggggttcccatcaccgaaggcagcaaactcctgggactggtctccattgatgatattgttactgctctggacatgggatgtattgaagcaaaggccgaagaaaagatgacccgggatgtcatcgttttacaggatgacatgcccctttcctttgctgtttcctatttaaacaagtaccggtacagccgttatccggtggtcaacaaacagcaggaactggtgggaattattacttccaaggatgtgatcagcgccctgttggtggaaatgaatcgggaggtactccgtttggaaaggacaaatcaaaaaaacgatatgccccggagtttttcggaaatggaatttaccactgcccactacgattttgagttggcgggcagggcttccgcggagattaaaaaggcgcttaaacagcgcaattttgatcaaaagttaatccggcgcgtcgccattgcaagttatgagctggagataaatcaggttgttcattccaacggcggcgttatgcgatgttccattctgccggataaggtggttatcacggccgccgacacaggtcccggcattgaagacgtaaatctggcgctcaaggaagggtactcaaccgcgaatgaatatgtccgctccatcggttttggcgcgggaatggggcttgcaaacacaaaacgcgtttcggacgaatttacaattgagtcggcgctgggtaaaggcactaccgtgcgctccgttgtctttgtaaattcatcaaaggacgaatcgtga

SEQ ID NO: 26696 - protein, 314 aa, Unknown
  Obtained from environmental sample
  DOMAIN (205)...(308): Histidine kinase-, DNA gyrase B-, and HSP90-like ATPase
  misc_feature (1)..(314): Xaa is any amino acid
MAENGTSQGYIPINTVDPPSIVLELIYQLKIKDVMTTAVIYAGKDDTLRHIQAIMRENYISGVPITEGSKLLGLVSIDDIVTALDMGCIEAKAEEKMTRDVIVLQDDMPLSFAVSYLNKYRYSRYPVVNKQQELVGIITSKDVISALLVEMNREVLRLERTNQKNDMPRSFSEMEFTTAHYDFELAGRASAEIKKALKQRNFDQKLIRRVAIASYELEINQVVHSNGGVMRCSILPDKVVITAADTGPGIEDVNLALKEGYSTANEYVRSIGFGAGMGLANTKRVSDEFTIESALGKGTTVRSVVFVNSSKDES

SEQ ID NO: 26697 - DNA, 345 bp, Unknown
  Obtained from environmental sample
  misc_feature (1)..(345): n is a, c, g, or t
gtgaaaatatcagaagttgccgccgctttaaatgcggaaatctgccaaagtgaatttgaagacgttgaagtttccggcgcatatacgtccgatcttctttcagacgtaatggcgtacgcaaaggacggcggcgcgcttatcaccattcaagctcacaaaaacacagtcgcggtcgcgtctctggtgaatatttccgttcttgttatctgcaactcgcgtccgcttcccgacgatatgctggaagcggcaaaaagcgagggaatcgctgttatccgcacaaaggaaaatcaatttactgtgtccggcaaattatggagtctgtttcatgctggcggatctgcataa

SEQ ID NO: 26698 - protein, 114 aa, Unknown
  Obtained from environmental sample
  DOMAIN (5)...(107): DRTGG domain
  misc_feature (1)..(114): Xaa is any amino acid
MKISEVAAALNAEICQSEFEDVEVSGAYTSDLLSDVMAYAKDGGALITIQAHKNTVAVASLVNISVLVICNSRPLPDDMLEAAKSEGIAVIRTKENQFTVSGKLWSLFHAGGSA

SEQ ID NO: 26699 - DNA, 624 bp, Unknown
  Obtained from environmental sample
  misc_feature (1)..(624): n is a, c, g, or t
gtgcgcgactggacagggtttagccctgtgattttttcggggcgcacgctgntagagaggataactgatccgaaaatcaaaatnggagtcgttatngtcgctgtcggcgggggcgctataaatatatttgataaagacaacaaagaagctatggcttaccttgccaaacaggaacagtacatgaaagatatttcggcggagtacggaaataatccttatcagcgtctggtggatttagcgaaacaggcgcagaaagccggagtaataaaaggtattttgttccatcagggtgaatcggggaaagcgaaagctccgggatacgccaatggcagcgataacgccaactggggtattgccgtaaaggctgtttacgacaatcttctcgttgatcttaatttaaagcccaactcattacctttccttgctggacaggcggtaaataacaacagcgtcataattaacaaactgccggatataatgcccggcgtcgcccatataatttcctcaaaaggattaagccagggcaaggatcaatggcatttcagctatgacggttatgaaaagctcggcatccgttacggtgaaaagatgctggaattaatttacagtgaacgcacatggtga

SEQ ID NO: 26700 - protein, 207 aa, Unknown
  Obtained from environmental sample
  misc_feature (1)..(207): Xaa is any amino acid
MRDWTGFSPVIFSGRTLXERITDPKIKXGVVXVAVGGGAINIFDKDNKEAMAYLAKQEQYMKDISAEYGNNPYQRLVDLAKQAQKAGVIKGILFHQGESGKAKAPGYANGSDNANWGIAVKAVYDNLLVDLNLKPNSLPFLAGQAVNNNSVIINKLPDIMPGVAHIISSKGLSQGKDQWHFSYDGYEKLGIRYGEKMLELIYSERTW

SEQ ID NO: 26701 - DNA, 378 bp, Unknown
  Obtained from environmental sample
  misc_feature (1)..(378): n is a, c, g, or t
ttgaaacgcctgccttcgcatgggttcacgggaatgattaaaagcgcccaatttaatatcaaacgcatgaaatctgcatgcacgggcggctttttggaagcgacagatacggcggaataccttgtccgcaagggacttcctttccgagccgcccacgaaaccgccgcttctttggtgcgtgattgtatcgaggcgggacataaacatattggcgcattaacgctcgcgcaattaaagaaacattccaaactttttgaggaagatatttacaaactgataacaccttcagcatgcgtaaaagcgcgcgatatagcggggggacccgctcccaaagaagtccgcaggcagataaaactgttacgcaaaaaaatcaattaa

SEQ ID NO: 26702 - protein, 125 aa, Unknown
  Obtained from environmental sample
  misc_feature (1)..(125): Xaa is any amino acid
MKRLPSHGFTGMIKSAQFNIKRMKSACTGGFLEATDTAEYLVRKGLPFRAAHETAASLVRDCIEAGHKHIGALTLAQLKKHSKLFEEDIYKLITPSACVKARDIAGGPAPKEVRRQIKLLRKKIN

SEQ ID NO: 26703 - DNA, 891 bp, Unknown
  Obtained from environmental sample
  misc_feature (1)..(891): n is a, c, g, or t
atgagcgaaaaagaaaaatttataacgcttatagaaaaacttattgcgcttgcggcggtcaggttaagcgacgatgttatggctcggctggaagaaatgcgcaaagccgaagactcagccttacaaaaatcaatctacgacagttattttgaaaatctggcgttagctgaaaaacttaaccgcccatgttgtcaggatacgggtatgcttcaattctttgtaaaagcgggaaccgcattccctcatttggacattacggcggaagcgataaccgaagcggtgcgcagagcgaccgtaagcgtcccattaagaccgaacgctgtcaactattttgatgaaatcaatacaggcgacaacacgggagagcgaacgccgtggatagattgggaaattattcccgactccaaagaaatggaaataactctgtacttttcgggcgcaggctgcagtcttccggcacaggcgaaagtttttaagccgtcggacggactggaggcgattattccctttgtgtacgacatcgtgtcagggccgggaatcaacgcctgccctcccctgcttgtgggaataggacttgggcacaacatagaaaacgcatcggtactttcaaaaaaagcaattttaaggccactaggaacaaaacacccccacctaaaaggagcggaacttgaaaaacagctaacagacggtcttaacagtcttggcatgggcgctcagggattaagaggcaatcaggcggtgatgggagtgcatattgaatcatcgacaagacacacggcgacgagggcatgcgcggttaatgtttcgtgttacacgctaaggcgcggaattatccgccttaacagcgatctctcttacgagctgacaggttttaagggagcgaaaatttga

SEQ ID NO: 26704 - protein, 296 aa, Unknown
  Obtained from environmental sample
  DOMAIN (7)...(280): Fumarate hydratase (Fumerase)
  misc_feature (1)..(296): Xaa is any amino acid
MSEKEKFITLIEKLIALAAVRLSDDVMARLEEMRKAEDSALQKSIYDSYFENLALAEKLNRPCCQDTGMLQFFVKAGTAFPHLDITAEAITEAVRRATVSVPLRPNAVNYFDEINTGDNTGERTPWIDWEIIPDSKEMEITLYFSGAGCSLPAQAKVFKPSDGLEAIIPFVYDIVSGPGINACPPLLVGIGLGHNIENASVLSKKAILRPLGTKHPHLKGAELEKQLTDGLNSLGMGAQGLRGNQAVMGVHIESSTRHTATRACAVNVSCYTLRRGIIRLNSDLSYELTGFKGAKI

SEQ ID NO: 26705 - DNA, 402 bp, Unknown
  Obtained from environmental sample
  misc_feature (1)..(402): n is a, c, g, or t
ttgaacacggttaatttgcctttgaacagcgatgatattctcaagtttcatataggagacataatttatctttccggaaaaatcgtaacgggaagggacgaggtttaccacagggtcgtagaagaggatattatgccgcctgtggatttaaacggaatggcgatttatcacgcgggacctattgtaaaaacaacgggaaaaaatcacgagcttgtttcgatagggccgactacttccatgcgtatggaaaaatgggcggcggattttattaaaaaaacaggcgtaaaagtgatgatcggcaagggcggcatgggagagaaaactacgtcggcatgccgcgagttaggcgcaattcactgcgtttaccctggcgggtgcgcggtgcgggagcgagtcaaatag

SEQ ID NO: 26706 - protein, 133 aa, Unknown
  Obtained from environmental sample
  DOMAIN (1)...(133): Fumarase C-terminus
  misc_feature (1)..(133): Xaa is any amino acid
MNTVNLPLNSDDILKFHIGDIIYLSGKIVTGRDEVYHRVVEEDIMPPVDLNGMAIYHAGPIVKTTGKNHELVSIGPTTSMRMEKWAADFIKKTGVKVMIGKGGMGEKTTSACRELGAIHCVYPGGCAVRERVK

SEQ ID NO: 26707 - DNA, 549 bp, Unknown
  Obtained from environmental sample
  misc_feature (1)..(549): n is a, c, g, or t
ttgaaggagcagggcggcgccgtcatagacgagctgatccctactatgatgagcataggcgacgtccacagggtattgcagaatcttctgagggagcgcatttcaataagggacctgttattgatattagagacgctggccggtgtggcgccgcgcagcaagaataccgatgtgcagaccgaatacgtgagaaacgtcctcgcgccgcagatatgcgagacctacaagaacgacgacggcgttattccggtaataacgttggaccccaatctggaagcgaagctggagggttccatacaggaaagcgaggggattttccgtttttctttatccccggccgacgcgaatcgtatattagaagctgcgggcgtccagatagagggagccaaacaggccggcgagtatccgatattaatatgttcgcccaccgtgcgtccgcagttaaaacggttgacagaggcgaatttcccggaacttgtggtgttgtcgtacaatgagatagtgccggggatagagattcggtcgttgggtatgattacgctggaataa

SEQ ID NO: 26708 - protein, 182 aa, Unknown
  Obtained from environmental sample
  DOMAIN (1)...(173): FHIPEP family
  misc_feature (1)..(182): Xaa is any amino acid
MKEQGGAVIDELIPTMMSIGDVHRVLQNLLRERISIRDLLLILETLAGVAPRSKNTDVQTEYVRNVLAPQICETYKNDDGVIPVITLDPNLEAKLEGSIQESEGIFRFSLSPADANRILEAAGVQIEGAKQAGEYPILICSPTVRPQLKRLTEANFPELVVLSYNEIVPGIEIRSLGMITLE

SEQ ID NO: 26709 - DNA, 795 bp, Unknown
  Obtained from environmental sample
  misc_feature (1)..(795): n is a, c, g, or t
gtgcgtttagctgttgaaaaacacgatgcctctttggttgtttttgacgaggatttaagcggctcacaggtgcgaaatttggaaaaacgtttgccagagataaaagtgctggatagaacggggcttatacttgatatttttgcacatcacgcaaaaactgcggaaagccgccttatggtggaagtggcgcaaatgcagtatttaatgccacgcctcacacgtgcctgggttcacctttcaaggcaggtgggcacgggcggagcaagccccggaattggaatgcgtggacctggcgaaactcagttggaagtggataggcgtttggtgcgcaaacgaattcaggaacttaaagccaagttgaaaaaaatagagcgtgacagggaaaaccaagaaaggcgaagggaaaatacattccacgttggcttggtaggctacacaaatgctgggaaaagcacacttgcaaatcgcctaacaggtgcaaacgtatatgtggaagacaaactctttgcaaccttggatagcacaacccgcaaatttcatttagcagacggtcaagacattatattgagtgatacggttggctttattcgcaaattgccgcatcacttggtggaaacattcaaaagcacacttggcgttgccgccaatgcagattgcattcttgaggttatagattccgctgccgccgattacaaagagcatattgaagtcagtaaaaaaattctagacgaattggtggatccctacattccccgtttttgcgtgttcaataaaaccgaatgccgccgccgatga

SEQ ID NO: 26710 - protein, 264 aa, Unknown
  Obtained from environmental sample
  DOMAIN (138)...(260): GTPase of unknown function
  misc_feature (1)..(264): Xaa is any amino acid
MRLAVEKHDASLVVFDEDLSGSQVRNLEKRLPEIKVLDRTGLILDIFAHHAKTAESRLMVEVAQMQYLMPRLTRAWVHLSRQVGTGGASPGIGMRGPGETQLEVDRRLVRKRIQELKAKLKKIERDRENQERRRENTFHVGLVGYTNAGKSTLANRLTGANVYVEDKLFATLDSTTRKFHLADGQDIILSDTVGFIRKLPHHLVETFKSTLGVAANADCILEVIDSAAADYKEHIEVSKKILDELVDPYIPRFCVFNKTECRRR

SEQ ID NO: 26711 - DNA, 792 bp, Unknown
  Obtained from environmental sample
  misc_feature (1)..(792): n is a, c, g, or t
gtggaatgtgcaacaggatcttgtgataacccaactgattttgcgtaccattttagccctgaaagcaataaagaccagcttaaaaataaagatttcaaggaaattcgcgtattggtatcaaccgacgtattgagcgaagggcagaatctgcaggattgccatatcgtagtaaactatgatttgccctgggcaattattaaattaatccaaagggcggggcgtgttgaccgcatcgggcagaaacatgataaaatttggtgttattcatttttacccgaagaaggccttgaaacaattcttgatcttcgcgggcgtctgcaaagacgcataaaggaaaatgcggaaaccgtaggctccgatgaagtattttttgacggcgatcctgtaaacttaaaagatttatacaacgaaaaagcgggtatttttgatgatgaagacgatgtagaagttgatcttgcttcttattgctatcagctctggaaaaacggaatcgacgcccatcctgaattaaaaacaaaaatccccgccatgcccgatgccgtatacgccgcaaaaaaagcggaaatttcttcggcttcaccgtttggagaactggattcaagtttcggagaattacagatccaaaaagcggaaacaggcgcgattgtatacgcaagaaccgttgatgataacgactgtctgacatggatagacgaaaaaggaaaaatagtaacgcaatcgcagtttgaaatactaaaagcgttaaaatgccctattggcgagcctgccctaaacggtcgaaaatcatcatga

SEQ ID NO: 26712 - protein, 263 aa, Unknown
  Obtained from environmental sample
  DOMAIN (7)...(79): Helicase conserved C-terminal domain
  misc_feature (1)..(263): Xaa is any amino acid
MECATGSCDNPTDFAYHFSPESNKDQLKNKDFKEIRVLVSTDVLSEGQNLQDCHIVVNYDLPWAIIKLIQRAGRVDRIGQKHDKIWCYSFLPEEGLETILDLRGRLQRRIKENAETVGSDEVFFDGDPVNLKDLYNEKAGIFDDEDDVEVDLASYCYQLWKNGIDAHPELKTKIPAMPDAVYAAKKAEISSASPFGELDSSFGELQIQKAETGAIVYARTVDDNDCLTWIDEKGKIVTQSQFEILKALKCPIGEPALNGRKSS

SEQ ID NO: 26713 - DNA, 1059 bp, Unknown
  Obtained from environmental sample
  misc_feature (1)..(1059): n is a, c, g, or t
ttgaaaaagcaattatcggacgattgggccgaattaatgcggttctttttagtccgccgtacccgaagttttatcaaagctaactattccaaaaaagacaaaaaaacaggcagaatgtacatagagtttgcgcctaacgatgaaggcgtaatagaaaaaagctttttccccgaccgtatccctgcaaaagttgagtattcttttaataaagacgacaaagacgaccaatacgcacggctttattcagccgatgttgtaaatataatcaatgaattgcttctgccccgttacggaattggacaggatatttatgaaaacaaaacaaccatcaaaaacataaaacccgaagaagaaaaaattaaaaacaatcttgccaaagccggtaaacagcttcgtggttttgcccgtaccaatcttttcaaacgccttgaaagttcaggatattctttccttctttcaataagccggcatattctccgtaattatttatttatatatgctattgataataatttggaatttcctataggaaaacaggaaggggacataattaacgatatactgtacagcgatgaagacactgacgctgattcgggaattgaacaatttgtatacgatacggaagaatatcgaaaactggctgagaaataccaccggacgctttctaatacaaaagaaaaatatgaatggatacggagcgaactttttaataaaaaacttaaagaagatttggaaacggataccacacaactattaaaaataatggaattgggtaaatcgtgggatcaggcaaaagacaggcagcttggggctttatatgaactgcttacaaaaaaatatccaaaagaaaaagtcttaatattcagtcaatttgccgataccgcatattatttgttaatacgcttaaaaaacgagggcttgccgatgtggaatgtgcaacaggatcttgtgataacccaactgattttgcgtaccattttagccctgaaagcaataaagaccagcttaaaaataaagatttcaaggaaattcgcgtattggtatcaaccgacgtattga

SEQ ID NO: 26714 - protein, 352 aa, Unknown
  Obtained from environmental sample
  misc_feature (1)..(352): Xaa is any amino acid
MKKQLSDDWAELMRFFLVRRTRSFIKANYSKKDKKTGRMYIEFAPNDEGVIEKSFFPDRIPAKVEYSFNKDDKDDQYARLYSADVVNIINELLLPRYGIGQDIYENKTTIKNIKPEEEKIKNNLAKAGKQLRGFARTNLFKRLESSGYSFLLSISRHILRNYLFIYAIDNNLEFPIGKQEGDIINDILYSDEDTDADSGIEQFVYDTEEYRKLAEKYHRTLSNTKEKYEWIRSELFNKKLKEDLETDTTQLLKIMELGKSWDQAKDRQLGALYELLTKKYPKEKVLIFSQFADTAYYLLIRLKNEGLPMWNVQQDLVITQLILRTILALKAIKTSLKIKISRKFAYWYQPTY

SEQ ID NO: 26715 - DNA, 756 bp, Unknown
  Obtained from environmental sample
  misc_feature (1)..(756): n is a, c, g, or t
gtggccgtggccttttccggcggggttgactccacctttctgttgagaacggctcacgacgttctgcgcgaccgcgccatagccgtcaccgcgcgttcccccgcctttccgcggcgtgaattgacggcggcgtccgcgttttgcgaaaacgagggcatacgccatattatatgcgatagcgacgaactgcgtatagacggcttctcgcaaaatccggttaaccgctgttatctatgcaagaccgagttattcaaaaaaatacgggctatagcgaaagaagagggcgttgagcacatcgtcgagggctccaatgtcgacgacgacggcgactaccgcccaggtctcgaggctgtcagggagcaggggataaagagcccgctccgtcacgtaggattggcaaaggcggagattcgcctgttatcaaaagagatggggctcgcggtgtgggacaagcccccgttcgcctgcctcgcctcacgctttccttacggcgagtccatcactgcggaaaaattgaacatgatcgatcaagcggagcaatatctgttagacatgggattgaaacaagtgcgggtgcgccatcatggcggggtggcgcggatagagactgacgaggcgggatttcagatattggttgacagagaaaacagagagaagatttatacgaaaataaaggagtgcggattcacatacgtgtccgttgacttgctgggttaccgcgtcggaagtatgaatgagacgctgccgtcggcatag

SEQ ID NO: 26716 - protein, 251 aa, Unknown
  Obtained from environmental sample
  DOMAIN (3)...(145): ExsB
  misc_feature (1)..(251): Xaa is any amino acid
MAVAFSGGVDSTFLLRTAHDVLRDRAIAVTARSPAFPRRELTAASAFCENEGIRHIICDSDELRIDGFSQNPVNRCYLCKTELFKKIRAIAKEEGVEHIVEGSNVDDDGDYRPGLEAVREQGIKSPLRHVGLAKAEIRLLSKEMGLAVWDKPPFACLASRFPYGESITAEKLNMIDQAEQYLLDMGLKQVRVRHHGGVARIETDEAGFQILVDRENREKIYTKIKECGFTYVSVDLLGYRVGSMNETLPSA

SEQ ID NO: 26717 - DNA, 864 bp, Unknown
  Obtained from environmental sample
  misc_feature (1)..(864): n is a, c, g, or t
gtgctggcgaagatagaggctaggaatccgaccttttccgtcaaatgccgcataggcgcggcgcttgttgaggacgcggagaagcgcggcgttctgaagccgggcgtgtcgattttggagcccacgtcggggaacacgggcatcgcccttgcttacgtggcggcggccaagggttatcccataaccctgaccatgccggagacgatgagtatagagcggcggcgcgttttggccattttcggggcgcatttggagctgaccccgggggcgcagggcatgaagggcgccatagcgaaggcggaggagcttaaggcggcgagtccggacaagtacttcataccgcagcaatttgagaatccggccaatccggccatccacgagaagaccaccggtccggagacctgggacgccacgaacggtgccgtggacgtgttcgtcgccggcgtcggtacgggcgggaccgtcacgggtgtttcgcggtacataaagaatactaagggcaagaagataaccaccgtggcggtcgagccggaggagtcgccggtgataacccaaacgttgaacaagcaggacgtcaagccggggccgcacaagatccaggggatcggcgcgggtttcgttcccaagaatctcgacctgagcttggtggacagggtcgagacggtctcctccgcggaagcggtggagttcgcccgtcgtctggcgagggaggagggcattttctgcggtataagttccggcgcggcggcggcggcggcggtcaggctggcggcgttgcctgaattcgagggcaagaccatcgtggtggtccttcctgacaccggcgagcggtacctgagttcggtgctgtttgaaggaatttga

SEQ ID NO: 26718 - protein, 287 aa, Unknown
  Obtained from environmental sample
  DOMAIN (2)...(274): Pyridoxal-phosphate dependent enzyme
  misc_feature (1)..(287): Xaa is any amino acid
MLAKIEARNPTFSVKCRIGAALVEDAEKRGVLKPGVSILEPTSGNTGIALAYVAAAKGYPITLTMPETMSIERRRVLAIFGAHLELTPGAQGMKGAIAKAEELKAASPDKYFIPQQFENPANPAIHEKTTGPETWDATNGAVDVFVAGVGTGGTVTGVSRYIKNTKGKKITTVAVEPEESPVITQTLNKQDVKPGPHKIQGIGAGFVPKNLDLSLVDRVETVSSAEAVEFARRLAREEGIFCGISSGAAAAAAVRLAALPEFEGKTIVVVLPDTGERYLSSVLFEGI

SEQ ID NO: 26719 - DNA, 588 bp, Unknown
  Obtained from environmental sample
  misc_feature (1)..(588): n is a, c, g, or t
atgcgttttatccgatatttcgtggtaatttggacttttttctttgtgtatacatttttttcctttttttgggggcagaatggtgtgtacacccggaaacatctggaggctgaacgcataagactgtatgaaaacctgaaaaaactggaaaatatcaacatggattatcaaaatatcagaaataacctgatacacgatcaggattcgctttccgtttatgcccggcagcttggttacggcagggaaggcgaggaatatatacgcattatgggactgggtattgcgataaacaccgatatgcccacgggccaggtcttttataccgtanacccggtttttatccccgatacagtaattaaaatcatatcgctactattcgcgttggcggtacttacctttctccttatccgtgatttctgcattaaaatatttttcttgacaaaaatcaaaccggcttttatattcagcaaagaggcgccgggctttgcccggataatccaggatcttttggccggatgtttccggattcattggtcggataaagccggatcgctgtaccactttgaacggattagccacttttcttaa

SEQ ID NO: 26720 - protein, 195 aa, Unknown
  Obtained from environmental sample
  DOMAIN (14)...(92): Septum formation initiator
  misc_feature (1)..(195): Xaa is any amino acid
MRFIRYFVVIWTFFFVYTFFSFFWGQNGVYTRKHLEAERIRLYENLKKLENINMDYQNIRNNLIHDQDSLSVYARQLGYGREGEEYIRIMGLGIAINTDMPTGQVFYTVXPVFIPDTVIKIISLLFALAVLTFLLIRDFCIKIFFLTKIKPAFIFSKEAPGFARIIQDLLAGCFRIHWSDKAGSLYHFERISHFS

SEQ ID NO: 26721 - DNA, 870 bp, Unknown
  Obtained from environmental sample
  misc_feature (1)..(870): n is a, c, g, or t
atgtttagcacttatggcggaaacctatcccgcctgcctgaatcctttggcaacctcgcctccctccaggagatagattttagcaacaacaaaactttgcgtttccccgatactttgggcggcttgaagtctttaaaggtctttcatttggagcaagggcatgaagcatttgaggaaccccctccaaaaaacgaaatgtcgctttcaaccacagctccgacagacgattccagtgataagcaagaagacgatgccatacgtttgcctgaatctttcggcgatatttcaacccttgaggatatatgcataaccggaaatctcgccgccctgcctgaatctttcggtaagctccggtccttgaaaaaactcactctacgattttacattgcgttagaatatcactataaagacgggggggcttacggcggcccggcggctcagtcctcatatagtttcaacaccttgcccgaatctttcggcaatctaagctcccttgaacttctttctattgataactgtgatcaactgagtacactgcctgagagcttcggaaatctaagctcgttaaaaagcctttacattgagggcacaaaacttgaatcgttgccggattcattcgggaatcttcgcaaccttgagatactgcaaataggcaaagggatgttcagccatggcggtgaagaacctgctccgcttgccttgcatccgtcaattgggcggctttcaaacttgaaagaactgactattagtgttgctatccagccgattcctgactggcttggcggattaacttcacttaaaacgctatacctgactaccgactcgataacgagcctgccggattcgctatgccgccttcctttcgcttaa

SEQ ID NO: 26722 - protein, 289 aa, Unknown
  Obtained from environmental sample
  misc_feature (1)..(289): Xaa is any amino acid
MFSTYGGNLSRLPESFGNLASLQEIDFSNNKTLRFPDTLGGLKSLKVFHLEQGHEAFEEPPPKNEMSLSTTAPTDDSSDKQEDDAIRLPESFGDISTLEDICITGNLAALPESFGKLRSLKKLTLRFYIALEYHYKDGGAYGGPAAQSSYSFNTLPESFGNLSSLELLSIDNCDQLSTLPESFGNLSSLKSLYIEGTKLESLPDSFGNLRNLEILQIGKGMFSHGGEEPAPLALHPSIGRLSNLKELTISVAIQPIPDWLGGLTSLKTLYLTTDSITSLPDSLCRLPFA

SEQ ID NO: 26723 - DNA, 318 bp, Unknown
  Obtained from environmental sample
  misc_feature (1)..(318): n is a, c, g, or t
ttgccattttgtgaaccgtctttcgcttgttggcgaagacaagcttgttgccagaaaaatacagccaacgctgaatacccgctggaaaaatatccgcttcccacttttgacgatttgcttaaaattgacgacagaacaatccagcaccttatgcgggaattggatgcaccaacactggcagtcgcgctaaaagacgccaaagaagagctgaaagatatctttttaagaaatatgtcagaacgagcttcatgtatgctcaaagaagacattgagtatttgtccccgttaaaaccacagacgagatcaatgaatgtatag

SEQ ID NO: 26724 - protein, 105 aa, Unknown
  Obtained from environmental sample
  DOMAIN (13)...(103): FliG C-terminal domain
  misc_feature (1)..(105): Xaa is any amino acid
MPFCEPSFACWRRQACCQKNTANAEYPLEKYPLPTFDDLLKIDDRTIQHLMRELDAPTLAVALKDAKEELKDIFLRNMSERASCMLKEDIEYLSPLKPQTRSMNV

SEQ ID NO: 26725 - DNA, 993 bp, Unknown
  Obtained from environmental sample
  misc_feature (1)..(993): n is a, c, g, or t
ttgcattttttggctggcagggtctttgccctttcgctgcaacgcggtctaaagatcatttttaccgggacaaaaaaaagaaatcccctgacagataacatagctgttctgtggtgggaattgcgggttttaattaccgtcatgctgatgtttctcttttcccagtcagcccggcacattattgaaattttcagctatttccccggagtgtcaattcttcattcaatcttgtcccagtataaaataaattttgtttttctgtttcttttggctctgatcttttaccttatctgccgtcactttattgccaatggccccagccgccattcagccatttggggaagcatctgctttgctctttcttcagctgttttatcccgtatattgacgggactgcttgatcaaacccggtataattttctttacggaaccctgggaagcctggtaacgctgcttgtgaaagtttttttctttttcatgtttttctttgtttgcgcccagcttgccagcgttctggattcctttgacgcccttctttttatcaagctccacaaggcaagaataaaaaaacacccggggcttttggacaaattgtttttttccccggaaggaaggctgcagaaatatttccgtttttaccatggagggacaactattttttccaggaaagactccggcgaagaggttttctatctccttgatggcgaagtggaagtttttatgctgtctgaagattcaggagaaaagcccattgttttgaaggagggggattttttcggtgaaatgggccatcttctatctgaaagccgcagcgccacaacaaaggcaagatccgacgcttcggttctggttctcccgcccgttcttttcgacgaaatgctaaaatacgatatggccatgggtagggcaatcatggaacgtttgtcgggcaggcttaaggcaatgaacgagcagtacagcgccatggttgatgctgataaaaacgtgttataa

SEQ ID NO: 26726 - protein, 330 aa, Unknown
  Obtained from environmental sample
  DOMAIN (210)...(299): Cyclic nucleotide-binding domain
  misc_feature (1)..(330): Xaa is any amino acid
MHFLAGRVFALSLQRGLKIIFTGTKKRNPLTDNIAVLWWELRVLITVMLMFLFSQSARHIIEIFSYFPGVSILHSILSQYKINFVFLFLLALIFYLICRHFIANGPSRHSAIWGSICFALSSAVLSRILTGLLDQTRYNFLYGTLGSLVTLLVKVFFFFMFFFVCAQLASVLDSFDALLFIKLHKARIKKHPGLLDKLFFSPEGRLQKYFRFYHGGTTIFSRKDSGEEVFYLLDGEVEVFMLSEDSGEKPIVLKEGDFFGEMGHLLSESRSATTKARSDASVLVLPPVLFDEMLKYDMAMGRAIMERLSGRLKAMNEQYSAMVDADKNVL

SEQ ID NO: 26727 - DNA, 393 bp, Unknown
  Obtained from environmental sample
  misc_feature (1)..(393): n is a, c, g, or t
atggcaaaattgagtcttaacgacttaagaaaattaagagaagaaaaaaaagccgaatttaacaaggttaaaaccgacggcaaagagattcagattgttatcggtatgggaacttgcggtatagccgccggggcgaaacaggctctggaagcgtttaataacgagatcaaagaaaaaaaacttacaaattgccgcgtaaaacaaacaggctgtatggggttgtgccattcagagcctaccgtagaaattatagttccgggtatggctcccgtaatttacggcatggtagactcggaagtaacaaaatcgatcattcaaaaacatataatcggcaaggaattgttaaacgattatattttggaacgtcctgccgctgatattttagcttcgtaa

SEQ ID NO: 26728 - protein, 130 aa, Unknown
  Obtained from environmental sample
  misc_feature (1)..(130): Xaa is any amino acid
MAKLSLNDLRKLREEKKAEFNKVKTDGKEIQIVIGMGTCGIAAGAKQALEAFNNEIKEKKLTNCRVKQTGCMGLCHSEPTVEIIVPGMAPVIYGMVDSEVTKSIIQKHIIGKELLNDYILERPAADILAS

SEQ ID NO: 26729 - DNA, 1002 bp, Unknown
  Obtained from environmental sample
  misc_feature (1)..(1002): n is a, c, g, or t
atgcctgagataatgattgaaacagcccacgggcagatggacgcgcaggaacttgaagacgtaatgcgccgttttattcacggcggctttcatgttcttgtatcgacaacgataattgagaacggcattgatattccaaatgtcaacacgattatcatagaccgcgccgatatgtacggagtatcgcagttataccagctaaggggcagggtaggcaggtcagaccgtgtggcgtacgcgtatcttttttatcccgggaaaaaagccctctcggaaattgccatgaagcgtttgcagacgatttctgattttacggaacttggctccggttttaagatagcgatgaaagatatggaaatccgtggtgcgggaaatcttttggggagggaacagtcgggagatatttattcggttgggtttgatttatacgtaaaacttctagacgaggccgtaaaacgccttgaagactcagattatgaagcggaaacggaaaccctacttgagcttgaatatacgggctttattcccgactcatacattgactccccccaacagaaaatggaagtttacaaaatgatagccgcaatacgcgacaaagaagacctggagcgcgtatactcgcagttacttgaccgttttggcccgttacccgatgaagccgcctccctgcttgcccttgccgagataaggattatttgccgtcaactgacggtatcttcgctaaaagagagagccggcgttgtgcggatagagttcgcgaaggtggcgcgtgtaaaagtggagcggcttgtacgtttgatgcaacaatccgccggcaaaatcaaacttgatcctaaatgtgcgaatgcgattttgcttaagacgggcagtattggtttgaaggaaaagagtgaatttatccgtgagaagctttcgtctttggcgggatattcgcaaagagttctcaccnagaacacaaagggaacaaagacacgaagggggggaataattgggtttttctaa

SEQ ID NO: 26730 - protein, 333 aa, Unknown
  Obtained from environmental sample
  DOMAIN (1)...(75): Helicase conserved C-terminal domain
  misc_feature (1)..(333): Xaa is any amino acid
MPEIMIETAHGQMDAQELEDVMRRFIHGGFHVLVSTTIIENGIDIPNVNTIIIDRADMYGVSQLYQLRGRVGRSDRVAYAYLFYPGKKALSEIAMKRLQTISDFTELGSGFKIAMKDMEIRGAGNLLGREQSGDIYSVGFDLYVKLLDEAVKRLEDSDYEAETETLLELEYTGFIPDSYIDSPQQKMEVYKMIAAIRDKEDLERVYSQLLDRFGPLPDEAASLLALAEIRIICRQLTVSSLKERAGVVRIEFAKVARVKVERLVRLMQQSAGKIKLDPKCANAILLKTGSIGLKEKSEFIREKLSSLAGYSQRVLTXNTKGTKTRRGGIIGFF

SEQ ID NO: 26731 - DNA, 300 bp, Unknown
  Obtained from environmental sample
  misc_feature (1)..(300): n is a, c, g, or t
atggcgagacgataccatagacgcgctgataaatcgggcggaatcaacattgatgagcttgcgcgcattgttccgcatcaggctaacgcgcggattgttcaggcggcggcaaggaggcttcgcattccgattgaaaaattttaccttaacattgagaaatacgccaacacgtcttcggcgtcaattccgattgcctgggacgaaatgaaccggaacggtttattgaaaaaaggcgatttaattttatccgtaggattcggcggaggccttacctacggaggaaacataataatctggtag

SEQ ID NO: 26732 - protein, 99 aa, Unknown
  Obtained from environmental sample
  DOMAIN (9)...(99): 3-Oxoacyl-[acyl-carrier-protein (ACP)] synthase III C terminal
  misc_feature (1)..(99): Xaa is any amino acid
MARRYHRRADKSGGINIDELARIVPHQANARIVQAAARRLRIPIEKFYLNIEKYANTSSASIPIAWDEMNRNGLLKKGDLILSVGFGGGLTYGGNIIIW

SEQ ID NO: 26733 - DNA, 690 bp, Unknown
  Obtained from environmental sample
  misc_feature (1)..(690): n is a, c, g, or t
atgaacaaaaaaaatgttgtgtatttgtttcccggacagggagcgcaatattcaggtatggcgcatgactttctttcctcggacgccgtaaaaaaattatttgataccgcgtcggaaatcaacggaaaggacatgaaagctcttcttcagtcggacgccgacaccttaaaacgcaccgacgtttcgcagccggcgattaccctcgctaaccttgcggcggcaacatacctgggcgaacagggatacagcccggttgcctgcgccggattcagcctcggcgaatacgccgctcttgttttcagcggcgtaatttccgccgccgactgcttccgcctgataaaggcaagaggcgaggcaatgcagagaaattcggaccgcctgcgcgaagagtgcggaggagacgcttccgccgcgcccggcatggccgcggtagttgggcttgctcccgaaaaggttgaggaattaatcgcaaaatggaacgcggaaggactaaaagacctttacgcggcaaatatcaattcgcccaagcaattggcagtaagcggaaacggcggcggcgttaaccgaagcggaaaacccgttttaaggagccggcgccaagagggtaataggcttcagggtagcggtcccttcactcggcgcttatggagcagtccgcgcgggaattcgcggccggcgctggaatcgtaa

SEQ ID NO: 26734 - protein, 229 aa, Unknown
  Obtained from environmental sample
  DOMAIN (7)...(225): Acyl transferase domain
  misc_feature (1)..(229): Xaa is any amino acid
MNKKNVVYLFPGQGAQYSGMAHDFLSSDAVKKLFDTASEINGKDMKALLQSDADTLKRTDVSQPAITLANLAAATYLGEQGYSPVACAGFSLGEYAALVFSGVISAADCFRLIKARGEAMQRNSDRLREECGGDASAAPGMAAVVGLAPEKVEELIAKWNAEGLKDLYAANINSPKQLAVSGNGGGVNRSGKPVLRSRRQEGNRLQGSGPFTRRLWSSPRGNSRPALES

SEQ ID NO: 26735 - DNA, 411 bp, Unknown
  Obtained from environmental sample
  misc_feature (1)..(411): n is a, c, g, or t
ttgatattacccttaccgccgcgttcttgtcgcccgcactgtggcaagagacatgatccgcaaacgggcgggttcaattataaatatggcgagcgtngtcggcatccacggcaacggcgggcaggcgaattatccgcaagcaaagcgggattaatcggcgtaacaaaaagtttagccaacgaagtagcaagccggggggtgcgcgtaaacgcgctcgcgccgggttatattgagaccgacatgaccgccgcggttcctgaagaggcaaggaaaaaaatgatcgatgttatcccgatgaaaagaacgggaaagcaggaagatgtcgcgcgggcggcgctctttttcgcgtccgatgattcttcgtatattaccgggcaggttttgcccgtagacggcggaatgtatttttag

SEQ ID NO: 26736 - protein, 136 aa, Unknown
  Obtained from environmental sample
  misc_feature (1)..(136): Xaa is any amino acid
MILPLPPRSCRPHCGKRHDPQTGGFNYKYGERXRHPRQRRAGELSASKAGLIGVTKSLANEVASRGVRVNALAPGYIETDMTAAVPEEARKKMIDVIPMKRTGKQEDVARAALFFASDDSSYITGQVLPVDGGMYF

SEQ ID NO: 26737 - DNA, 486 bp, Unknown
  Obtained from environmental sample
  misc_feature (1)..(486): n is a, c, g, or t
gtgatggtcatcgcccttgacaaggaaaaccgcaacatcaaacttggaatcaagcagctttccagtgatccctggcagagcttctgccagacttacaaaccgggttcccatatagaaggggaagtcgcgtccgtaacggatttcggcatatttatacgggtgccgggcggtattgaggggcttatccataaaagcaacctcaccgaaaaccgggaggaaaatcccgacgatgcccttaaaaaatacaaagtcggcgacaagatcaaagcggttgttttggaaatccagagtgataagcagaaactcgctttttcaatccgtgattaccagaaaaaggtgcagcgggaagagctttcccgttacatggccgaagaggaatcaggcggctccgtatttacgctgggcgatttcctgaagtcaaagaattccggtgacgaagcacaggaaaaagcggaaccggaggcttccacccaggcaaacggctga

SEQ ID NO: 26738 - protein, 161 aa, Unknown
  Obtained from environmental sample
  DOMAIN (31)...(107): S1 RNA binding domain
  misc_feature (1)..(161): Xaa is any amino acid
MMVIALDKENRNIKLGIKQLSSDPWQSFCQTYKPGSHIEGEVASVTDFGIFIRVPGGIEGLIHKSNLTENREENPDDALKKYKVGDKIKAVVLEIQSDKQKLAFSIRDYQKKVQREELSRYMAEEESGGSVFTLGDFLKSKNSGDEAQEKAEPEASTQANG

SEQ ID NO: 26739 - DNA, 1065 bp, Unknown
  Obtained from environmental sample
  misc_feature (1)..(1065): n is a, c, g, or t
gtgacgaagcacaggaaaaagcggaaccggaggcttccacccaggcaaacggctgacgacagaaagaccatgcagtcaaggatagaaccaaaaaaatccggaaagggctttcataccatgatcagccggagtcctgtaatgacggaaatgatcaaaattatagaccgcgtggccaaaacagattcttcggtgcttatcacgggggaaagcgggacgggtaaggagttgtttgccgagcagatacaccttcgaagccccagaaacgatgccccctttgtccgggtaaactgcgccgccattcccgaagggcttttggaaagcgagttgttcggccatgtcaggggcgcttttaccggatcagtcagcaacagaaaggggcgttttgagatggcggacggcggcactatttttcttgacgagataggggatatgccgctcgctttgcaggctaaacttctgcgtgtaatacaggagaaggcttttgaaaaagtcggttcggataatacaattacagttaacaccaggatactcgccgccacaaacaggaatattaaagcgatgacagataaaggagagtttcgcggcgacctgtattaccgcctgaacgtggttccgctgcacatcccgccgcttcgccagcgtacagaggatattcccgatctcgcgcgttttttcatgacaaaattcatgaagcaaaataaaaaagaattctccggtttttcgcaggacgctctggaggcaatccttacttattcatggccgggcaatatacgcgaattggaaaattgtgttgagagggcctgcgtaatcgcagccggaaaatggattaaaaaagaagaccttctgcttaataccctaggtaatgccgcggcgcggtccggcggcatacatggaggggacagaaaccttaaaacagccactaacgtattcaggacaaattttatacgcaaagtgcttgatgaaaaccaatggaaccagacggagacggcaaaggcgctggatattcaaagaacctatttatcaaagttgatgaaagagcttaatataaagagagataaggagtga

SEQ ID NO: 26740 - protein, 354 aa, Unknown
  Obtained from environmental sample
  DOMAIN (40)...(261): Sigma-54 interaction domain
  misc_feature (1)..(354): Xaa is any amino acid
MTKHRKKRNRRLPPRQTADDRKTMQSRIEPKKSGKGFHTMISRSPVMTEMIKIIDRVAKTDSSVLITGESGTGKELFAEQIHLRSPRNDAPFVRVNCAAIPEGLLESELFGHVRGAFTGSVSNRKGRFEMADGGTIFLDEIGDMPLALQAKLLRVIQEKAFEKVGSDNTITVNTRILAATNRNIKAMTDKGEFRGDLYYRLNVVPLHIPPLRQRTEDIPDLARFFMTKFMKQNKKEFSGFSQDALEAILTYSWPGNIRELENCVERACVIAAGKWIKKEDLLLNTLGNAAARSGGIHGGDRNLKTATNVFRTNFIRKVLDENQWNQTETAKALDIQRTYLSKLMKELNIKRDKE

SEQ ID NO: 26741 - DNA, 852 bp, Unknown
  Obtained from environmental sample
  misc_feature (1)..(852): n is a, c, g, or t
atgcttgtcggggacaaccgcaatctttcgattcttttctccgatatccgcagctttaccaccatttcggaaggcatggcccccgatgatctggtaaattcgttgaaccgctatttttcggggcaggttgatattatctacaaccgcaaggggattgttgacaaatacatcggcgacgccatcatggccttctggggcgctccggaaaaacatgacgatgacgcgttgcagtcggtgctggccggcctggatatgatagaggcgcttgccgtttttaacgcaaaccagaaaaaactgggaaagcccgaattccgtatcggcgtgggcatcaattacggcgaggttacagtcggcaatatcggcagcgagcgtaagatggactatacggtaatcggcgactcggtgaaccttgcctcgcggatggagggccttaccaaaacgtaccatgccgatttgctgatcactgaaaacgtatatgctgaattacagaaaaagctgtcagaccccggcgcggaaaagctgtatttcaggctcctggacactgtcgcggtcaagggaaaaaccaaaggcgtgaagatatacacggttaagcgcgtattaagccaggcggaagcgtccgcatggacactgcacaaccaggggatgctgcttttttacaaacgctctttccgcgaagccgccgagaaattcaaagaagcgtaccgtctgcttgataaagatcccgtgggatccaaggatcccgtgggatccaaggatcccaacgcggaaaatctgttccaccgctgcgccgaatatgcgtcaaacccgccgcctgaagactgggacggggttgaggtgatgaagacgaaatag

SEQ ID NO: 26742 - protein, 283 aa, Unknown
  Obtained from environmental sample
  DOMAIN (1)...(198): Adenylate and Guanylate cyclase catalytic domain
  misc_feature (1)..(283): Xaa is any amino acid
MLVGDNRNLSILFSDIRSFTTISEGMAPDDLVNSLNRYFSGQVDIIYNRKGIVDKYIGDAIMAFWGAPEKHDDDALQSVLAGLDMIEALAVFNANQKKLGKPEFRIGVGINYGEVTVGNIGSERKMDYTVIGDSVNLASRMEGLTKTYHADLLITENVYAELQKKLSDPGAEKLYFRLLDTVAVKGKTKGVKIYTVKRVLSQAEASAWTLHNQGMLLFYKRSFREAAEKFKEAYRLLDKDPVGSKDPVGSKDPNAENLFHRCAEYASNPPPEDWDGVEVMKTK

SEQ ID NO: 26743 - DNA, 861 bp, Unknown
  Obtained from environmental sample
  misc_feature (1)..(861): n is a, c, g, or t
gtgaacggtaaattggtaattgatccgattatggaccagtctatggatatatacaaaaccttgtatgacaatgatttggcagccggggtttctcagtggtcggaaggatggtttgcgggaatgaaaggcgatctcaaagacgaatcatgggaaccgttggaagtcttttcctatttcatgcccacatggggccttcattatgtgctcaagactaacgctccgagtacgtcaggcgattgggctatgattcaaggaccttctccttatcattggggcggcacatggataggcgcgtacaaaggaacaaagaatgttgccgccgttaaagaatttatccgttatgtgactaccgatgacgctttccttgaggcgtgggtaaaagacacgggtgatatggtaagcaatatcaatgtaataaataaaattaaaaacaattacagcgaaccttatctgggcgggcagaatcattacgccgattttgccgaaaccgcaaaaaatgtaaacggtaagctgagtcaggaaaccgatgagttaatagaaggtctttgggatgaagaactttccgattatataatgggtgaaaaaaccaaggcacgggctcttgcggatttcaggaaagaagttgaggctgaattggattctattcgtaaggaaaaagaaagagccaaagccaatagcgccggcgcttcgaaaagtgacagcgccgcaagcggcggtcccgctaaaacaaccgcgcagcttanagtgtggtcatttaccgacgaaataagagatatagtcaacaaatattacaaaaaaagccgtcccggtgtggagattgattatcacaaaccccctcggatcagttccaggctaaaatag

SEQ ID NO: 26744 - protein, 286 aa, Unknown
  Obtained from environmental sample
  misc_feature (1)..(286): Xaa is any amino acid
MNGKLVIDPIMDQSMDIYKTLYDNDLAAGVSQWSEGWFAGMKGDLKDESWEPLEVFSYFMPTWGLHYVLKTNAPSTSGDWAMIQGPSPYHWGGTWIGAYKGTKNVAAVKEFIRYVTTDDAFLEAWVKDTGDMVSNINVINKIKNNYSEPYLGGQNHYADFAETAKNVNGKLSQETDELIEGLWDEELSDYIMGEKTKARALADFRKEVEAELDSIRKEKERAKANSAGASKSDSAASGGPAKTTAQLXVWSFTDEIRDIVNKYYKKSRPGVEIDYHKPPRISSRLK

SEQ ID NO: 26745 - DNA, 342 bp, Unknown
  Obtained from environmental sample
  misc_feature (1)..(342): n is a, c, g, or t
ttggctaccggccagggagctccggatattattgctttggaatccgcttttgtccgtaaatacgtcgaatccggtcttcttctggatgtcaccgatatttacgaatccaaaaagagtgttcttcttgcatatccggcggaagttggaacctaccagggtaaagtatacggattatcgtggcaggcagcgcccggcgctttgttctatcgccgcagcctggcaaagttataccttggaactgatgatcccaaagtggtacagacctattttagcgactttaacaaattccttgataccgcaaaaatgctcaaagataaatctggcgggcacctgcggtggtag

SEQ ID NO: 26746 - protein, 113 aa, Unknown
  Obtained from environmental sample
  misc_feature (1)..(113): Xaa is any amino acid
MATGQGAPDIIALESAFVRKYVESGLLLDVTDIYESKKSVLLAYPAEVGTYQGKVYGLSWQAAPGALFYRRSLAKLYLGTDDPKVVQTYFSDFNKFLDTAKMLKDKSGGHLRW

SEQ ID NO: 26747 - DNA, 612 bp, Unknown
  Obtained from environmental sample
  misc_feature (1)..(612): n is a, c, g, or t
atgagggaaatggttcaagcggtaaaagatatttccgaatcggttgacggtattgcggcggcaataaaaatcatcagcgttatagcgtcaaatacaaacctcctgtccatgaacgcggccattgaggccgcccacgcaggcgacgcgggcaagggttttgctgttgttgccgatgaaattcgccggctttccgaaagtaccagggagaattcgagaagcatttcccaaaccttgtcaagtataatcaccgggatcacctctacaacaaagcgttctaccgataccggcacccttataaatggtatgtctgacgagataaacggctttgccacaaccatgactcaactaatcgacacccttacctcgctggccgacgaaagttcaggagttacttcatcgcttaaggatttgaaagagaataacacaagggtaacaagtaactgcagtgaaattgtaggtcttacggacaaacttcgctatgatatcaacttcctggcggccatgtcagacgatattgtcaaggcagtagaaaagggcgacagggatattattaacaggctgcttgaaatggaaaaggagaaagcgggtatcagcgaactatccggcgcatag

SEQ ID NO: 26748 - protein, 203 aa, Unknown
  Obtained from environmental sample
  DOMAIN (1)...(161): Methyl-accepting chemotaxis protein (MCP) signaling domain
  misc_feature (1)..(203): Xaa is any amino acid
MREMVQAVKDISESVDGIAAAIKIISVIASNTNLLSMNAAIEAAHAGDAGKGFAVVADEIRRLSESTRENSRSISQTLSSIITGITSTTKRSTDTGTLINGMSDEINGFATTMTQLIDTLTSLADESSGVTSSLKDLKENNTRVTSNCSEIVGLTDKLRYDINFLAAMSDDIVKAVEKGDRDIINRLLEMEKEKAGISELSGA

SEQ ID NO: 26749 - DNA, 510 bp, Unknown
  Obtained from environmental sample
  misc_feature (1)..(510): n is a, c, g, or t
atgcggtatattgctgatatttacaagtctgaggctaaggtcgggggattcctttccgctctggtgctttccggcattgccatgggcctgtacaagggagtgcaggataattttcttgcggaaatcgtccgtattgacgcgtttggcaggggcattacagaatttttcagagaactgccaggtcttttcctgattgtcatcctcgcgtggatgtaccgcttttcggacatccgtatttttaaaatagggcttggccttatgctggcgggcattgcgggcttaagcctcgcggggcttttgcctgtcgaattctttccgggtatagcaggcaagacaactgtagtcgcgctcatggtgctgctgtccgcaggcgagcatattataatgccggtaaggtcatcaatctcactgcatctagcaaagggaaataagggcggcgcatcgcttggcatcaccagccccctggggcacggcggcaatatagcccagatttttgaatgttacgggtaa

SEQ ID NO: 26750 - protein, 169 aa, Unknown
  Obtained from environmental sample
  misc_feature (1)..(169): Xaa is any amino acid
MRYIADIYKSEAKVGGFLSALVLSGIAMGLYKGVQDNFLAEIVRIDAFGRGITEFFRELPGLFLIVILAWMYRFSDIRIFKIGLGLMLAGIAGLSLAGLLPVEFFPGIAGKTTVVALMVLLSAGEHIIMPVRSSISLHLAKGNKGGASLGITSPLGHGGNIAQIFECYG

SEQ ID NO: 26751 - DNA, 834 bp, Unknown
  Obtained from environmental sample
  misc_feature (1)..(834): n is a, c, g, or t
ttggaacgcaaggtaaaaacattgccaacgctccgcggcacaaccgttgtaaatttattctttgaaaactcaacccgcacccgcatcagctttgagcttgcagaaaaacgcctttccgcagacattgtgaattttgcaacctctagttccagcgttcaaaagggcgaaactctgctggatacccttaaaaacatagaagctatgaaaatagatgtggttgtggtgaggcacaaaggcacaggtgtcccaaaatttttgtcggaacacaccgatgccgttattgtgaacgccggagacggatcgcacgaacatcccacgcaagcattgctggatattttcacaattgagagcaatttgggcaacctaagcggcaaaacagtcaccattgtgggcgatattaagcacagcagggtagctcgttcaaacgcttggggcttgaatgccttgggtgccaatgtccgcttttgcggccctccaacccttatgcctcgcaacccgaaaatgcttccagctgaaattttttgcgatgttgccaaagcggttgaaggagccgatgccgttattgcccttcgcctgcaaaaagagcgaatggacgattctcttttgccaagcataagggaataccgcaacttttacggcataacgaggcaaaccttggaacacgcaaaaaagaacgttttaattatgcatccgggtccaatcaataggggagtggagttggattcggatattgcagatggcgagaattccgttattctggaacaggttacgaatggcgttgctgttaggatgtcggttttgtatttgctatccgctggcagggctggggactag

SEQ ID NO: 26752 - protein, 277 aa, Unknown
  Obtained from environmental sample
  DOMAIN (122)...(270): Aspartate/ornithine carbamoyltransferase, Asp/Orn binding domain
  misc_feature (1)..(277): Xaa is any amino acid
MERKVKTLPTLRGTTVVNLFFENSTRTRISFELAEKRLSADIVNFATSSSSVQKGETLLDTLKNIEAMKIDVVVVRHKGTGVPKFLSEHTDAVIVNAGDGSHEHPTQALLDIFTIESNLGNLSGKTVTIVGDIKHSRVARSNAWGLNALGANVRFCGPPTLMPRNPKMLPAEIFCDVAKAVEGADAVIALRLQKERMDDSLLPSIREYRNFYGITRQTLEHAKKNVLIMHPGPINRGVELDSDIADGENSVILEQVTNGVAVRMSVLYLLSAGRAGD

SEQ ID NO: 26753 - DNA, 321 bp, Unknown
  Obtained from environmental sample
  misc_feature (1)..(321): n is a, c, g, or t
ttgcgaaaggttttggaaggtgcttgcgattccagttatggtattcacgtagcggaaatggctggtgttccaagcgaggtagttcaaagagcaaagcgaattctgttaaggctggaaaaagaaaaaattgacccaagtgatagtgctcacaagcccaaagccgcccagctctctttctttgagccaccgccaataagcgagaacaccgaacttttgctgagagaattaaaggcggtaaatcccgatgatatgacacctattcaggcattgcagtttgttgggaagattaaggaactagtccccagccctgccagcggatag

SEQ ID NO: 26754 - protein, 106 aa, Unknown
  Obtained from environmental sample
  misc_feature (1)..(106): Xaa is any amino acid
MRKVLEGACDSSYGIHVAEMAGVPSEVVQRAKRILLRLEKEKIDPSDSAHKPKAAQLSFFEPPPISENTELLLRELKAVNPDDMTPIQALQFVGKIKELVPSPASG

SEQ ID NO: 26755 - DNA, 849 bp, Unknown
  Obtained from environmental sample
  misc_feature (1)..(849): n is a, c, g, or t
atgggtggtggcggtttagcctctattattcgcgatcattccgtgaatatagaaagcattacctcagaaaaaccaggagaagcaacaaaaattttgcttgagcaaatagatgcaaacccatttcagccccgcaagcattttaaggaagagtctttgcatgagcttgcagagagcataaagcagcacggaattttggaaccagttctgctcaggaaaaatgcgggtcgttatcagattgtgagcggcgagcgcagggttagggctgctaaaatcgcagggcttcacgaaattgaagccagagtttttgatttgctttccgataaaacaatggcggaatgggcaattatagaaaatatccagcgcgaagatcttaaccctatagaaatagcagattcttaccagcaacttttggattatcacggatatacccacgaagatttggcaacaaggattaataaatccagaacggcggttaccaattcgcttcgtctgctaaaactgccagagcaggttaaaatgtggattggtgaaggcaagctctctgctggtgcggcacgggcattgctttcgccaaacataaaaaacccagaaaaggctgcaaaggaaattattgaaagaggtctttcaacaagagaagcagaaactcttgcgcagaaacaggaaaagaacgacatcaaaaaaagcaaagttaattcttcgatgaatcctgatatgcagaatttcttgaattttttgcaaaatgcctttggaacaaaggttgaatgcaaaaggaatgccataataattcattattcttcttatagtgatttaactagaattcaacaatccattaacccgagaagtatatga

SEQ ID NO: 26756 - protein, 282 aa, Unknown
  Obtained from environmental sample
  DOMAIN (29)...(119): ParB-like nuclease domain
  misc_feature (1)..(282): Xaa is any amino acid
MGGGGLASIIRDHSVNIESITSEKPGEATKILLEQIDANPFQPRKHFKEESLHELAESIKQHGILEPVLLRKNAGRYQIVSGERRVRAAKIAGLHEIEARVFDLLSDKTMAEWAIIENIQREDLNPIEIADSYQQLLDYHGYTHEDLATRINKSRTAVTNSLRLLKLPEQVKMWIGEGKLSAGAARALLSPNIKNPEKAAKEIIERGLSTREAETLAQKQEKNDIKKSKVNSSMNPDMQNFLNFLQNAFGTKVECKRNAIIIHYSSYSDLTRIQQSINPRSI

SEQ ID NO: 26757 - DNA, 942 bp, Unknown
  Obtained from environmental sample
  misc_feature (1)..(942): n is a, c, g, or t
atgttcaaccgttacatggtaacgagtgaagatgaaatggtaaagaaagtcagaaactttatcgacaaagaagaaacaaaagtactgacacgttacacgcctaaagaaattgcggacttgctggacgccgtcggcggcgcggacaagttcaacacaggcgaagttgaaaaatccgtagttaatatgtacggtcacttgcagggacatattcagcgcggcgtcaacgaacttgaaacccacacgaacagcatcctccgtcagaagaccgataccggcgcttttgtccgcggtgaaaacgcttactcaattgtaaagtgcgcttttaaagacaaccagataaaacccaaaacagttaccgatgtaaagctttcagtcaacattctggacgccgaacttatcagcccgatcttccattatcaggttacagttgaataccttataaaagaccttattgccaaacacatcatagacagcatcgataaaattatcgaacaggtcaaagacgaaagaatcgacaaaggccaggaagagctttcagacagcgagattatctttgccaaattgaacaggattgaacaatttaccgacgataacgccgaagaagctaaatccaaacgctatgccattctggcaaaagcgctcatggacaggatctccgacctccgcgccgaaattgatcccgaatcattcgacgccctcaatgtccgcgagaacattaaaaagatcatcgacatggaaaatatccgtaaccgcgggttcaacacagcgatcaactcaatcacatcaattctggatacctccaaatggggtatcagtacatcgaaaacctcaagaacggaagggaagtcattatccgcgaatacgaggatacggacatcgcccacctgccggacgagcgctatcagattaaaatgcgctattttgacaacnccagcttattga

SEQ ID NO: 26758 - protein, 313 aa, Unknown
  Obtained from environmental sample
  misc_feature (1)..(313): Xaa is any amino acid
MFNRYMVTSEDEMVKKVRNFIDKEETKVLTRYTPKEIADLLDAVGGADKFNTGEVEKSVVNMYGHLQGHIQRGVNELETHTNSILRQKTDTGAFVRGENAYSIVKCAFKDNQIKPKTVTDVKLSVNILDAELISPIFHYQVTVEYLIKDLIAKHIIDSIDKIIEQVKDERIDKGQEELSDSEIIFAKLNRIEQFTDDNAEEAKSKRYAILAKALMDRISDLRAEIDPESFDALNVRENIKKIIDMENIRNRGFNTAINSITSILDTSKWGISTSKTSRTEGKSLSANTRIRTSPTCRTSAIRLKCAILTTPAY

SEQ ID NO: 26759 - DNA, 1137 bp, Unknown
  Obtained from environmental sample
  misc_feature (1)..(1137): n is a, c, g, or t
gtgccgagccttttggaagacgagcttaacccttcctccgcgtcaatcgttgccgagagcgcttttagctttgcgcctgaattaatacagcttgacgatgatttttcaatattgaatctgtacaacgggcctacggggtcttacaaagatttcggaatcgcgtttctttccgcgctgctggaggaactgaggaaaaaagcgggatactctctggtgcttgccgccgtcaggggcagtaccggggcttcgattgcccatgcctttagcaggcggaaggggattggcgccgtcctgatttacccctccggcccaatcaggggtcttgacccggctgctttcgttcctaacgggggtaatataatcccaatccaggtaaaaggcacatttgacgactgccagcgccttgtcaacgagacaatcagcgaccgcgagttttccgcccgctacagcattacaagcgcgaacgccataaaccccgggcgcctcttgccccagacattctattacctctatgcctttatcaaaatcaagaagcggctttcaggcggccttgttttcagcactccgtgcgggaactttggcaatttaatggccggtttgtacgcctggaaattcgggatgccggtcaacgcttttattgccgcgatgaattccaataacagcctgggcgaattcataaaaggcggctcttttactccgggccagctcgtcagcaccaattctcccgcccttgacgtgcgtatcccctcgaacctcagccggcttgcttcgttttacagggaagccccggctgttatgcgtaatatggtctgccccgcctctattgacgatgcccttaccatagaggccatttctcatgtcagatccaaatacggcatatacatagacccccataccgccgtcgccttctccgccgcgcagcgttttacggagaaggctgactggaaggggaacgtccacaccgtggtactttccaccggacattattccaaggccgccggcgtaatccgcgaggccacaggcgagggcgtcgccatccccgaagacatcatatcccttcaaaaaatgaccgacccaatagcgattattcccccgaatttggacgcgtttgaaaatgtgatagcgagttgcttttag

SEQ ID NO: 26760 - protein, 378 aa, Unknown
  Obtained from environmental sample
  DOMAIN (22)...(327): Pyridoxal-phosphate dependent enzyme
  misc_feature (1)..(378): Xaa is any amino acid
MPSLLEDELNPSSASIVAESAFSFAPELIQLDDDFSILNLYNGPTGSYKDFGIAFLSALLEELRKKAGYSLVLAAVRGSTGASIAHAFSRRKGIGAVLIYPSGPIRGLDPAAFVPNGGNIIPIQVKGTFDDCQRLVNETISDREFSARYSITSANAINPGRLLPQTFYYLYAFIKIKKRLSGGLVFSTPCGNFGNLMAGLYAWKFGMPVNAFIAAMNSNNSLGEFIKGGSFTPGQLVSTNSPALDVRIPSNLSRLASFYREAPAVMRNMVCPASIDDALTIEAISHVRSKYGIYIDPHTAVAFSAAQRFTEKADWKGNVHTVVLSTGHYSKAAGVIREATGEGVAIPEDIISLQKMTDPIAIIPPNLDAFENVIASCF

SEQ ID NO: 26761 - DNA, 876 bp, Unknown
  Obtained from environmental sample
  misc_feature (1)..(876): n is a, c, g, or t
atgtataaaccgtctttggaagaagcaaaacgcatcgcagaaacaggtcaataccgcgtaataccgctcagtacggaaatgtacgccgatatggtaacgccgattgacgtaataaaaaaattaaaaaacgtcagcgggcattgttttatgcttgaaagcgcggaggacaccaagaattggggcagatatacttttttagggtttgatccaacgatggaaattacctgtcttaacggcgttatgaacatcaattccaataatcccaatgaaacaaaatcgtttaacaccgacaaccccaacaagcacattcaggaaattcttgacagccgcaaaagcgtaaaatttgactttctgcctccgtttacgggcgggcttgtcggctactttgcatacgattacgcgaaatactgcgaaccgtccctgaaacttgacgccgcagatgaagagcgttttaacgatgttgaccttatgctttttgacaaggtaatcgcgtttgacaattacaggcaaaaagttattttaatagcgaatataaacgcggataacattgaaagcgaatataagaaagggacagcacagcttgaaagtttaaaaaatcttatcaagaacggacagcatgaaaagactccgcaagcctgcgtaaagtcggactttaaggcgttgtttacaaaagatgaatactgccggatggtaaacagagcgaanaaccatattaaagaaggggatatttttcaggttgtgttatccaaccgtttcgatgcggattttgaaggcagtatatttgacacataccgcgtgctgcggacaataaacccttctccgtatatgttttactttcggcgggaagcatctggaaatcgcaggagcatcgcctga

SEQ ID NO: 26762 - protein, 291 aa, Unknown
  Obtained from environmental sample
  DOMAIN (23)...(174): Anthranilate synthase component I, N terminal region
  misc_feature (1)..(291): Xaa is any amino acid
MYKPSLEEAKRIAETGQYRVIPLSTEMYADMVTPIDVIKKLKNVSGHCFMLESAEDTKNWGRYTFLGFDPTMEITCLNGVMNINSNNPNETKSFNTDNPNKHIQEILDSRKSVKFDFLPPFTGGLVGYFAYDYAKYCEPSLKLDAADEERFNDVDLMLFDKVIAFDNYRQKVILIANINADNIESEYKKGTAQLESLKNLIKNGQHEKTPQACVKSDFKALFTKDEYCRMVNRAXNHIKEGDIFQVVLSNRFDADFEGSIFDTYRVLRTINPSPYMFYFRREASGNRRSIA

SEQ ID NO: 26763 - DNA, 444 bp, Unknown
  Obtained from environmental sample
  misc_feature (1)..(444): n is a, c, g, or t
atgccgcaaatatataaccgaaaatgtaaaaatagtatttgcttaatacttgctatcgttttagctttcgcagggggttgcgaaaaaaatgaaaacaaaacgaaggcttcatcaagctatgcagttccaaacacagccgataccataatcagttattttttcgttgattccagagacagtacaaagtatagatatgtaaaaataggcaccaaattctggatggcagaaaatttgaattatgctatagacaatagcgcatgctatgaaaacaacgaagataattgccaaaaatgcgggcgactttatgatgggaaaacggctgtaaaagcttgccccaatggctggcatttggcaacatctgatgattggggcgagcttgaagatataattgaaaaggatttaaaaaggatcttactgaggaggaacgtcgtaattggtcgttga

SEQ ID NO: 26764 - protein, 147 aa, Unknown
  Obtained from environmental sample
  SIGNAL (1)...(24)
  misc_feature (1)..(147): Xaa is any amino acid
MPQIYNRKCKNSICLILAIVLAFAGGCEKNENKTKASSSYAVPNTADTIISYFFVDSRDSTKYRYVKIGTKFWMAENLNYAIDNSACYENNEDNCQKCGRLYDGKTAVKACPNGWHLATSDDWGELEDIIEKDLKRILLRRNVVIGR

SEQ ID NO: 26765 - DNA, 684 bp, Unknown
  Obtained from environmental sample
  misc_feature (1)..(684): n is a, c, g, or t
atgaaagccgatcagataatcagcgggactgcgataaatatgctggctcccgccattgcaatttatatagcaaggatgatccgtaccgttcagcaaatcccgtttgtaaatcagtttcgcatacagaaagttcctgtgttaggcgacattccgttaattgggagtttcttttttacaaacacatatctgaccacctatataggttttataatccttgcgttttccgtcttcattctttataaaacgcgcttcggactgcggctgcgttcatgcggcgaacatcctcaggctgcggattccgccggaattaatgtttacgcaatgcgctatgcgggagtaatgatctcaggcgctcttgccggtcttggcgggcttgtgtttgttattccgacatcgattgagtttaacccagaagtttcaggctacggctttcttgcgcttgcggtgttgatcttcggccaatggaaacctctgcgcattcttgcggcagcttttttcttcggattgatgaaagcggtttcatcttcttattccggaatatcgtttctcgcaatgattcctgttccggcttacttgtacaaaatgatcccctacattgcaacgcttatagtgcttgccttcagttctaaaacctcgcagactcctaaagccgaaggtataccttatgataaaggacgcagataa

SEQ ID NO: 26766 - protein, 227 aa, Unknown
  Obtained from environmental sample
  DOMAIN (5)...(205): Branched-chain amino acid transport system / permease component
  misc_feature (1)..(227): Xaa is any amino acid
MKADQIISGTAINMLAPAIAIYIARMIRTVQQIPFVNQFRIQKVPVLGDIPLIGSFFFTNTYLTTYIGFIILAFSVFILYKTRFGLRLRSCGEHPQAADSAGINVYAMRYAGVMISGALAGLGGLVFVIPTSIEFNPEVSGYGFLALAVLIFGQWKPLRILAAAFFFGLMKAVSSSYSGISFLAMIPVPAYLYKMIPYIATLIVLAFSSKTSQTPKAEGIPYDKGRR

SEQ ID NO: 26767 - DNA, 468 bp, Unknown
  Obtained from environmental sample
  misc_feature (1)..(468): n is a, c, g, or t
atggcggcgccgaatgccgcccatcaggggatgctaatggaattagcaaggcaattcgcaaacttcctgacaggcaagccatgcaaagtgtacccggcggcctatgacgtgcggctcttctataaggaagatgaaagcgacgatacggtggttcagccggacataaccgttatttgcgactcaaaaaaacgcgggccggaaggctgccgcggcgcaccagatttagttgtggaaatcctgtctccctcgaatacggcgattgaaatgcagcggaaattcgacctgtaccataccgccggcgtgcgcgaatattgggtgctgaacaacgaacataaaacccttactgtttatatttttgacggcgagaaaattatcagccgcacatacgacgaaaaagacaaggcgcctgtcagcgtgctcaacggactttcaatagatcttgcgccggtgtttacaacggaaatgtaa

SEQ ID NO: 26768 - protein, 155 aa, Unknown
  Obtained from environmental sample
  DOMAIN (8)...(118): Protein of unknown function (DUF820)
  misc_feature (1)..(155): Xaa is any amino acid
MAAPNAAHQGMLMELARQFANFLTGKPCKVYPAAYDVRLFYKEDESDDTVVQPDITVICDSKKRGPEGCRGAPDLVVEILSPSNTAIEMQRKFDLYHTAGVREYWVLNNEHKTLTVYIFDGEKIISRTYDEKDKAPVSVLNGLSIDLAPVFTTEM

SEQ ID NO: 26769 - DNA, 876 bp, Unknown
  Obtained from environmental sample
  misc_feature (1)..(876): n is a, c, g, or t
ttgttgcaggcgtttattgttgcaggcgtttattgttgcataggaagcttcatgtcggatttgcaaacatccttccagggccgatggattctggcaaaaaacctgcccgcgctccctgccgccctgcaggaagccatgcgtctggcgcagaacccgaacaccaccattgccgaactcgctgcggtcatcgggcgcgatcagtcgcttgccggcaacatgctgaaaatcgtcaatacaccgacctacggtttccccggacgcatcacctccgtgcacaacgccctgattctgctcggtttcaacatgatcaagagtctcctgctcgccgccgcgatttttgaaggcgcctccggcgacatggccaggctgtggcgccacagtgcaggctgcgccatcgcatgcagggaactgggaacccggctgaacatgaaagataccgacgaatttttcatcgccggtctgctgcatgatgtcggcaaagtggttacggcggtgcaactgcccgaagcctatcaggaaatcgcccgcctcgcgcatgagcaggacatcgtccttcttgaagcggaagagcgcgtactcggcatggcgcacacgcatatcggagcctggcttgccgagcaatggaacctgcccgcgagcctgcgcgacgccctggcccatcaccaccatcccgcaaacgcccggcccgccctgaccattgcctccatagtgcatatcggagactttctgacctgccttttcgaatacggcaaccacggggaggaccgcgtacccttgctcgatccgcacgccttcaagcatctggaactggatcggcagaaactggacacggtggtggacgccataggggcgatattcgaaccgggaaaggcatga

SEQ ID NO: 26770 - protein, 291 aa, Unknown
  Obtained from environmental sample
  DOMAIN (123)...(246): HD domain
  misc_feature (1)..(291): Xaa is any amino acid
MLQAFIVAGVYCCIGSFMSDLQTSFQGRWILAKNLPALPAALQEAMRLAQNPNTTIAELAAVIGRDQSLAGNMLKIVNTPTYGFPGRITSVHNALILLGFNMIKSLLLAAAIFEGASGDMARLWRHSAGCAIACRELGTRLNMKDTDEFFIAGLLHDVGKVVTAVQLPEAYQEIARLAHEQDIVLLEAEERVLGMAHTHIGAWLAEQWNLPASLRDALAHHHHPANARPALTIASIVHIGDFLTCLFEYGNHGEDRVPLLDPHAFKHLELDRQKLDTVVDAIGAIFEPGKA

SEQ ID NO: 26771 - DNA, 777 bp, Unknown
  Obtained from environmental sample
  misc_feature (1)..(777): n is a, c, g, or t
gtggttatcgggtttatggctgttaaagggctttctgtgtcaggagcgcaggcggttattgatgagcgggagagaaacggggattttgtttctttggatgatttttcgcggcgggtaaagcttaaccgtgatgatattatcgctctttgccccgcaggggttttcgacagtattgcggacggcgttcccagacatttgcaggcaagacggctgcttgcaaataacaaagaacaaataataaataaaaaaggagtcaggaatttagatttgttcgtcgcggatgtttctcccgcttttaatattacgcataggagagtatctgctgtgcagataaaaggagatgtcagatgcgaaaacgatttatgggaagaatataactctctgggatttttacggaatactcatccgcttgcgttatggaaggatgatgtattggcggtaaaacatcgggttaaagctttaaatatcggggaatatgccgggcggaatgttaaaatggccggctggcctgttacgcaaaaagatgtatggactaaagacggtttatctatgtgttttttaagcctggaagatgaaacggcgttgtatgaaacggttgtttttccgcaggtgtatgagcgttactcgaaactgctttttgaccagcagccgctgcttgttttcgggcttgttacgaatgacgaaggagctgtttcccttgagattaaccgtattgaagtattgggagctgtaaagaatgcgaattttatgaggtccggcattttgaattttagataa

SEQ ID NO: 26772 - protein, 258 aa, Unknown
  Obtained from environmental sample
  DOMAIN (164)...(241): OB-fold nucleic acid binding domain
  misc_feature (1)..(258): Xaa is any amino acid
MVIGFMAVKGLSVSGAQAVIDERERNGDFVSLDDFSRRVKLNRDDIIALCPAGVFDSIADGVPRHLQARRLLANNKEQIINKKGVRNLDLFVADVSPAFNITHRRVSAVQIKGDVRCENDLWEEYNSLGFLRNTHPLALWKDDVLAVKHRVKALNIGEYAGRNVKMAGWPVTQKDVWTKDGLSMCFLSLEDETALYETVVFPQVYERYSKLLFDQQPLLVFGLVTNDEGAVSLEINRIEVLGAVKNANFMRSGILNFR

SEQ ID NO: 26773 - DNA, 429 bp, Unknown
  Obtained from environmental sample
  misc_feature (1)..(429): n is a, c, g, or t
gtggccgagcacgcgccgggcgagggggcgtcttacgtgaagatttgcggcagggcggagtctgagatagcggaactcccgccggaggagcgcgccgactttttggagagtttgggcttggcggagccgggcctgagcgttttggcgcgcggcatatacaaactgctgggcttggagaccttcttcaccgccggaaaagaggagaaccgcgcctggacgatccacgccggcgccaccgcgccgcaggccgccggggtgatccacaccgacttcgaaaagggcttcatcagggcggacgtctactcgctctccgacctcgagacgtacaaatcggaggccgccatcagggctgccggaaagattcggtccgagggccgcgagtacgtcgtacaagacggagacattatgtttttcaagtttaacgtttga

SEQ ID NO: 26774 - protein, 142 aa, Unknown
  Obtained from environmental sample
  DOMAIN (58)...(141): Protein of unknown function (DUF933)
  misc_feature (1)..(142): Xaa is any amino acid
MAEHAPGEGASYVKICGRAESEIAELPPEERADFLESLGLAEPGLSVLARGIYKLLGLETFFTAGKEENRAWTIHAGATAPQAAGVIHTDFEKGFIRADVYSLSDLETYKSEAAIRAAGKIRSEGREYVVQDGDIMFFKFNV

SEQ ID NO: 26775 - DNA, 1293 bp, Unknown
  Obtained from environmental sample
  misc_feature (1)..(1293): n is a, c, g, or t
ttggccgagactacaagacgtttgggaaaaatgaaatcggctgacggccacatttactacctcgtcaatttcggcgtgttccagggactcgaccatacccccaactatgaccaggcagccttctgggttcagaaagccgttttgaaagacgcgggttaccccaaagtcgtcacggtggatcagtattttgatatgatagaggcttattacaagaagaacccgaccattaacggccagcccgctatcccctttaccattcttacccatgactggcgcgtgtttgaactgtggaatcccccgaacttcctcgccggcaaccccaacgaagggaacggcattgttaatccgcgtacctatgaatataaaaacttctttacgcaggatatttccaaacgctggtttaaaaaactcaatgaaatgaacgccaagggtttagtcgacaggaccggcttcaccgacaactatgaccagtattccgcgaaaatcgcttccggccgcgtattgggacaaagcgttcagggctggcagtttatgtactccgcggacatggccaaccgcgaccgcggacagaatatccgcaccatggccccgcttcccatcgtatttgacgcgaatatcaagccgcgttaccgcaatatcacgattcccaacctccttcgcggcatggggatcagcgtaagcgccaaagacccgataagaattatccgctttgtcaacgatctccttgcggaagacgtacagcgcaccttanactggggtattgaaggccagcactggcagagaggcccggggaacataccgtatcgtaccgaggaacanaggaagaattggcaaaacgataactggcaggagcaaaaccgcgccaggctcatggacgatattttcccgaagatccagggctctttctcgacggttatccttccgatctgtcgttctatttccctgaaagggaagccacccttcttcctgaagatatcgagnctttttaaagcttacggcgtaaacagcaccaatgagttaatggacaagaatcctccgaagaatgccccctggttccccacatggaatatgcctcctcctccggacggttcgcccgcgcagatcgcgcttcagcgctgcgaacagactatgagacagaggctgccggcgataattctcgctccgccggctcaatttgaaagtttatgggccgcttatgtagccgaaatgaattccaacggcatagccagatacgaggcgtatatgcaggaacagcttaacctgcgcttaaaggaatggggtatcagaaaatag

SEQ ID NO: 26776 - protein, 430 aa, Unknown
  Obtained from environmental sample
  misc_feature (1)..(430): Xaa is any amino acid
MAETTRRLGKMKSADGHIYYLVNFGVFQGLDHTPNYDQAAFWVQKAVLKDAGYPKVVTVDQYFDMIEAYYKKNPTINGQPAIPFTILTHDWRVFELWNPPNFLAGNPNEGNGIVNPRTYEYKNFFTQDISKRWFKKLNEMNAKGLVDRTGFTDNYDQYSAKIASGRVLGQSVQGWQFMYSADMANRDRGQNIRTMAPLPIVFDANIKPRYRNITIPNLLRGMGISVSAKDPIRIIRFVNDLLAEDVQRTLXWGIEGQHWQRGPGNIPYRTEEXRKNWQNDNWQEQNRARLMDDIFPKIQGSFSTVILPICRSISLKGKPPFFLKISXLFKAYGVNSTNELMDKNPPKNAPWFPTWNMPPPPDGSPAQIALQRCEQTMRQRLPAIILAPPAQFESLWAAYVAEMNSNGIARYEAYMQEQLNLRLKEWGIRK

SEQ ID NO: 26777 - DNA, 786 bp, Unknown
  Obtained from environmental sample
  misc_feature (1)..(786): n is a, c, g, or t
ttgaagcaattcgttctgaacagcaagcctgacaaaaacgggcagcttcgatttgaaggcggcgactaccgctaccttgccagggtgcgccgtcttgccccaggcgaatactttccggctttgcttcccggcgccgttgacagcgtaaacgtgcgggtgctgtcggttgataagaatgtgttgataggtgagatatccgatgaaaagcctgtcagggtcgaaccctctgtttccaggaataatttgccgcccataattctgtttcagtccctgcccaagggagaaaaaatggaccttatcgtcaggcaggccgccgagggagggatagagcagatcgtgccgtttatgtcggaattttcggcaattaaaaataaaaattcatggcacaaattcacacgatgggaaaagatcataaaggaggcccggcagcaaagcggttcacttacgcctaccgttattcgacagcctttgtccattgaagggctttttgccttttgggaggatttaaacgcgcaaaaccccggcattctcgggctgttgtttcaccatttaccgcttgcaaagacaagccttcacggttatctttataaaaagcccgaaattgtcgcgctggcaatagggccggaaggcggcttttccgattccgaggcgcaaaggtttattacagccggctttaagccgctgacaatcggggaaacaatactccgcacggagacggcggcgctgtacgcccaggcggtcgtgcgtattcttttattggagagggattcgtgggagatgaaataa

SEQ ID NO: 26778 - protein, 261 aa, Unknown
  Obtained from environmental sample
  DOMAIN (16)...(250): Protein of unknown function (DUF558)
  misc_feature (1)..(261): Xaa is any amino acid
MKQFVLNSKPDKNGQLRFEGGDYRYLARVRRLAPGEYFPALLPGAVDSVNVRVLSVDKNVLIGEISDEKPVRVEPSVSRNNLPPIILFQSLPKGEKMDLIVRQAAEGGIEQIVPFMSEFSAIKNKNSWHKFTRWEKIIKEARQQSGSLTPTVIRQPLSIEGLFAFWEDLNAQNPGILGLLFHHLPLAKTSLHGYLYKKPEIVALAIGPEGGFSDSEAQRFITAGFKPLTIGETILRTETAALYAQAVVRILLLERDSWEMK

SEQ ID NO: 26779 - DNA, 705 bp, Unknown
  Obtained from environmental sample
  misc_feature (1)..(705): n is a, c, g, or t
atggccatttacgaaacgataagcagaaattttaatctttttaaaacacgtattacatctacatctctgccggaagaagaactgcttaatgatgatttgcctgatgataatgttactcccgagttccgctctgctcctgaaactccgggtgaaaatacagttacagtagaaccttccggtcagagagaccagccaagtacacaaacgaaagatgataagccggtggtacaacagacaacgacacagtctaacacaaatcaacaaacacagacaactccggttgtacagacaagggaacgtaacatttatttcacccaaatcaacaaggatgggcagattctgcaatcaagagtaacccgaaggatacctgtttcagacactcccatgcaagatgcattgaatacaatgctgacaggtccttctgcggatgaaataaacaagggtattttgaatattattccgaaaaatacacggatactttcagccgcagtacgaggtagtacggcatacatcaatttcagcgaagattttatgttcaacacattcggagttgaaggatatgtagcccagctgaggcagattgtctggactgttaccgaatttcctaatgtaaatgatgtgcaaatattgatcgaaggcagaaggatggattatctgggtgaaggtatctatattgggagtccgattaaccgtcaatccttttga

SEQ ID NO: 26780 - protein, 234 aa, Unknown
  Obtained from environmental sample
  misc_feature (1)..(234): Xaa is any amino acid
MAIYETISRNFNLFKTRITSTSLPEEELLNDDLPDDNVTPEFRSAPETPGENTVTVEPSGQRDQPSTQTKDDKPVVQQTTTQSNTNQQTQTTPVVQTRERNIYFTQINKDGQILQSRVTRRIPVSDTPMQDALNTMLTGPSADEINKGILNIIPKNTRILSAAVRGSTAYINFSEDFMFNTFGVEGYVAQLRQIVWTVTEFPNVNDVQILIEGRRMDYLGEGIYIGSPINRQSF

SEQ ID NO: 26781 - DNA, 519 bp, Unknown
  Obtained from environmental sample
  misc_feature (1)..(519): n is a, c, g, or t
atgagtgagatcatgaggccgattccctttccggaattgatacattgggtgaagagcgagtataataaccacggttcggttttcggcatacgaaaagaaaaatttttccgttccgtgaatcccaatgtcattgagatgtttggaacgaaaataagatctcccatcggtcccgccgcgggtcccaattcgcagcttgcccaaaacatcctcgccgctttccttgcgggcgcgcgttttatggaactcaagaccgtgcagaccatggacggcgaggaattgcgaaaatgcgtggcgcggccctgcatcaacgccgttgacgagggttacaacgtggaatggtcaaccgagctgacagtgcccgaggcgcgcgaggagtatattaaagcgtggtttttatgccatatattcgccaaagaatttgaaattgacgataccgcgaatgtcatcttcaacatgagcgtcggttacagttatgaaggaatcaaatcggaaaagatcgattcgtatatgaagggatga

SEQ ID NO: 26782 - protein, 172 aa, Unknown
  Obtained from environmental sample
  misc_feature (1)..(172): Xaa is any amino acid
MSEIMRPIPFPELIHWVKSEYNNHGSVFGIRKEKFFRSVNPNVIEMFGTKIRSPIGPAAGPNSQLAQNILAAFLAGARFMELKTVQTMDGEELRKCVARPCINAVDEGYNVEWSTELTVPEAREEYIKAWFLCHIFAKEFEIDDTANVIFNMSVGYSYEGIKSEKIDSYMKG

SEQ ID NO: 26783 - DNA, 885 bp, Unknown
  Obtained from environmental sample
  misc_feature (1)..(885): n is a, c, g, or t
ttgatagagaggggcggggccggagcgggcccgcaattcggttcatggcagaaccttcttatgggcagcgttgtatttcttgttatcgtccttttgcagcgactggcgaaaggcacgcttaaagcgtccgccatccttatcgggataatcgtgggatacattttggcggttattttgggtcaggtgaatttcgcccctgtcgcggacgcgaaagtgtttgcgcttcctgtgccattcagacagggattaacgccgtcattccaactgcttccaattctctctatggcgataatggttgtggtatcggggattgagacaatgggacacgttaacggcatgactatggcggtttgggacaggcaggcggctaacagcgaaacccagggagccttgcttgccgacggttttgggaatatattttcggcgatcttcggcgtcctgcccaacacttcatttgggcagaacataggcattgtctgcataaccaaagcagtgaacagattctgtattctcataactgcgattacgcttatcctcgctgggttttcccccaaggtcggggcggttttatccgttatgcctaacagcgtattgggcggcgcggtgattaccgtattcgccatgatcatgctgaacggaataaaaatgatagctaaagcggggttctccgaaagaaacgtattcattctcgccctgacattcggcgtcggctatgccatcggaaataacccccggttagtggaaaaactgcctttcgtattaaactttattttcaaaaaccctactgtcgcggtatgcgtggtttccatgacgctgaactttatcttcccgctctccgcggaagacaaagcgagagccgcggaggccgctaaaagcggcgattaa

SEQ ID NO: 26784 - protein, 294 aa, Unknown
  Obtained from environmental sample
  DOMAIN (1)...(246): Permease family
  misc_feature (1)..(294): Xaa is any amino acid
MIERGGAGAGPQFGSWQNLLMGSVVFLVIVLLQRLAKGTLKASAILIGIIVGYILAVILGQVNFAPVADAKVFALPVPFRQGLTPSFQLLPILSMAIMVVVSGIETMGHVNGMTMAVWDRQAANSETQGALLADGFGNIFSAIFGVLPNTSFGQNIGIVCITKAVNRFCILITAITLILAGFSPKVGAVLSVMPNSVLGGAVITVFAMIMLNGIKMIAKAGFSERNVFILALTFGVGYAIGNNPRLVEKLPFVLNFIFKNPTVAVCVVSMTLNFIFPLSAEDKARAAEAAKSGD

SEQ ID NO: 26785 - DNA, 318 bp, Unknown
  Obtained from environmental sample
  misc_feature (1)..(318): n is a, c, g, or t
ttgggtcttaaagaacccggcctttcttctcttattcgctcggcgtaccaactgcttaacctgcgtacttttttcacagcgggagaagatgaatgccgtgcgtggactattcacaagggcgatacggcccccaaagcggcaggcgttattcacacagattttgaaaaaggctttataaaagcggaagtttatacctgcgatgacatttttaattacggaacagaagctaaaataaaggaagccggaaaataccgggttgagggaaaagattatgtcgtgcaggacggcgacgtgatgttctttaagtttaatgtgtga

SEQ ID NO: 26786 - protein, 105 aa, Unknown
  Obtained from environmental sample
  DOMAIN (21)...(104): Protein of unknown function (DUF933)
  misc_feature (1)..(105): Xaa is any amino acid
MGLKEPGLSSLIRSAYQLLNLRTFFTAGEDECRAWTIHKGDTAPKAAGVIHTDFEKGFIKAEVYTCDDIFNYGTEAKIKEAGKYRVEGKDYVVQDGDVMFFKFNV

SEQ ID NO: 26787 - DNA, 480 bp, Unknown
  Obtained from environmental sample
  misc_feature (1)..(480): n is a, c, g, or t
ttgaacgacgtgacatggcataaaaacaatccaatgcctaacttcatggggacgcggtttacaaacgctacggaaacgcttttatggtgctcaaaaagaaaggaaaataaaaaatatacgtttaaccataaaataatgaaaaaatataacggcggcaaacaaatgacatctgtttggcggattggtttatgtatcggggaagaacgcttaaaaggcgaagacggaaaaaaggcgcattccacccaaaaaccggaggagcttcttaaaagggtgattctatccacaacaaaacagggtgatgtcgtgcttgatccattttttggaacaggcacaaccggagctgtcgccaaaaagttaaaacgaaattacattggaatagagagagagccggaatacataaagctcgctgaaaacagaatcgctaatattaaggaatgttttgaagaggccgactgggaagaagagcgcgtcacacattaa

SEQ ID NO: 26788 - protein, 159 aa, Unknown
  Obtained from environmental sample
  DOMAIN (1)...(138): DNA methylase
  misc_feature (1)..(159): Xaa is any amino acid
MNDVTWHKNNPMPNFMGTRFTNATETLLWCSKRKENKKYTFNHKIMKKYNGGKQMTSVWRIGLCIGEERLKGEDGKKAHSTQKPEELLKRVILSTTKQGDVVLDPFFGTGTTGAVAKKLKRNYIGIEREPEYIKLAENRIANIKECFEEADWEEERVTH

SEQ ID NO: 26789 - DNA, 333 bp, Unknown
  Obtained from environmental sample
  misc_feature (1)..(333): n is a, c, g, or t
atggatatgcgatacatcagcacgaggggcaattctcaggcgttgtcgtttgccggagcggtgatggaggggatggtctctttcggcgggttgtttgtcccgatgattatacccaaggcggacttttcaaagttagccggacggtcataccgagatattgctgttgccgtgctgacaccgtttatgagcgggtttgacggcgatgagatcgcggcttgcgtgaacgaggcctacacgtccgagagtttcgatattcccgaagtggtcaagacggttcccatcgggaataatcgttatatattagaactatggcatgacccgacggcggcgtaa

SEQ ID NO: 26790 - protein, 110 aa, Unknown
  Obtained from environmental sample
  misc_feature (1)..(110): Xaa is any amino acid
MDMRYISTRGNSQALSFAGAVMEGMVSFGGLFVPMIIPKADFSKLAGRSYRDIAVAVLTPFMSGFDGDEIAACVNEAYTSESFDIPEVVKTVPIGNNRYILELWHDPTAA

SEQ ID NO: 26791 - DNA, 552 bp, Unknown
  Obtained from environmental sample
  misc_feature (1)..(552): n is a, c, g, or t
ttggcgtcatcaaaaggaaccgcggacggtctcgacgtgcgcgtgcatccggcaatgctacccagaggccacatcctcgcctcggtctccgacgtcttcaacgcggtgcttttagagggcgacgccgtggggcagatactcatctacggacgtggcgccggagagatgcctaccgcttccgccgtggtgggtgatataatagacgccgcgagaaacatctccgacgggtgcccgaagcgggtgccgatggactactaccgggcggacaaaaaggcggcgcttgttccaatagagcggatagagagcagatactatttgcgtttcaacgtcagcgataatccgggggtgctggcgtcgataacgagccgtttgggcgccgagaagatatcgatagcctccgtcatgcagcaagaggggggcggcgaggcgtgggtgccggtgatcataattacgcatcaggctatggagcggggggtcaggaaggcggtcagggagattgagaaggaggcttttgtgagggcgcctacgcagattataaggatagaggaatag

SEQ ID NO: 26792 - protein, 183 aa, Unknown
  Obtained from environmental sample
  DOMAIN (1)...(67): Homoserine dehydrogenase
  misc_feature (1)..(183): Xaa is any amino acid
MASSKGTADGLDVRVHPAMLPRGHILASVSDVFNAVLLEGDAVGQILIYGRGAGEMPTASAVVGDIIDAARNISDGCPKRVPMDYYRADKKAALVPIERIESRYYLRFNVSDNPGVLASITSRLGAEKISIASVMQQEGGGEAWVPVIIITHQAMERGVRKAVREIEKEAFVRAPTQIIRIEE

SEQ ID NO: 26793 - DNA, 1032 bp, Unknown
  Obtained from environmental sample
  misc_feature (1)..(1032): n is a, c, g, or t
ttggcgctacttggcacaaacgacgccggtacggcaggcgtcgattcgatacaaaaaaaactgtcgcaaataaaccgcaaattggagactctctgtaaacacgatccgtccgccgccccgtatataaacgaaatagaatcagccatatcaatctgcgccgacttagatatgttctgcagcaggtacttagaaacgactgacggcgctaccggcggcgaaaataagattgaggagatcaactcgcggttggccaagatacagcggctaaagaagaaatattcatgtaccgttgacgagttgattgacaaaagggaacagttagaaaaagatctatcgctgctcaacaataccgacgccgatatggaattgttggagaaaaaagccgctaaggcgcgtaaagagtgcgttgacgccgccgcggtgttgacatcgtcgcggaaaaaggccttgcacacgtttgacaaagaggtaacccgccgtatggaactcttgggtttcaccggcggctcgcttaccaccgaaatcgcgccattgagcgaaccgggtccaaacggtatggacgcgatacgcttcttggtgaggacgaaccccggcgaaccgttcctgccgctagccaaaaccgcctccggcggcgaggcctcgcggctgatgctggccgtcaaatccatactcgccgagcacgatgaaatccctgtgttaatctttgatgagattgacacaggcattggcggcgtcttggcgggagaggtggcaaaggcgctgtactctctttcgtcaacgcaccaagtgctatgcatatcgcacctacaccagatagcctcggcggcggataaccactacctcgtggccaagagggtggacgggggacggacgataacggaggtcaagcgtttggacggagagcgaaggacgctggagatagcgcggatgcttggcggtgcggggtcggaggtggttttaaaacacgcggaggagttgcttaagtcaaataataaaaatcggggctttaggaatgatggtgggaaggtgtag

SEQ ID NO: 26794 - protein, 343 aa, Unknown
  Obtained from environmental sample
  misc_feature (1)..(343): Xaa is any amino acid
MALLGTNDAGTAGVDSIQKKLSQINRKLETLCKHDPSAAPYINEIESAISICADLDMFCSRYLETTDGATGGENKIEEINSRLAKIQRLKKKYSCTVDELIDKREQLEKDLSLLNNTDADMELLEKKAAKARKECVDAAAVLTSSRKKALHTFDKEVTRRMELLGFTGGSLTTEIAPLSEPGPNGMDAIRFLVRTNPGEPFLPLAKTASGGEASRLMLAVKSILAEHDEIPVLIFDEIDTGIGGVLAGEVAKALYSLSSTHQVLCISHLHQIASAADNHYLVAKRVDGGRTITEVKRLDGERRTLEIARMLGGAGSEVVLKHAEELLKSNNKNRGFRNDGGKV

SEQ ID NO: 26795 - DNA, 426 bp, Unknown
  Obtained from environmental sample
  misc_feature (1)..(426): n is a, c, g, or t
atgccgaaactgacatccatatccgcctggtgcggcgacgcattcatcacagacttcttcgcagacggaatcataatcgccactcccagcggatcaacggcatactccctatccgccggaggccccatagtcgaaccctctgtgcaggcattcctactgacccctatatgcccgcactccctaacagagcgccctcttatactgccggcaaacgtcaacataaaactcctagtgaacgacaaaaatcccgacctactgctgactgcggacggactggaatctttcaacttacactccggagacgaggtaatagtctcctacagcggagtgcgaaaaaatctgattcaactagcggagaaatcttatttctcattactacgagaaaaactcggatggggcggggatataagaaaaacaataatttga

SEQ ID NO: 26796 - protein, 141 aa, Unknown
  Obtained from environmental sample
  misc_feature (1)..(141): Xaa is any amino acid
MPKLTSISAWCGDAFITDFFADGIIIATPSGSTAYSLSAGGPIVEPSVQAFLLTPICPHSLTERPLILPANVNIKLLVNDKNPDLLLTADGLESFNLHSGDEVIVSYSGVRKNLIQLAEKSYFSLLREKLGWGGDIRKTII

SEQ ID NO: 26797 - DNA, 678 bp, Unknown
  Obtained from environmental sample
  misc_feature (1)..(678): n is a, c, g, or t
atgctggaaatctttgaagaaaacatgaaaacggtaacgggtaaagaggagccgctaaagaaagctttattattgggagacaccggatttttttcggaagcgaatctgcaggaagcggcggaaagggatatagaagtgttgatacccgatccgcagttcaggcagagggatccgtattacgcggagaagaaggaaaagaaagttgaaaagaagaaaagatttacggcggaagactttaaatacgatgaaaggagcgacagttttacatgcccgtgcggaaaaacattggaatacaaaggagacgtggcgctgaggaacaacagcggaaggaaatacatggcgaaaaggacagattgcgcgaactgcccattaatagataaatgtatagcgaggcggaatgggaagaatcctaaaaggactttatatatagtagaaaagaaatataaagacaatttatcagaaaagatgaggaaaaagatagacaatccggcgtaccgggaattgtattcgaggcgtatgcagatagtggagcctgtatattcaaatataacatataataaaggaatgaaccggtttacgttaagaactgaaaggaaggtaaacatacagtggaagttatactgcatggtacacaatataggaaaatgtataaagcctttgggagaaaaatgcggataa

SEQ ID NO: 26798 - protein, 225 aa, Unknown
  Obtained from environmental sample
  misc_feature (1)..(225): Xaa is any amino acid
MLEIFEENMKTVTGKEEPLKKALLLGDTGFFSEANLQEAAERDIEVLIPDPQFRQRDPYYAEKKEKKVEKKKRFTAEDFKYDERSDSFTCPCGKTLEYKGDVALRNNSGRKYMAKRTDCANCPLIDKCIARRNGKNPKRTLYIVEKKYKDNLSEKMRKKIDNPAYRELYSRRMQIVEPVYSNITYNKGMNRFTLRTERKVNIQWKLYCMVHNIGKCIKPLGEKCG

SEQ ID NO: 26799 - DNA, 492 bp, Unknown
  Obtained from environmental sample
  misc_feature (1)..(492): n is a, c, g, or t
atgtccgcatcaaaccaacagtctgaaaaattgcaggccaacgaaaagttggctactattcgccactcggtgagccatattatggctcaggcggtggtaaaactctttcccgggacgaaagtcgccatcggtccgtctatcgaaaacggtttttactatgatttccttctgccccggtctattactgcggatgaccttgaaactatcgaaaccgaaatgaagcgtatcatcgattcgcggcaggattttgtgaaagttaccgtcagccgcgaagaggcattgcggcgttttgccgatgaggaatttaaaaccgagcttatcaatgaactgccggcggatgctgaaattaccatttttgaaaaccatgacgcggacggaaaaacattgtgggctgacctgtgccgcgggccgcacgttgccaataccagagagataaattcagccgctttcaaactgcaaagtatcgcggggcgcttactggcgcggcgatga

SEQ ID NO: 26800 - protein, 163 aa, Unknown
  Obtained from environmental sample
  DOMAIN (116)...(160): Threonyl and Alanyl tRNA synthetase second additional domain
  misc_feature (1)..(163): Xaa is any amino acid
MSASNQQSEKLQANEKLATIRHSVSHIMAQAVVKLFPGTKVAIGPSIENGFYYDFLLPRSITADDLETIETEMKRIIDSRQDFVKVTVSREEALRRFADEEFKTELINELPADAEITIFENHDADGKTLWADLCRGPHVANTREINSAAFKLQSIAGRLLARR

SEQ ID NO: 26801 - DNA, 768 bp, Unknown
  Obtained from environmental sample
  misc_feature (1)..(768): n is a, c, g, or t
atgagcggctcaatgccaaaatacgcggctgccagaaccgcaaaattccctatatgctcgtggtcggccagcgcgaggcggaagaaggcacggtgtcgattcggctacgcgacggcaaacagctccccgcgatgcagaccgctgattttgtcaaatatgtacttgagaaaattgaaagccgctcgctggaactgtaaccggatacgacttgttctggcgctgttgttacccgtttcattttttgcctgcgcttcaaaccatgccgctgtttctggtgttaccggcagcccattggaaataccgacggatattgccggaattgttcacgcaggccgaaccaacacccccgaagaatatgccctgcttgacaggttaggcgcaagctggctgcttgtcacttttaactggggccagattgagcggacaaagggtcagtgggactttgattcctatgaccaatatgttgataccgcaaaagcggcgggaaaaaaagttatcggcgttttggcttacgatgttccgtggattcataatgataataaatatcacaaatatattccgccggataaggtacatttttttcttgattatgtgcggcaaacagcggcgcattttcagggcagggttgatgcatggtgcatttggaatgaaccaaatcttcaccggttttggacggggagcaagaatgaattttttgagcttacccgtcaggccgcagatgcgctcagggaagttgattctgatgtcacgcttctcgtgccaatctga

SEQ ID NO: 26802 - protein, 255 aa, Unknown
  Obtained from environmental sample
  misc_feature (1)..(255): Xaa is any amino acid
MSGSMPKYAAARTAKFPICSWSASARRKKARCRFGYATANSSPRCRPLILSNMYLRKLKAARWNCNRIRLVLALLLPVSFFACASNHAAVSGVTGSPLEIPTDIAGIVHAGRTNTPEEYALLDRLGASWLLVTFNWGQIERTKGQWDFDSYDQYVDTAKAAGKKVIGVLAYDVPWIHNDNKYHKYIPPDKVHFFLDYVRQTAAHFQGRVDAWCIWNEPNLHRFWTGSKNEFFELTRQAADALREVDSDVTLLVPI

SEQ ID NO: 26803 - DNA, 351 bp, Unknown
  Obtained from environmental sample
  misc_feature (1)..(351): n is a, c, g, or t
gtgttgatgaaacattttggcggcgcgttccccgtgtggattgcgccggaacagatcgccgttattcccgttgcggaaggctttaacgagtacgcgcaaaaagttaccgctgagttaaaggcccgtgacntgcgggtttccgctgagttaagcgatgagcggctcaatgccaaaatacgcggctgccagaaccgcaaaattccctatatgctcgtggtcggccagcgcgaggcggaagaaggcacggtgtcgattcggctacgcgacggcaaacagctccccgcgatgcagaccgctgattttgtcaaatatgtacttgagaaaattgaaagccgctcgctggaactgtaa

SEQ ID NO: 26804 - protein, 116 aa, Unknown
  Obtained from environmental sample
  DOMAIN (18)...(108): Anticodon binding domain
  misc_feature (1)..(116): Xaa is any amino acid
MLMKHFGGAFPVWIAPEQIAVIPVAEGFNEYAQKVTAELKARDXRVSAELSDERLNAKIRGCQNRKIPYMLVVGQREAEEGTVSIRLRDGKQLPAMQTADFVKYVLEKIESRSLEL

SEQ ID NO: 26805 - DNA, 795 bp, Unknown
  Obtained from environmental sample
  misc_feature (1)..(795): n is a, c, g, or t
gtggtcggcgaatccgtgcccctccccgagcccgcggcggtcttcgggcagataaatgaactggccgcgccgctgctcaggtgcatctgcgacacgcaggagtacctgtacgccacctggaaggagggtgagccgatactctttgagggcgcgcaggcgacgatgctcgacatagaccacgggacctaccccttcgtcaccagctccaactgcagcataggcggcctcttcgcgggcacgggtctgccgcccaaggccgtcagcacagtgctgggcgtggccaaggcctacaccacgcgggtgggcgcgggccccttcccaagcgagctggacggccccatcagcgacggcatccgcacggccggcaaggaattcgggacgaccacgggccggccgaggcgctgcggctggctcgacgccgtcctgctgcgccacacctgccgcctgaacggcgccgactgccttgggataatgaagctggacgtgctggacggtctggacagagtcggtcttgtgaggtcgtacacaacgaaggacggcgccccgctgtccggcctgccctccaccgccgaaggctgggatggtgtcgttccggaaatcgaatacttcgacgggtggtccgcgcccacaaagggcctcaaagaatggagcgccctgcccacggaggcgaaaaagtacctgagcgccatagagggggtcgtcgagacgcccatagcctacgtcagcacgggcgccgaccgcgaggcggggctgcttccgtccgggtcgtgcctggtaagattggtggcactgtaa

SEQ ID NO: 26806 - protein, 264 aa, Unknown
  Obtained from environmental sample
  DOMAIN (1)...(252): Adenylosuccinate synthetase
  misc_feature (1)..(264): Xaa is any amino acid
MVGESVPLPEPAAVFGQINELAAPLLRCICDTQEYLYATWKEGEPILFEGAQATMLDIDHGTYPFVTSSNCSIGGLFAGTGLPPKAVSTVLGVAKAYTTRVGAGPFPSELDGPISDGIRTAGKEFGTTTGRPRRCGWLDAVLLRHTCRLNGADCLGIMKLDVLDGLDRVGLVRSYTTKDGAPLSGLPSTAEGWDGVVPEIEYFDGWSAPTKGLKEWSALPTEAKKYLSAIEGVVETPIAYVSTGADREAGLLPSGSCLVRLVAL

SEQ ID NO: 26807 - DNA, 1044 bp, Unknown
  Obtained from environmental sample
  misc_feature (1)..(1044): n is a, c, g, or t
atgaattcgtccagtaatttttctactcgcatctccaatataatctccaatcgacaatccatcataaagaaagggcaatacgaccgaacaatgcagagcgacctgcacccgtatttgatgtaccgcatcggtcccagtgtcaaacatcgtgaagaacacgaacgatgggacggtcttgtacttccaaaagatgatccgttttgggattctcattttccgccaaatggctggggttgcaaatgctacacccgcgccgtaaccgaaagccaactgaaaaaatatgaagctgaaggaattgcggttctgcagagagcagacggtactggtggcgggaagattagcgttaaaacagaagatccgcctgacaactttcggagttttttcaatgaaagaactggaacacttgagcgtattcccaaaggcatcagtcccggttttaattggaatcaaggaaaaaccaaccgcaacacttcggcgcttgagcaattgattcaaaaagcacagtataaagcgccagaacaatttgaaggcataatcaattcaatactaaaaagtcaggctaataaaaatgatttttatggttttattgaagatactcttgagaaaaaaaatgatcgtcaacattcagctgcagtcggtgtacttgacagtaagataatgcagtttttatccagtaaaggaatcgacctgtcaaaaaatcatgtcattatgcttgagtctagattagtcaacagtagaaaatataccggaaggcatacaaacacaggaaatgctccaagcaaagaggattggtataatctggttgactggcttatggacgcgccgatattttgggatggtaaaggcttaatttatcttgcaaggatttcagacagccgatatatgaaaattgctgtcgatgtcagcttgttaacaaaatcccataaaagtgtaaggcttgctcttcccaagattgataccttatatcttctggatttggctcaagaaggtgatcgtggaagcaatgagtttaatcggattatgcgtatggaaaaaatcaggtag

SEQ ID NO: 26808 - protein, 347 aa, Unknown
  Obtained from environmental sample
  DOMAIN (2)...(84): Phage Mu protein F like protein
  misc_feature (1)..(347): Xaa is any amino acid
MNSSSNFSTRISNIISNRQSIIKKGQYDRTMQSDLHPYLMYRIGPSVKHREEHERWDGLVLPKDDPFWDSHFPPNGWGCKCYTRAVTESQLKKYEAEGIAVLQRADGTGGGKISVKTEDPPDNFRSFFNERTGTLERIPKGISPGFNWNQGKTNRNTSALEQLIQKAQYKAPEQFEGIINSILKSQANKNDFYGFIEDTLEKKNDRQHSAAVGVLDSKIMQFLSSKGIDLSKNHVIMLESRLVNSRKYTGRHTNTGNAPSKEDWYNLVDWLMDAPIFWDGKGLIYLARISDSRYMKIAVDVSLLTKSHKSVRLALPKIDTLYLLDLAQEGDRGSNEFNRIMRMEKIR

SEQ ID NO: 26809 - DNA, 351 bp, Unknown
  Obtained from environmental sample
  misc_feature (1)..(351): n is a, c, g, or t
atggaacacctgaacgaagctctgaaagcttttgacggatacaagccccgtaccgcatccgaacttaaagaagttatatcaaaagcggacgcctcctttgaaggcatctgcacaggctgcgcgtactgcgacaactgtcccgccggagttcccatccccgaatacatggacgcctacaaccaaaaacttcttaacaaaaacgaaaaagacccgataggagacaggctaaaatggcactggagccttgaccgcgccggagccgcaaaatgcaccgcctgcggccaatgcgagagcgcctgcacacagcatattgacattattaacagattgaaagaaattgcggggaattaa

SEQ ID NO: 26810 - protein, 116 aa, Unknown
  Obtained from environmental sample
  misc_feature (1)..(116): Xaa is any amino acid
MEHLNEALKAFDGYKPRTASELKEVISKADASFEGICTGCAYCDNCPAGVPIPEYMDAYNQKLLNKNEKDPIGDRLKWHWSLDRAGAAKCTACGQCESACTQHIDIINRLKEIAGN

SEQ ID NO: 26811 - DNA, 1044 bp, Unknown
  Obtained from environmental sample
  misc_feature (1)..(1044): n is a, c, g, or t
atggagctacaggattaccgggcgcagatagacaaggtggacgatcagcttttatcgctcttcaaagagaggatgggcatctccggccaaatcgcccagttcaaaaaagagcatggccttcccgccctggacgccacgcgggaaagggaaaagttagccgatatcggcgaaaaggcgggcgatgatattcgttctttcgcgtatatcctgtacacgacgctgtttgaaatcagccgcgctcatcaggtgaatatcattaacgccgaatccgatctcaataaaattatctcggcggcggtggaacacaccgagcgggtgttcccgcagcacgcgcttgtcgcctgtcagggcgtggaaggcgcgtattcgcagatcgcatgcgacaggctgtttgccgatccgaacattttttattttacgggctttgaaggcgtgttttcggcaatccgcgacgggctttgccaatacgggatattgcctctggaaaacagtacggccggctctgtcaacctggtatacgaccttatgatgaagcacagtttcaagatcgcgaggagcgtgcggcttaaaatcgatcacaatctgctggcgaaggcgggcgttaaaaaagaaaacatccgtgagatcttctcgcatgaacaggcgattcaacagtgcgcggggtatctgaaagggcttggcaagaacgtgaaagtcaccaccgtcaccaataccgccgaagcggcaaaaatggtcgcggaatcggaccggaacgacgtcgcggcccttgcctcccattcgtgctgtgatttatacgccctgaaatgcgtggaaagttcggtacaggacaggggcaataattacacgcggttcatctgtatctccaaaaacctcgaaatatatccgggggccgaccgtaccagcatcatgctgaccaccgcgcacaaacccggttcgctgtacaaggtacttggccttatatacgccctcggcgtgaatgtcgtaaagctggaaagccgcccgatccccgaccgcgatttcgagttcatgtttatttcgatctga

SEQ ID NO: 26812 - protein, 347 aa, Unknown
  Obtained from environmental sample
  DOMAIN (7)...(85): Chorismate mutase type II
  misc_feature (1)..(347): Xaa is any amino acid
MELQDYRAQIDKVDDQLLSLFKERMGISGQIAQFKKEHGLPALDATREREKLADIGEKAGDDIRSFAYILYTTLFEISRAHQVNIINAESDLNKIISAAVEHTERVFPQHALVACQGVEGAYSQIACDRLFADPNIFYFTGFEGVFSAIRDGLCQYGILPLENSTAGSVNLVYDLMMKHSFKIARSVRLKIDHNLLAKAGVKKENIREIFSHEQAIQQCAGYLKGLGKNVKVTTVTNTAEAAKMVAESDRNDVAALASHSCCDLYALKCVESSVQDRGNNYTRFICISKNLEIYPGADRTSIMLTTAHKPGSLYKVLGLIYALGVNVVKLESRPIPDRDFEFMFISI

SEQ ID NO: 26813 - DNA, 342 bp, Unknown
  Obtained from environmental sample
  misc_feature (1)..(342): n is a, c, g, or t
gtgaagggcgtgaattcggaagcggtttcgccgttgccggacgcagagggtcggaaaaacaacgacagcttttttgtggccggggaaaaggtaagaacgcgcacaaacaactcgggcggcatattgggcgggataacaaacggaatgccggtcctgttccgcgcggcgttcaagcccacgccgtccatcggcatggaacaggacagcgtcagcctgtcacaggcgaaaaacgccgttttacaggtaaagggccggcatgacccctgcatcgtcccccgcgccctgccctgcgtggaagcggccgccgccatcgcgttatacgacgcttttttggatcaataa

SEQ ID NO: 26814 - protein, 113 aa, Unknown
  Obtained from environmental sample
  DOMAIN (1)...(113): Chorismate synthase
  misc_feature (1)..(113): Xaa is any amino acid
MKGVNSEAVSPLPDAEGRKNNDSFFVAGEKVRTRTNNSGGILGGITNGMPVLFRAAFKPTPSIGMEQDSVSLSQAKNAVLQVKGRHDPCIVPRALPCVEAAAAIALYDAFLDQ

SEQ ID NO: 26815 - DNA, 378 bp, Unknown
  Obtained from environmental sample
  misc_feature (1)..(378): n is a, c, g, or t
atggcggcggccgcttccacgcagggcagggcgcgggggacgatgcaggggtcatgccggccctttacctgtaaaacggcgtttttcgcctgtgacaggctgacgctgtcctgttccatgccgatggacggcgtgggcttgaacgccgcgcggaacaggaccggcattccgtttgttatcccgcccaatatgccgcccgagttgtttgtgcgcgttcttaccttttccccggccacaaaaaagctgtcgttgtttttccgaccctctgcgtccggcaacggcgaaaccgcttccgaattcacgcccttcacgcctggtatgccaaatacgatcccggcaattctgttctctatgccgtcaaagatgggatcgccctaa

SEQ ID NO: 26816 - protein, 125 aa, Unknown
  Obtained from environmental sample
  misc_feature (1)..(125): Xaa is any amino acid
MAAAASTQGRARGTMQGSCRPFTCKTAFFACDRLTLSCSMPMDGVGLNAARNRTGIPFVIPPNMPPELFVRVLTFSPATKKLSLFFRPSASGNGETASEFTPFTPGMPNTIPAILFSMPSKMGSP

SEQ ID NO: 26817 - DNA, 348 bp, Unknown
  Obtained from environmental sample
  misc_feature (1)..(348): n is a, c, g, or t
atgtgcgatgaatacggccttcgcctttttttaaacgaggtatttcccgatacggattaccgttgcaagaagtgttatnttcttcgccttgaaaaagccgcgtccgcagcggcgcaggaaggatttgacgccttcactacaactttactgataagtccgtatcaggatcacgacgcaataaggctcgtcggcgaagaggctgcgaagaggcatggaattgagtttttgtacagggattttcgcccgctgttccgggaaggacaggccgcagcccgttcaatagggttttatatgcaaaaatactgcggctgtatcttcagcgaagaaaagcgctttttagtgaaataa

SEQ ID NO: 26818 - protein, 115 aa, Unknown
  Obtained from environmental sample
  DOMAIN (1)...(111): Uncharacterized BCR, COG1636
  misc_feature (1)..(115): Xaa is any amino acid
MCDEYGLRLFLNEVFPDTDYRCKKCYXLRLEKAASAAAQEGFDAFTTTLLISPYQDHDAIRLVGEEAAKRHGIEFLYRDFRPLFREGQAAARSIGFYMQKYCGCIFSEEKRFLVK

SEQ ID NO: 26819 - DNA, 726 bp, Unknown
  Obtained from environmental sample
  misc_feature (1)..(726): n is a, c, g, or t
atgtcaaacaatattaatccgatttttcatagagttgcccttctcaccggtgaagacggacttgaaaaaataaaaaaaacaaatgttcttgttttcggggcaggcggcgtaggaagctggtgcgcggaagcgctggtcagaagcggtataggtaaaataggaatagttgattttgacacggtatgcgaaagcaatattaaccgtcaggcagaggcgactgtaaacacgttaggacgtgttaaagttgacgttttaaaacagcgtcttttggaaataaaccccgaatgtgaagtaatcgctgtaaacaaacttttttgcagagaagagtcatcttcttttaatattgaaaaggcggattatgtaatagacgcaattgacacaattaatcacaagattgatctgattgaaaaaacctgcaacgcgaatgttactctttattcttcaatgggaatggcgcttaaaatggacccttcccagataaaaacaacgtcaatctgggacactcaaatctgccctttggcgcggcttgtaaggcagggcttaagaaaacgcggtttttcgtcaaattttaccgtagtctattcaagcgaaacgccaatccgcgcccaaactgcctgtgccgcctctaccggagaaaaattgcctaacggcagcattgttaccgttacggcaagcgcagggttcctgttagcgagcctcgtgttacgtgatattacggggttataa

SEQ ID NO: 26820 - protein, 241 aa, Unknown
  Obtained from environmental sample
  DOMAIN (25)...(160): ThiF family
  misc_feature (1)..(241): Xaa is any amino acid
MSNNINPIFHRVALLTGEDGLEKIKKTNVLVFGAGGVGSWCAEALVRSGIGKIGIVDFDTVCESNINRQAEATVNTLGRVKVDVLKQRLLEINPECEVIAVNKLFCREESSSFNIEKADYVIDAIDTINHKIDLIEKTCNANVTLYSSMGMALKMDPSQIKTTSIWDTQICPLARLVRQGLRKRGFSSNFTVVYSSETPIRAQTACAASTGEKLPNGSIVTVTASAGFLLASLVLRDITGL

SEQ ID NO: 26821 - DNA, 543 bp, Unknown
  Obtained from environmental sample
  misc_feature (1)..(543): n is a, c, g, or t
ttggaaacttttggagctggtgtttatttggtgagaggcgtggcggtcactatgtttatggagattggtccccttataaccgcaataattttggcggggcgttccggttcctcaataacagcggaaatagcttctatggttgttcaagaagaagtaaaggctctaagagttatgggtattcaccctgttcaatatcttgtgctgccacgcttccaggctatgagcatagcaactccaatgctgacgatgcttgccgatattgctggttgctttgcgggttatttaatcgcaactctatatattgggcttccaacttcgctgtttttatccgagcttagggaagctctttcaataattattctagttaaatcccttttcaagggtttgattttcgggtggctaatatccctaattgccgtttcaaagggtctctcggtgcgtggcggcgcagatgcagttggagttgcaacaaccaagtgcgttgtattctccataacggcaataatactagccgatgccgtgttttctttcgtattctattga

SEQ ID NO: 26822 - protein, 180 aa, Unknown
  Obtained from environmental sample
  DOMAIN (1)...(180): Domain of unknown function DUF140
  misc_feature (1)..(180): Xaa is any amino acid
METFGAGVYLVRGVAVTMFMEIGPLITAIILAGRSGSSITAEIASMVVQEEVKALRVMGIHPVQYLVLPRFQAMSIATPMLTMLADIAGCFAGYLIATLYIGLPTSLFLSELREALSIIILVKSLFKGLIFGWLISLIAVSKGLSVRGGADAVGVATTKCVVFSITAIILADAVFSFVFY

SEQ ID NO: 26823 - DNA, 1053 bp, Unknown
  Obtained from environmental sample
  misc_feature (1)..(1053): n is a, c, g, or t
atgatcagatcggcacgagggtttgaccgcttttccatattgaatattcccatgggagggcgttccgaaggcatggcgggggcgttttccgcagtctctgacgatgtttctttccttgaatttaatccggctggttcatcaatgctggaaaaatcggaattggcgttctttcacagtaactggatagcggatgtgaagattgagggtatcgcttacgccgcgcgttttgaaaattttggtattgccgccggcgcgaagtggctctacacgccctttaccgaatacaactattacggcgatagagtgtccggcggctattattcggaaggcgtggcgattataaacgcttcctataattttttctcgggttattacttttccgggctgtccctgggaatgaacgtaaaaggagctttccgctccatgcccgattttaccgacgatcatgacaacataatcaagggctccggtatggagcaatccgcggcaatggttatggcggatgtcgggatgcttacaaggtttaattttttaaaaagttattcttcaagggacaagaacgcgtccgtcgcccttgtcatccgcaaccttggtccgcccgcccttgacgagcccctgccgacagtagctaacgctgcaatttcgtataaacccattcgtccgctgactttaggcgttgattttttgatgccggttaatatgacggatttttctctttccgagtcgccttacagggctgtaggtatggctgttaatgttacaaagtttttatctatgcgcaccggcgtgatggtaaaaccgggaaacagccgtattactgtcggcagcgcaattgacatggaaaaaatttcttttgacgtaaactatactctggatttacttacgcagttacagccccttaacaggatcagccctgcggtgcgttttgatttacgcgacggaagcagagggcttttgtncaaaaaagcagatgaattgtatattttgggtcttgaggctttatcaaagggaaactttgacgatgccagaatgctgctgggaagaaactcctaa

SEQ ID NO: 26824 - protein, 350 aa, Unknown
  Obtained from environmental sample
  DOMAIN (1)...(286): Uncharacterised protein family (UPF0164)
  misc_feature (1)..(350): Xaa is any amino acid
MIRSARGFDRFSILNIPMGGRSEGMAGAFSAVSDDVSFLEFNPAGSSMLEKSELAFFHSNWIADVKIEGIAYAARFENFGIAAGAKWLYTPFTEYNYYGDRVSGGYYSEGVAIINASYNFFSGYYFSGLSLGMNVKGAFRSMPDFTDDHDNIIKGSGMEQSAAMVMADVGMLTRFNFLKSYSSRDKNASVALVIRNLGPPALDEPLPTVANAAISYKPIRPLTLGVDFLMPVNMTDFSLSESPYRAVGMAVNVTKFLSMRTGVMVKPGNSRITVGSAIDMEKISFDVNYTLDLLTQLQPLNRISPAVRFDLRDGSRGLLXKKADELYILGLEALSKGNFDDARMLLGRNS

SEQ ID NO: 26825 - DNA, 870 bp, Unknown
  Obtained from environmental sample
  misc_feature (1)..(870): n is a, c, g, or t
atgatggccgagttggatgcttctgattcacatactttgattatagggtcaacgggttcgaagaaaagccgtttgtttgttatgccaacaattaaacttctaggatatgcaggagagtctattattgtaacagaccctaaaggagagatttaccatagaactgcctctgatcttaaaaaaaataattatgaaatcacagttattaacctgcgtgaccccaaagaaggcgattcgtggaatccgctgtacataccatatatattttatctcaacggacaaatggcaaaagcttacgaatttgttaatgacatcggaaccaatttaatgctaacggaaataagtgtaaaggatccatattgggataatgccgcaagcgatttatttcttggattaacattgttgttgtttcgtatttgcaaagaagctaacttgccgcctgatatggtgaatataagcaatctattacgattaagaagaaaaatgttttttgaatatatgagactacgcgattttatggatttgccaataggagagtacattagaaaagatgaaataatagaaactagtttgatcgggagtctaggtaatgcggagaaaacgcaacaaaatattgttagcttatttgatagtaaaatgcgtgtttttgtcattcaaccagagttgtctcgaatgctatccaagggtaaccaaatattgaactctgtcgggcagaaaaaaacggctgtttttcttatcatgcctgatgaaaaaacaagctatcataaacttatatctgtttttattaaacaaagttatgagtattttatatgtcaggcccaaggggtttccgaacaagaagatgcctatacgaatcaactatgttttagatga

SEQ ID NO: 26826 - protein, 289 aa, Unknown
  Obtained from environmental sample
  misc_feature (1)..(289): Xaa is any amino acid
MMAELDASDSHTLIIGSTGSKKSRLFVMPTIKLLGYAGESIIVTDPKGEIYHRTASDLKKNNYEITVINLRDPKEGDSWNPLYIPYIFYLNGQMAKAYEFVNDIGTNLMLTEISVKDPYWDNAASDLFLGLTLLLFRICKEANLPPDMVNISNLLRLRRKMFFEYMRLRDFMDLPIGEYIRKDEIIETSLIGSLGNAEKTQQNIVSLFDSKMRVFVIQPELSRMLSKGNQILNSVGQKKTAVFLIMPDEKTSYHKLISVFIKQSYEYFICQAQGVSEQEDAYTNQLCFR

SEQ ID NO: 26827 - DNA, 1155 bp, Unknown
  Obtained from environmental sample
  misc_feature (1)..(1155): n is a, c, g, or t
atggaagctaatggaacttatgattcccaaaaatcaggggacggttttaaattcaggcaaggtaaatatgtaagtcttaaccttacaggtaacgcattaaaaaccattccatcgggtgctttttataattatgacacagataaatatgacacaaataaagggtgtaaaacgcttgtcagtataactataccgaacagcgttaccagcattgggttaggagcttttgagcattgtaccagccttaccagcgttaccatagggaacaaagttaccagcattgagtttgcggcttttcgcggttgcaccagccttaccagcgtaacaataccgaacagcgttaaaagcattgagcctgcggcttttcaaaattgcagaagccttaccagcataaccataccgaacaaagttaccagcattggggaacaagcttttgacggctgtaccagccttaccagcgttaccatagggaacaaagttaccagcattgaggctgatgctttttacgaatgtaccagccttaccagcataaccataccgaacaaagttaccagcattggatttgcggcttttcaagattgcagaagccttaccagcgttaccatagggaacaaagttaccagcattgagtatggcgcttttcacggttgcaccagccttaccagtataaatatccccaacaacgtacccagtattggtcaatatgcttttagaaattgcacaagccttgccagtataagtattcctgacaacgttaacagcattgggggttccgcttttagcggttgcaccagtcttgccagagtaaccataggaagcggagttaccagcattgggagtaacacttttcaaggttgtaccagccttaccagcgtaactctaaacaatggtcttaccagcattggtaatttaacttttgcaggttgcacaggacttaccattataacaatacctgacagcgttaccagcattggtaatttaacttttaatggttgcaccagccttaccagtataagatttgaaagagttggtactacttttggatctagtgcgtttcctaatggtgcatctttactgtcagcgtatactgccggaggcataggaacatatacaagaccggatacgacaagcacaacgtggacaaaaatatcgaattaa

SEQ ID NO: 26828 - protein, 384 aa, Unknown
  Obtained from environmental sample
  misc_feature (1)..(384): Xaa is any amino acid
MEANGTYDSQKSGDGFKFRQGKYVSLNLTGNALKTIPSGAFYNYDTDKYDTNKGCKTLVSITIPNSVTSIGLGAFEHCTSLTSVTIGNKVTSIEFAAFRGCTSLTSVTIPNSVKSIEPAAFQNCRSLTSITIPNKVTSIGEQAFDGCTSLTSVTIGNKVTSIEADAFYECTSLTSITIPNKVTSIGFAAFQDCRSLTSVTIGNKVTSIEYGAFHGCTSLTSINIPNNVPSIGQYAFRNCTSLASISIPDNVNSIGGSAFSGCTSLARVTIGSGVTSIGSNTFQGCTSLTSVTLNNGLTSIGNLTFAGCTGLTIITIPDSVTSIGNLTFNGCTSLTSIRFERVGTTFGSSAFPNGASLLSAYTAGGIGTYTRPDTTSTTWTKISN

SEQ ID NO: 26829 - DNA, 636 bp, Unknown
  Obtained from environmental sample
  misc_feature (1)..(636): n is a, c, g, or t
ttgaaaagtgttactcccaatgctggtaactccgcttcctatggttactctggcaagactggtgcaaccgctaaaagcggaacccccaatgctgttaacgttgtcaggaatacttatactggcaaggcttgtgcaatttctaaaagcatattgaccaatactgggtacgttgttggggatatttatactggtaaggctggtgcaaccgtgaaaagcgccatactcaatgctggtaactttgttccctatggtaacgctggtaaggcttctgcaatcttgaaaagccgcaaatccaatgctggtaactttgttcggtatggttatgctggtaaggctggtacattcgtaaaaagcatcagcctcaatgctggtaactttgttccctatggtaacgctggtaaggctggtacagccgtcaaaagcttgttccccaatgctggtaactttgttcggtatggttatgctggtaaggcttctgcaattttgaaaagccgcaggctcaatgcttttaacgctgttcggtattgttacgctggtaaggctggtgcaaccgcgaaaagccgcaaactcaatgctggtaactttgttccctatggtaacgctggtaaggctggtacaatgctcaaaagctcctaa

SEQ ID NO: 26830 - protein, 211 aa, Unknown
  Obtained from environmental sample
  misc_feature (1)..(211): Xaa is any amino acid
MKSVTPNAGNSASYGYSGKTGATAKSGTPNAVNVVRNTYTGKACAISKSILTNTGYVVGDIYTGKAGATVKSAILNAGNFVPYGNAGKASAILKSRKSNAGNFVRYGYAGKAGTFVKSISLNAGNFVPYGNAGKAGTAVKSLFPNAGNFVRYGYAGKASAILKSRRLNAFNAVRYCYAGKAGATAKSRKLNAGNFVPYGNAGKAGTMLKSS

SEQ ID NO: 26831 - DNA, 516 bp, Unknown
  Obtained from environmental sample
  misc_feature (1)..(516): n is a, c, g, or t
atgtacgaagaatgggtaacccgcatgaacatcgcggcaagcgcgtctgaaaagagcgcgatcgtcgaagaaatgcgggaaagatttggggtatccaatgcaaaggcgtacaaaatgctcaatgaaggcgggtgggaatcgggccgcaaacggcggcgcgatgccggcacaaccagcatggacgagaggagcctgaagatcatcgcggggatgtgccaggagtgcgtgaggaaaaacggcacgcaaaccttgcctgtcaatgttgccagggcgattgcggtagaaaacggcatacccgttacggttggggacagccagcttcgctctctattacgaaagtacaatatttccattgccgacgctaagacgcccacgccccaccagcggatgcgcagcgaataccctaaccaggtgcactgcaccgacccgtcggtgagcctactttattattcgccaagcgggaagcaaaaaatcatcaaggacagcgagggatacaaaaacaaaagcttcttgtaa

SEQ ID NO: 26832 - protein, 171 aa, Unknown
  Obtained from environmental sample
  misc_feature (1)..(171): Xaa is any amino acid
MYEEWVTRMNIAASASEKSAIVEEMRERFGVSNAKAYKMLNEGGWESGRKRRRDAGTTSMDERSLKIIAGMCQECVRKNGTQTLPVNVARAIAVENGIPVTVGDSQLRSLLRKYNISIADAKTPTPHQRMRSEYPNQVHCTDPSVSLLYYSPSGKQKIIKDSEGYKNKSFL

SEQ ID NO: 26833 - DNA, 765 bp, Unknown
  Obtained from environmental sample
  misc_feature (1)..(765): n is a, c, g, or t
atgacagattggccgaggaaacaaaaatatcgaagaaatgttcatttaaaaatgccctgctgcatttttacgcataataacagcccccacaaggattttctggaaatagccgaaaaagcccaatgccctgtcttacagaccgaactggggtcggccgaattttccaccagaataatgcgtattctttccgtaattttttcccctcgtaaaatcgtccatggggtgcttgtagaagtctacggccttggaatacttattcagggggattcgggcgtcggaaagagcgagactgcccttgaacttatccaccggcagcaccgtcttgtcgccgatgatgtcgtggaaatttacgcttccggaaatacattgatggggacgggggcgaacaagatcatagggcatcacatggaaatacgcgggcccggcattattaacataacgcatcttttcggggtaagggccatacgcgacagaaaagaaattcaacttgtcgttgaacttgaagaatgggatcaagacaaaaattacgaccgccttggagcggaagaacatacggttaaacttttgggaattaacatcccttcaataacaatacctgtaaaacccgggcgaaatatcccgattattatcgaaactgccgccatgaacgaaaggttaaaatccatgggttataatgccggaaaggagtttaacagaaacatccttaaatggatagaaagcgattccacccgatctgtcttcttcggacaggacgacgtgatttaa

SEQ ID NO: 26834 - protein, 254 aa, Unknown
  Obtained from environmental sample
  DOMAIN (64)...(244): HPr Serine kinase C-terminus
  misc_feature (1)..(254): Xaa is any amino acid
MTDWPRKQKYRRNVHLKMPCCIFTHNNSPHKDFLEIAEKAQCPVLQTELGSAEFSTRIMRILSVIFSPRKIVHGVLVEVYGLGILIQGDSGVGKSETALELIHRQHRLVADDVVEIYASGNTLMGTGANKIIGHHMEIRGPGIINITHLFGVRAIRDRKEIQLVVELEEWDQDKNYDRLGAEEHTVKLLGINIPSITIPVKPGRNIPIIIETAAMNERLKSMGYNAGKEFNRNILKWIESDSTRSVFFGQDDVI

SEQ ID NO: 26835 - DNA, 627 bp, Unknown
  Obtained from environmental sample
  misc_feature (1)..(627): n is a, c, g, or t
atggaggatgttttatcggtttacgcgcgcccatatgacccaaaaaggcctgttatatgcatggatgagaagccgtatcaattgcttggccttacccgcccatctttgcctatggaacccggctcccctgagcgggaagattttgaatacatacggattggcatatgcagtatttttatatttgccgaaccgcttggcggctggcgctacgcggaagcatttccacggcggacggaaaaggattgggcgcatcggataaaatggctgcttgacaagcaatacgccaaagcagaaaaagttgtgcttgtgatggacaacctaaacacgcatgcaatttcttcgctctacgaagcctttacgccaggggaagcgtttcggctggcgcaacggcttgagattcattttactccgaaacatggaagctggcttaacatagcggaagttgagctgtccgcaatgacagcacaatgcttaggcaagaggcgcattcctggaattaattccttgaatgaggaactcgctgcctggcatgttaggcgcaaccagaaccagaggggcgttgactggcattttacaaccgatgacgcgcgggacaaactaaagatgctctaccctataatagtgtaa

SEQ ID NO: 26836 - protein, 208 aa, Unknown
  Obtained from environmental sample
  misc_feature (1)..(208): Xaa is any amino acid
MEDVLSVYARPYDPKRPVICMDEKPYQLLGLTRPSLPMEPGSPEREDFEYIRIGICSIFIFAEPLGGWRYAEAFPRRTEKDWAHRIKWLLDKQYAKAEKVVLVMDNLNTHAISSLYEAFTPGEAFRLAQRLEIHFTPKHGSWLNIAEVELSAMTAQCLGKRRIPGINSLNEELAAWHVRRNQNQRGVDWHFTTDDARDKLKMLYPIIV

SEQ ID NO: 26837 - DNA, 669 bp, Unknown
  Obtained from environmental sample
  misc_feature (1)..(669): n is a, c, g, or t
atgatggccgagcggccgagcggcacgagagtcgtgaaaagtgatatatttaaggaggagagaagaatggaagcaacacaaacagcaagttatccactagatgacagtcatccaaaggatgacagtccaccttgttttgagactgtgtgggcggcattgaaggaagtcgctgaacgacaaaaagaaactgaacgtcaaatgaaggaaactgaccgtcaaatgaaggaaactgacaggcggctcggcaagctgggcaaccgtatgggtgaaattattgaacatatggttgcgcctaatttgcgtcataaattcagggaattaggtcttatttttcctaaagccaatcctaattcggatgttgccgattatgacaataaaatattccttgaaattgatgttttactggaaaacggtgaaaaagccatgcttgtcgaagtaaaaaccaatcttactaccgaagatgtgcaggagcatattaaacgtcttgaaagaatgcgtgtatatgccgatttgcacggcgacaagcgcacattcctgggatcagttgcaggggttgtattaacagccaatgtaaaagaatatgcgttaggaaaaggattatatgttatagaaccctcgggagatacttttaatattattccgccaaacggtcaaccgaaagaatggtaa

SEQ ID NO: 26838 - protein, 222 aa, Unknown
  Obtained from environmental sample
  misc_feature (1)..(222): Xaa is any amino acid
MMAERPSGTRVVKSDIFKEERRMEATQTASYPLDDSHPKDDSPPCFETVWAALKEVAERQKETERQMKETDRQMKETDRRLGKLGNRMGEIIEHMVAPNLRHKFRELGLIFPKANPNSDVADYDNKIFLEIDVLLENGEKAMLVEVKTNLTTEDVQEHIKRLERMRVYADLHGDKRTFLGSVAGVVLTANVKEYALGKGLYVIEPSGDTFNIIPPNGQPKEW

SEQ ID NO: 26839 - DNA, 456 bp, Unknown
  Obtained from environmental sample
  misc_feature (1)..(456): n is a, c, g, or t
gtgtacattgacgaaagcggcataaacacatacttgcagcgcgaatatgcccgcgccccccgcggggaaacaatcgaggataccaggcccgggcaaaaatttgaacgcataaatgtcatcggggctgtttgccagggaaactattacgggatcgaatgctatagccatgcaacaaacagcgcgttctttgaagactggtttgaaaatactttaatcgaagaaatacccacgggctgcacagtgataatggacaacgcgagatttcacaaacagaaaaggctaagaaaacttgcgagggggaaagcgcggctattgtttctccctcccatatcgccggactataatccgatagagaaaacctgggcaaacatgaaacgcttcttccgcaacagcttgaaagactttcaatctgtcgattcaggtatttataatcattttgggcttatagaaaactaa

SEQ ID NO: 26840 - protein, 151 aa, Unknown
  Obtained from environmental sample
  misc_feature (1)..(151): Xaa is any amino acid
MYIDESGINTYLQREYARAPRGETIEDTRPGQKFERINVIGAVCQGNYYGIECYSHATNSAFFEDWFENTLIEEIPTGCTVIMDNARFHKQKRLRKLARGKARLLFLPPISPDYNPIEKTWANMKRFFRNSLKDFQSVDSGIYNHFGLIEN

SEQ ID NO: 26841 - DNA, 345 bp, Unknown
  Obtained from environmental sample
  misc_feature (1)..(345): n is a, c, g, or t
atggcatatagcatagactttatagaaacggcggtagcttataaaaacaacgggcatacgtttaaggatctgcgcgaggcattcggaattccaccggaaacattttacaaatgggaaagcaggcttgaaagcggctattacgatgtggaaaggcccaaacaagagcgaaacagaaaaataaacaaagagcaattgagaaaagccgtcgctgaaaacccggacgcgtttctttatgagctggcggggatttttgactgtagcccgcaagcggtattctccatgctccaaaaaatgaaaataacgctaaaaaaaagacttttacctaccgcgaaaaatcggatgtag

SEQ ID NO: 26842 - protein, 114 aa, Unknown
  Obtained from environmental sample
  DOMAIN (1)...(114): Transposase
  misc_feature (1)..(114): Xaa is any amino acid
MAYSIDFIETAVAYKNNGHTFKDLREAFGIPPETFYKWESRLESGYYDVERPKQERNRKINKEQLRKAVAENPDAFLYELAGIFDCSPQAVFSMLQKMKITLKKRLLPTAKNRM

SEQ ID NO: 26843 - DNA, 570 bp, Unknown
  Obtained from environmental sample
  misc_feature (1)..(570): n is a, c, g, or t
atgaacgtgggtcagatcctagagactcacataggctgggccgccgccaagttaggtttcaacgtggccacgccggtatttgacggagctagctatgatgatgtcttggacttgttgaaaaaggccgatttgccgagaagcgggaagattcagttgagggacggaagaaccggatccccgttcgaccacgaggtgacggtcggcccgatctatatgatgaagctgtgccacttagttgacgacaagatccacgcccgttccataggcccgtactccctagttactcagcagccccttggaggaaagtcccaattcggcggccagcgcttcggagaaatggaagtctgggccctggaagcctacggcgcggcttataccctacagcaaatactaacagtaaaaagtgatgatttggcgggtcgttccaagatatacgagtcgatagtaaaaggagaaaacgctcccccggcaggcgtaccggaatcgttcaaagtgctagtccgagaagtaaaagccttggcgttcgatttccacactgtcgatgatgagatgacagaaattaagatgtag

SEQ ID NO: 26844 - protein, 189 aa, Unknown
  Obtained from environmental sample
  DOMAIN (1)...(104): RNA polymerase Rpb2, domain 6
  misc_feature (1)..(189): Xaa is any amino acid
MNVGQILETHIGWAAAKLGFNVATPVFDGASYDDVLDLLKKADLPRSGKIQLRDGRTGSPFDHEVTVGPIYMMKLCHLVDDKIHARSIGPYSLVTQQPLGGKSQFGGQRFGEMEVWALEAYGAAYTLQQILTVKSDDLAGRSKIYESIVKGENAPPAGVPESFKVLVREVKALAFDFHTVDDEMTEIKM

SEQ ID NO: 26845 - DNA, 825 bp, Unknown
  Obtained from environmental sample
  misc_feature (1)..(825): n is a, c, g, or t
ttgctctttgccgccgccgatcaggcgaggcgcctctttttcgggggcgcggttgacccgtgcgcgattatgaacgtcaagtcgggcgggtgcggcgaggattgcgccttctgctcgcagtcagcccgcaatcgtgccggcgtggcggtgcgcgggctctctgcttcggaagaaattatctctcggtgccgcgaggcgtggtccaaaggcttgcctttttgcgtggtgtccagcggcaagcgtcttgacaaatcggaatttcaagcgttgtgcgaaacgctttcggaatgcggaaacgacggggagaaacacgcctcgctgggaatcctcaatgatagtgatttcgcggcgttgcgtgaggcgggcgtcgtttgctacaaccacaacttggagacgagccgcgattatttcggcaagattgtgaccacgcacgggtacgacgatagggtggctaccgtacgcagggcgcgtgctgcggggctgcgggcgtgctgcgggggcattttcggcgtgggggagagctgggatgacaggatagcgctctgtttggagttgcgtgggctgggggtagacaccgtacctataaactttctgaatgccattgagggtacgcgggtgaagcagcctaaggagacgccgcttgaatttttgaaaatcgtctcgctgtacaggcttgcaatgcctaaggcgacgataaaagtctgcggagggcgggagaagaatttggggttgttgcagccgttgatttttcaggcggggggcaaacgggtacattaccggcggatacttgactacngagggcgcgggggtggaggcggacaatga

SEQ ID NO: 26846 - protein, 274 aa, Unknown
  Obtained from environmental sample
  DOMAIN (194)...(267): Biotin and Thiamin Synthesis associated domain
  misc_feature (1)..(274): Xaa is any amino acid
MLFAAADQARRLFFGGAVDPCAIMNVKSGGCGEDCAFCSQSARNRAGVAVRGLSASEEIISRCREAWSKGLPFCVVSSGKRLDKSEFQALCETLSECGNDGEKHASLGILNDSDFAALREAGVVCYNHNLETSRDYFGKIVTTHGYDDRVATVRRARAAGLRACCGGIFGVGESWDDRIALCLELRGLGVDTVPINFLNAIEGTRVKQPKETPLEFLKIVSLYRLAMPKATIKVCGGREKNLGLLQPLIFQAGGKRVHYRRILDYXGRGGGGGQ

SEQ ID NO: 26847 - DNA, 540 bp, Unknown
  Obtained from environmental sample
  misc_feature (1)..(540): n is a, c, g, or t
ttgatcagatcggccgagactgggatcagatgccgtactttcttttctggaaccattgacggttcttcgctgacaggaagggggacgaaccttgaatctcttttagaagcgggcgcggaggctttccagccttcccacccttcaaacagggtgatacttcttgtttcagacggcgaggaactgacaggttcgataaggaacgccctttcgcgctgtaaccggaatgacataaccgtcacctcaatactgacaggaagcgacgaaggcgcgcccgttccggacagtgaagacatcatcagccgccgtgatgccgcgaccatgcggacagccgcaggtcttactggcggaatctttattgacgcgaaccgttctgatgccgccaagcttcttgtcagccatcttcgttcccttgcagaggaaacagaaagtccgaaaaacaatgaaacaagcaaggaacgctggtttgtatttttgatattggctataattgcttatggcgcttcgaaaatatctctattgaatatcgggagcagaaaatga

SEQ ID NO: 26848 - protein, 179 aa, Unknown
  Obtained from environmental sample
  misc_feature (1)..(179): Xaa is any amino acid
MIRSAETGIRCRTFFSGTIDGSSLTGRGTNLESLLEAGAEAFQPSHPSNRVILLVSDGEELTGSIRNALSRCNRNDITVTSILTGSDEGAPVPDSEDIISRRDAATMRTAAGLTGGIFIDANRSDAAKLLVSHLRSLAEETESPKNNETSKERWFVFLILAIIAYGASKISLLNIGSRK

SEQ ID NO: 26849 - DNA, 714 bp, Unknown
  Obtained from environmental sample
  misc_feature (1)..(714): n is a, c, g, or t
atgacaaaagggaacagggacttggttcataaacgtcgcgttatactatcacgcctagtttacatacaacaacattgctcattgctcattgctcattgctcatttcccaaaccccgatcccccctactccctactccctactccctactccctttcattttattattacttgcaaacgtaagcagctgttctaatgtatcangaaaattatttatcatagaagccaatttcctcagttcacagggcaggtttacagaggcgattacccaatacacgaaggcgcttgagtatgaagactccgcaccttatgcggaatacggtcttggaaccgtttatttatcaatgggcgaagaaaatgccgctctggacagttttgcaaaagccgggaatatgcttgacagcctggatcaaaaccaggaactccgctaccgcgtatgctataatacgggcgtagccttattcagcaggggagatttttcaggcgcggctgattctttccgtgacgcgctcaaaatagacggaagaaaaatagaagcaaaacgtaatttggagttgagtattttgtcaattgccaggcagaatactatcagcggcgataacagggacaatgagggcctgtccgccctgtttgattatatccggcagaaggaacttgcccagtggacaaacagggactggcagcccgaggaagacagcgcggagccggactattag

SEQ ID NO: 26850 - protein, 237 aa, Unknown
  Obtained from environmental sample
  DOMAIN (143)...(176): Tetratricopeptide repeat
  misc_feature (1)..(237): Xaa is any amino acid
MTKGNRDLVHKRRVILSRLVYIQQHCSLLIAHCSFPKPRSPLLPTPYSLLPFILLLLANVSSCSNVSXKLFIIEANFLSSQGRFTEAITQYTKALEYEDSAPYAEYGLGTVYLSMGEENAALDSFAKAGNMLDSLDQNQELRYRVCYNTGVALFSRGDFSGAADSFRDALKIDGRKIEAKRNLELSILSIARQNTISGDNRDNEGLSALFDYIRQKELAQWTNRDWQPEEDSAEPDY

SEQ ID NO: 26851 - DNA, 1278 bp, Unknown
  Obtained from environmental sample
  misc_feature (1)..(1278): n is a, c, g, or t
gtgtatataagatccaatatcgatcatgtttgggtggtggggatacccaaggaatttcgcgcagacggcagccgcgcggacaaaattgaaattccccttccaaaactggagctttcaggcagcaaaaaaaaagccctggagcgggccgaggcgttcagtccatacgcgcttctttacgcggagaccttgcaggatgggctgcccgtaagagaacacccggataacggcgccaggagggtttaccggctaaaactgggagaaatcattaaagttttgactcctgtcgaaggagttgaagcggttggagcttcaggggatcccctgccagggcaatggtaccgggttctgacggaagacggcactaccggctactgcttttcttaccggctgaagcttttcgatcacaccggaggctcccttgcggcgattgtgcttgaccagcaggagccggaagaccccaatttggaaagacttttaacccgtacctggtcggctgaagtctacggtactatggtaaataccggtaaaataaatcttgatgagctttcgtaccattggtgttttgatcccgggcaggatacaggtattgccgtaataagaacaaaagatctggaactcagttttgaatatatcaaaattcgctcaacggggtcacaatcctggcgttttgaagggacgcctttgcagatgaacctgcgttctgaaaccacgctggcggtacagttcacaggtgaaaacggagtgctgcgaaccctgctttttgttgcacttccttcttctgttgatgacattattttacaggaaaccgcgcgccgggaagaactcttccgcaatctttatgagcttgggccggtatacatcagcaataattacggaaccctaactttttacgaagacgggcgtttttcctgggccggcaattaccttttggtgcctcaggtgatttcaccttcggccctggggagcggtattctggatatgcggctccatgtgtctgatgtcttaagcagccgctatgacggggcgtttacaatgcgctttgacggaatcggcggcttaaggacaactacggatttcatttatgccatcgatccgcagggccttagaatagaatatgtgcctgagactagcctggacggaattatcgtcgtcaggcgggcatcttctccggttgtaatttacttctttagaaacgatattcaagacgaaagctcttctttattaccacaagattatgagggagaggacgtcgattcagaatacttgtttgagtattaa

SEQ ID NO: 26852 - protein, 425 aa, Unknown
  Obtained from environmental sample
  misc_feature (1)..(425): Xaa is any amino acid
MYIRSNIDHVWVVGIPKEFRADGSRADKIEIPLPKLELSGSKKKALERAEAFSPYALLYAETLQDGLPVREHPDNGARRVYRLKLGEIIKVLTPVEGVEAVGASGDPLPGQWYRVLTEDGTTGYCFSYRLKLFDHTGGSLAAIVLDQQEPEDPNLERLLTRTWSAEVYGTMVNTGKINLDELSYHWCFDPGQDTGIAVIRTKDLELSFEYIKIRSTGSQSWRFEGTPLQMNLRSETTLAVQFTGENGVLRTLLFVALPSSVDDIILQETARREELFRNLYELGPVYISNNYGTLTFYEDGRFSWAGNYLLVPQVISPSALGSGILDMRLHVSDVLSSRYDGAFTMRFDGIGGLRTTTDFIYAIDPQGLRIEYVPETSLDGIIVVRRASSPVVIYFFRNDIQDESSSLLPQDYEGEDVDSEYLFEY

SEQ ID NO: 26853 - DNA, 1308 bp, Unknown
  Obtained from environmental sample
  misc_feature (1)..(1308): n is a, c, g, or t
gtggaacttgaaaaccttgttaagcgctacgagctccaacaggaggaaatcgaaaaaaccgaagccttaattcgccgctttcgctacaaggcatccaaggcggctttcgcgcaggaacttatcaagcggctcgacaaaatggagcgcattgaaatcccggaaaacctaaagaaaataaacataagctttccgccgccgcctcattcgccgcgtgtggttcttacgctggaagggctttgcaagagctacggcgaaaggcaggttctatcctgtctcgatcttacccttgacgccagggaacggctgcttgtggcgggtcctaatggagcgggaaaaactaccttgttaagaattatagccggaggggatacggattacgaagggctggtaaaatacggctcacgtatatctgtcggatatttttcgcaggacgctgcggagaacatttctggtagcgagacggtggaacaatacatcgaggcggaagcgcccacatacctgattccaaaagtaaggggaatgcttggggcatttcttttccggggcgacgatgccttcaaacctctttcggtattgtcaggcggcgagaaaagccggcttgcaatgctcaggatgctgcttaaacctatgaaccttttgatactggacgagccgacaaatcacctggatttgcagagcaaggacatactgctggattgccttaaagctttcgaggggacaataatctttgtttctcatgatcggggttttatggaagccctttcaacaaaaacactggagctatcaattgggagattggcgggtgaagctgaaccgaagcggcgtcatcggcttttctacggaaactacgcttattatctggatcgcatagcaaaggaagaatcgaaccgtaggtttgttggtgagataagcacgggagatactcttgagatgaagccctccaaaagccagcagacggtcgcacctgtcattgacgcttcccctgaaccgctgccaaaggtcattcttgtcaaagcaggcgacgagaggccgcttagcgccgcggagcgtcgggaacaggaaaagcagaaacaggcttttgtgcggaagcttgagcgccaggaaacggaaacgctttcggccatggaaaagctggaaaccgaaaagaaacagcttgaggaaaaacttggcaagcctgaggtttactcgtcaggtgaaaaagccagggccgttaagctcgctctggacgaaacggtagcggctctggaagccaaatccaaagaatgggaaaacattgcaagcgaactggaaaaggctcgtaacatttaa

SEQ ID NO: 26854 - protein, 435 aa, Unknown
  Obtained from environmental sample
  DOMAIN (75)...(267): RecF/RecN/SMC N terminal domain
  misc_feature (1)..(435): Xaa is any amino acid
MELENLVKRYELQQEEIEKTEALIRRFRYKASKAAFAQELIKRLDKMERIEIPENLKKINISFPPPPHSPRVVLTLEGLCKSYGERQVLSCLDLTLDARERLLVAGPNGAGKTTLLRIIAGGDTDYEGLVKYGSRISVGYFSQDAAENISGSETVEQYIEAEAPTYLIPKVRGMLGAFLFRGDDAFKPLSVLSGGEKSRLAMLRMLLKPMNLLILDEPTNHLDLQSKDILLDCLKAFEGTIIFVSHDRGFMEALSTKTLELSIGRLAGEAEPKRRHRLFYGNYAYYLDRIAKEESNRRFVGEISTGDTLEMKPSKSQQTVAPVIDASPEPLPKVILVKAGDERPLSAAERREQEKQKQAFVRKLERQETETLSAMEKLETEKKQLEEKLGKPEVYSSGEKARAVKLALDETVAALEAKSKEWENIASELEKARNI

SEQ ID NO: 26855 - DNA, 741 bp, Unknown
  Obtained from environmental sample
  misc_feature (1)..(741): n is a, c, g, or t
atggtgaatgaagcaaccgttgccagattgcatgagatgaaattgtccgttatggcctcctcttaccggcagcagatggaggacaacgcaatacacaagctctcgtttgatgaacggttcggcttgctggtagataccgaatggacaagccgaaaaaacaaccgtctcaaacaccttatacacagagccggtttcccgttatcgggcgcctgcattgaggatattgaataccgtgcggaccgcaaattgaacagggaacaaataatccagctttcatcctgcggctatattgctgaaaaacacaatgtcattatcctcggcgcgaccggggccggtaaaacgtatctcagttgcgccttggggatggcggcctgccgccgcttctattcagttaaatatattcgtttgccggaattactggatgaactcgctgttgccagaggagaaggcatcttccaaaaggttatacagggatacaagaaaatagacttgcttgtccttgatgaatggcttttaattccgctcactgattctgaaagccgggatcttctggagatagttgaaagccgtcatggtcgttgctcaaccgtcttttcttcccaattcgatccggccggttggcagactaaaatcgttgaaggccctcttggagaagccgttcttgaccgtatagttcacgattcctacacaattttcattgacggtgaagaatccatgcggaagcataaaacgattctttag

SEQ ID NO: 26856 - protein, 246 aa, Unknown
  Obtained from environmental sample
  DOMAIN (23)...(52): IstB-like ATP binding N-terminal
  misc_feature (1)..(246): Xaa is any amino acid
MVNEATVARLHEMKLSVMASSYRQQMEDNAIHKLSFDERFGLLVDTEWTSRKNNRLKHLIHRAGFPLSGACIEDIEYRADRKLNREQIIQLSSCGYIAEKHNVIILGATGAGKTYLSCALGMAACRRFYSVKYIRLPELLDELAVARGEGIFQKVIQGYKKIDLLVLDEWLLIPLTDSESRDLLEIVESRHGRCSTVFSSQFDPAGWQTKIVEGPLGEAVLDRIVHDSYTIFIDGEESMRKHKTIL

SEQ ID NO: 26857 - DNA, 822 bp, Unknown
  Obtained from environmental sample
  misc_feature (1)..(822): n is a, c, g, or t
ttgttttcaggccgaggaaaaacattgaccggtaataacggcaagtctaccggctttttggttgataatgaaaaaacatttgttaaggaagaattaaatttatcggtaggagagtttgtgtatgggctaggggagcgtttcggtcccttggtgaaaaacgggcagactgtggatatatggaacgccgacggaggaagcgcgagcgagcaggcgtataaaaatattccgttttacatgacaaataaaggttacggcgtttttattaatgatacgggaaaagtttcgtttgaaatcggcagtgaaaaaacttcgcgcgttcaattttgcgttagcggggaagttttggagtattttttcatttacggcccagaacctaaaaagattttagaactctataccgctcttaccggaaggcccgccatgccgcctgaatggagtttcggcctttggctttcaacttcatttacaacttcgtacgatgaaaatacggtgatgagttttatcaacggcatggaagagaggaaaatccccctttctgtttttcattttgactgtttctggatgaaagggtttaactggtgcgactttacatgggatgataaagtttttcctgaccctaagggaatgttatcgcggattaaggcaaaggggataaaaatctgcgtatggatcaatccgtacatagcgcagaggtcttgtctttttgaggaaggaaagaaagacggatactttttaaaacaaaagaacggctctgtatacaaaacagaccaatggcaggccgggaatggctattgtgattttttccaatcccggcgctgttaa

SEQ ID NO: 26858 - protein, 273 aa, Unknown
  Obtained from environmental sample
  DOMAIN (118)...(272): Glycosyl hydrolases family 31
  misc_feature (1)..(273): Xaa is any amino acid
MFSGRGKTLTGNNGKSTGFLVDNEKTFVKEELNLSVGEFVYGLGERFGPLVKNGQTVDIWNADGGSASEQAYKNIPFYMTNKGYGVFINDTGKVSFEIGSEKTSRVQFCVSGEVLEYFFIYGPEPKKILELYTALTGRPAMPPEWSFGLWLSTSFTTSYDENTVMSFINGMEERKIPLSVFHFDCFWMKGFNWCDFTWDDKVFPDPKGMLSRIKAKGIKICVWINPYIAQRSCLFEEGKKDGYFLKQKNGSVYKTDQWQAGNGYCDFFQSRRC

SEQ ID NO: 26859 - DNA, 807 bp, Unknown
  Obtained from environmental sample
  misc_feature (1)..(807): n is a, c, g, or t
ttgnaaaagaagcgccgcgacgacgtagatactaaaaccgagcgggatgacggtattgatacagataatacgagtaatgtcaatactagcgatatcaatactgatagtgtcgatgatcatgatgttaatacagacggtatcaacacgagtgatattaatactgacggtataaatgataatgatattaatacatacggtatcaatacgaataatgccgataccgatgatatcaatactgacggtatcaatgttaatgataccaatactgacgatatcaatattgatgccatcaaaactgacgatatcaacacgaataacagtatcaataccgatgatatcaataccgccgacaataccggcacaaagaacgattccgatacaaaaggtaaaatacgctccctcttgtcaagcataaaatccaagatcgacgacataaagcgcagccgtatctacaaagtaatcagcaacaaaaccctgcgagaaaaactgctacgctggctcaaacgctccgccatccacgcgatacgaatcgcgtcattcgaaaagttgaaaatacatgtaaaagttggaacgctggatccagcgacgcttggcaaaatttacggctatttctccgcggccaaatcggcgctggcgctgcaaaactatcacgcggatttggcaatggagccgatattcatggaaaaacgcctagacatagattcggaactgcaactcaaaacaacgctgtcaaccttactatggcacctcgttgtaatagccgctacattcccttattggagagtttggaaagtaataaggagatga

SEQ ID NO: 26860 - protein, 268 aa, Unknown
  Obtained from environmental sample
  misc_feature (1)..(268): Xaa is any amino acid
MXKKRRDDVDTKTERDDGIDTDNTSNVNTSDINTDSVDDHDVNTDGINTSDINTDGINDNDINTYGINTNNADTDDINTDGINVNDTNTDDINIDAIKTDDINTNNSINTDDINTADNTGTKNDSDTKGKIRSLLSSIKSKIDDIKRSRIYKVISNKTLREKLLRWLKRSAIHAIRIASFEKLKIHVKVGTLDPATLGKIYGYFSAAKSALALQNYHADLAMEPIFMEKRLDIDSELQLKTTLSTLLWHLVVIAATFPYWRVWKVIRR

SEQ ID NO: 26861 - DNA, 828 bp, Unknown
  Obtained from environmental sample
  misc_feature (1)..(828): n is a, c, g, or t
atggaacggaagaggatttatatcactgtaaaaacatatccaacactctcggaaaaatatgcagaattggtatgtaccgcaggaattagtgaagacggttcgtgggtacgactctacccgcttcctttccgcaaattggataatgagcagaagtataaaaagtatcaatggatagaagcggatattgaacggaatacttcggattttcgcattgagagccataaagtgctaaatattgatactattaaagttattgagcttgaaaatacaaaagttaattgggaagaaaggaaacgtatattattcaaatccgagaaattgtatacaaatctggaagaaattattaagctagcgaaatctccgccctatcgttcccttgccattttcaagcctacaaatattttagatttctactttgaaccaaccgaaagggattggcctcaaaataaacttgagcaaatacgagaaaaagccaaacagctttctttattccaaacacctgatgaattaattgaagaatttaaagttgtccaaaaattaccctatttattcaaatacaggtttgaagacgatcaaggaaaagtctctaacttgatgatagaagattgggaagttggtactttgtatttgaattgcctgcgaaatgccaatggagatgagggaaaagctctggagaaagttagggagaaatactgggacgagtttatgaccaaggatatatttttcttccttggaacaagaaagagcgatcatcatttagctcaaaatccttttagtattgtaggggtgttttatccgcctgttgataagcagggggagttgttttaa

SEQ ID NO: 26862 - protein, 275 aa, Unknown
  Obtained from environmental sample
  misc_feature (1)..(275): Xaa is any amino acid
MERKRIYITVKTYPTLSEKYAELVCTAGISEDGSWVRLYPLPFRKLDNEQKYKKYQWIEADIERNTSDFRIESHKVLNIDTIKVIELENTKVNWEERKRILFKSEKLYTNLEEIIKLAKSPPYRSLAIFKPTNILDFYFEPTERDWPQNKLEQIREKAKQLSLFQTPDELIEEFKVVQKLPYLFKYRFEDDQGKVSNLMIEDWEVGTLYLNCLRNANGDEGKALEKVREKYWDEFMTKDIFFFLGTRKSDHHLAQNPFSIVGVFYPPVDKQGELF

SEQ ID NO: 26863 - DNA, 315 bp, Unknown
  Obtained from environmental sample
  misc_feature (1)..(315): n is a, c, g, or t
atgggcaaggggctggtgcttacaaaatacaccggaagcggcggcaagtacggggcaagcgatgccaacgcggaattctgcgccaaggttcagtctataatgaacaagaacaaagtccagtggcagttcggcgctctcgggaaagtggacaaaggcggcggcggaacaattgcgctttacgccgccaatctgggaatggacgtccttgactgcggcgtgcccgtcctgtccatgcactcgccgtttgaggtaatcagcaagatcgatctttttacgacgtacaggggatatatcgcgtttttgaataacgcgtag

SEQ ID NO: 26864 - protein, 104 aa, Unknown
  Obtained from environmental sample
  misc_feature (1)..(104): Xaa is any amino acid
MGKGLVLTKYTGSGGKYGASDANAEFCAKVQSIMNKNKVQWQFGALGKVDKGGGGTIALYAANLGMDVLDCGVPVLSMHSPFEVISKIDLFTTYRGYIAFLNNA

SEQ ID NO: 26865 - DNA, 372 bp, Unknown
  Obtained from environmental sample
  misc_feature (1)..(372): n is a, c, g, or t
atggttaagtttcaattaaagcttgataaacttgaaaagaagacgtcgatttgggcaaaaaaccggaaagtccgcatggaattccacattgaccgcgatatgcggcagaagtacggcttaaaagacagccttttttctctgaccggcaatgttttccttgccgacatgaagcagacccgtgagcttgccgccaaattcaacgcgaaacaagaccctaaccaccccgaaagatacataaaagccggccatctgtacgcgatggggcttatcgacgaaattctgcactatgttatcgccctctaccgcgaggaagtccagccggacgcttttgaaacggctttggacaggctgggaacaaacataggcgggtag

SEQ ID NO: 26866 - protein, 123 aa, Unknown
  Obtained from environmental sample
  misc_feature (1)..(123): Xaa is any amino acid
MVKFQLKLDKLEKKTSIWAKNRKVRMEFHIDRDMRQKYGLKDSLFSLTGNVFLADMKQTRELAAKFNAKQDPNHPERYIKAGHLYAMGLIDEILHYVIALYREEVQPDAFETALDRLGTNIGG

SEQ ID NO: 26867 - DNA, 969 bp, Unknown
  Obtained from environmental sample
  misc_feature (1)..(969): n is a, c, g, or t
ttgggcgcaaatggctatcaaataacaataaattatggctatatgatnnttctggataaagtgncagcaaaaagaatattggacttatccaaaccatacattttatttgctcttttcgcaattatatttattggctcttttatatatgcttttataaatggacatataataacaaatcttgatataaaaacaatatactttattatttcattgatagtatttttatcatttgtaaattcgttcaggaactataatttaataccaatattaatcaggtattctaaaagtaaatatcagaatagaattatcataaaacgttacttcctaaaacgggctttacttaataatttgtttctaatcatatttgatattattacattctattcaataataaaattttccattgcttatattcatatttttattgtacctggaattacaatattatcaataattgtatcgttaatgataatgtacataaaaaataaatattcaaataaaatatgttcggaaattggtaatagaaaatttaaagtaaatccattaataataagcgcaatatatgattatttttcatctgactttttaatattattgatattatgcgtaattattttaataatcttcataattaatatagccagggatatcaataatatttatgaattaagaaataattcgaatttatttatagtgattacgttaatattttctcttgggtttacaggcattattggctcaataccgcatatcaattggaaatttcaatctattgtctctccaaatagctttaaataccatttaaaaaggacatctcttgttcttttcggatttttgagttggctaattttactttttattgtttttggaagttttattaacgtaatgtttttattaaaatatttatattgcttatttgttttattttttacaattattagtatctcattaactacttcaaatatgtaa

SEQ ID NO: 26868 - protein, 322 aa, Unknown
  Obtained from environmental sample
  misc_feature (1)..(322): Xaa is any amino acid
MGANGYQITINYGYMXXLDKVXAKRILDLSKPYILFALFAIIFIGSFIYAFINGHIITNLDIKTIYFIISLIVFLSFVNSFRNYNLIPILIRYSKSKYQNRIIIKRYFLKRALLNNLFLIIFDIITFYSIIKFSIAYIHIFIVPGITILSIIVSLMIMYIKNKYSNKICSEIGNRKFKVNPLIISAIYDYFSSDFLILLILCVIILIIFIINIARDINNIYELRNNSNLFIVITLIFSLGFTGIIGSIPHINWKFQSIVSPNSFKYHLKRTSLVLFGFLSWLILLFIVFGSFINVMFLLKYLYCLFVLFFTIISISLTTSNM

SEQ ID NO: 26869 - DNA, 792 bp, Unknown
  Obtained from environmental sample
  misc_feature (1)..(792): n is a, c, g, or t
gtgctgtacggagacacggattccctttttgtgaaaaccggccttacagatgccgctttgttggctgattttgaggaactctgcggtggcctggcaaaagaactcaacctgcttatctcgcaaactatccgcagggaatacgatctgggatcttttatcgagcttcgttttgaaaaagcctaccgccgttttttaattccccctttaaggaattttcacagccgcgatgcttccctagccgaacagagggaaagcaggggcagggcaaaaggctacagcggttatttgatccatcctgccggggatgacaagggcctgagcgtggaagtaaaaggaatggaagcggtacgcagcgattctacccctctggcgcgccgtcttcaactggagcttttggaactggttttctcaggctgtagcgaggaagaattcagggaaaaggtgggcaagactcttgctgaactgcgaagcggcgtgcttgaaaatgagctcgtgtaccgcaagcgcctgtaccgttatgccgatacgtacacttcctcaaccccgccccaggtaaaggccgctcgcgccttgggctggaaaaaacagcgcggcaccgtggagtatttgtggaccgtgaacggacctgagccgctggcccttccccacggaaaacccgactatgatcactacgccgattcacaggtattcccgctggtccgttccattgccgcggcggcccggtgggacgttgatttttttagcactggtaaaagccgcgacacagggcagatggaactggggtttggttag

SEQ ID NO: 26870 - protein, 263 aa, Unknown
  Obtained from environmental sample
  misc_feature (1)..(263): Xaa is any amino acid
MLYGDTDSLFVKTGLTDAALLADFEELCGGLAKELNLLISQTIRREYDLGSFIELRFEKAYRRFLIPPLRNFHSRDASLAEQRESRGRAKGYSGYLIHPAGDDKGLSVEVKGMEAVRSDSTPLARRLQLELLELVFSGCSEEEFREKVGKTLAELRSGVLENELVYRKRLYRYADTYTSSTPPQVKAARALGWKKQRGTVEYLWTVNGPEPLALPHGKPDYDHYADSQVFPLVRSIAAAARWDVDFFSTGKSRDTGQMELGFG

SEQ ID NO: 26871 - DNA, 1329 bp, Unknown
  Obtained from environmental sample
  misc_feature (1)..(1329): n is a, c, g, or t
ttggaactggagaaagaagcgactcaggagttgaaagaccttcttgataaagcaatcgaggaaaagcgctgggatgacgccgcgtcatacagccgttctctggcgtgtattgagccgcaatatcaggctgccgaatcaggttatactcttgcccttgcaaagaaaaaacttgaggataacgataatctcagcgcctttcttgccgccgtgcatacccatgaactgcgtcccctgtcgtttgaggacgcggcgctttttcttgagcgggcggtgcaggcaaggcagcgccgggcagccgcgtattttttcgctgtcgctgagaaagccggttccgccgccaaaatccccgcgcctttagccgaatatgcaaagggttctgacagcgtaaccgcgatgatcaacggcgtcgctacggtagtggtcgataggggcataaaaattgagcgcggcgtgggttactcggacaaggtcttgggttccgccttttttatcgacgcaaccggcctgttaataaccaattatcatgtaatcgcaagcgaagtagatcccaagtatgaagggtattcccgcatgtatatcaggatgggcgacagcgcaagcccgcgttttcctgcgcgggtaatcggctatgataaggcgctggacctcgcgctgattaaaacagagcataagagcgaattcgttttttccatagtggacagggtcgttccccaggtgggcgatacggtcattgcgatagggtctccggcaggtcttgaaaaaacagtcacatccggcattgtatcatcgcttagccgccgcttcctgcaaatcggggatgtgtatcagatagatgccgcagtcaaccccggcaattccggcggccccgtcctggatatatcgggccggctggtgggcattgtttttgctggcgcagatcagttccaggggcttaatttcgccattcctgcccagcggcttgccgccgcgctccctgccatgataaagggcggcaaagcacagcgtccctggcttggcataacccttagcgaaagctcgggcagcgcggaaataatctacaccgcgcccaatacccccgcatccatgcaccgcgtaacggaaggcagtaaagtaacaactcttaacggacggaaaataacggccccccagagtatgctgatccccgccatgcaggacgcgatcttccaatcccgccccggcgagcttgtcgccctggaaacacgggattccgacggcgtgacaaaaaagcacctggtgatgaccgtcccccgtcccgaacttccgcttgtgacgcggcaaaggggacagccggagctcgtgccgatctga

SEQ ID NO: 26872 - protein, 442 aa, Unknown
  Obtained from environmental sample
  DOMAIN (132)...(324): Trypsin
  misc_feature (1)..(442): Xaa is any amino acid
MELEKEATQELKDLLDKAIEEKRWDDAASYSRSLACIEPQYQAAESGYTLALAKKKLEDNDNLSAFLAAVHTHELRPLSFEDAALFLERAVQARQRRAAAYFFAVAEKAGSAAKIPAPLAEYAKGSDSVTAMINGVATVVVDRGIKIERGVGYSDKVLGSAFFIDATGLLITNYHVIASEVDPKYEGYSRMYIRMGDSASPRFPARVIGYDKALDLALIKTEHKSEFVFSIVDRVVPQVGDTVIAIGSPAGLEKTVTSGIVSSLSRRFLQIGDVYQIDAAVNPGNSGGPVLDISGRLVGIVFAGADQFQGLNFAIPAQRLAAALPAMIKGGKAQRPWLGITLSESSGSAEIIYTAPNTPASMHRVTEGSKVTTLNGRKITAPQSMLIPAMQDAIFQSRPGELVALETRDSDGVTKKHLVMTVPRPELPLVTRQRGQPELVPI

SEQ ID NO: 26873 - DNA, 342 bp, Unknown
  Obtained from environmental sample
  misc_feature (1)..(342): n is a, c, g, or t
ttgttggacatgaaactcacgggacgtaaagacgggcggcagtatatccttgaagccgcagatgtaatatatattgacagtattgataaacgcacgtttctgtatacatcaaatggcgtatatgaaagctcccttaaattatatgaactggaagcaaaacttgccgaccgtgattttatacgggcaaacaagaacagtctttttaacataaatcatatactgtcaattatgccggattttgatcgcaggcttatcttatcaatgacaggcgatattaaactaatagtatcgcgtcaatatgccgcggcggtaaaggaaaaattggaggcttattatgattga

SEQ ID NO: 26874 - protein, 113 aa, Unknown
  Obtained from environmental sample
  DOMAIN (12)...(109): LytTr DNA-binding domain
  misc_feature (1)..(113): Xaa is any amino acid
MLDMKLTGRKDGRQYILEAADVIYIDSIDKRTFLYTSNGVYESSLKLYELEAKLADRDFIRANKNSLFNINHILSIMPDFDRRLILSMTGDIKLIVSRQYAAAVKEKLEAYYD

SEQ ID NO: 26875 - DNA, 393 bp, Unknown
  Obtained from environmental sample
  misc_feature (1)..(393): n is a, c, g, or t
ttggtggggcacacctgtctggggctggaaaagctggatccgcacatccgggcatccggcttggcgccggagctggctttgcacctgcgccacctggtgctcagtcaccatggtctggcggaatacggcgccccgcgcgagccgttgacggcggaagcctttgccctgcaccacgccgacaatgcggacgccaagctcgtgcagttgcgtgcgctgttcgagagactgggcccggacgagtcggcctggtcgccataccaaaccacgctgaaacgggccgtgttccgggcgccgcgtacgccgggcgaggacagaggcgaccgggcggagcgcgccgggaatcggcggatggacgacaaaccgcttcgggaaacacagtgttcgttactttag

SEQ ID NO: 26876 - protein, 130 aa, Unknown
  Obtained from environmental sample
  misc_feature (1)..(130): Xaa is any amino acid
MVGHTCLGLEKLDPHIRASGLAPELALHLRHLVLSHHGLAEYGAPREPLTAEAFALHHADNADAKLVQLRALFERLGPDESAWSPYQTTLKRAVFRAPRTPGEDRGDRAERAGNRRMDDKPLRETQCSLL

SEQ ID NO: 26877 - DNA, 495 bp, Unknown
  Obtained from environmental sample
  misc_feature (1)..(495): n is a, c, g, or t
gtggggcggaaaaaagcggtggagctgctgaaggggcacatggccctgcacaccgacaaggtggccatcccgctgaaatggcgcttcgtggacgaagtgccagtcaacacgcagagcaaggtcatgccggcggaagtgggtgccatcatgctgtcggacgtggcggagcctgtggtcctgaaaaaaactgtgtcgggcgatgcggcggaactggagattgcctttttgcccgaaagcgcctacttcgacgggcacttccccaaacgcgccatactcccaggggtggtccaggtccacttcgccatccacttctccgacagaatctggaggatgggcgcggagttcagagagatcagaaagctcaggttcacaaaaatcatgggaccgtcgcagaaactcaggctgctgctgacgcgctctgggcagggagtgaccttcaaataccaggacagctcaggcgccgtctgctcaagggggactattgcctatgcatga

SEQ ID NO: 26878 - protein, 164 aa, Unknown
  Obtained from environmental sample
  misc_feature (1)..(164): Xaa is any amino acid
MGRKKAVELLKGHMALHTDKVAIPLKWRFVDEVPVNTQSKVMPAEVGAIMLSDVAEPVVLKKTVSGDAAELEIAFLPESAYFDGHFPKRAILPGVVQVHFAIHFSDRIWRMGAEFREIRKLRFTKIMGPSQKLRLLLTRSGQGVTFKYQDSSGAVCSRGTIAYA

SEQ ID NO: 26879 - DNA, 591 bp, Unknown
  Obtained from environmental sample
  misc_feature (1)..(591): n is a, c, g, or t
ttggtgcttgcctacccctttgctgtcttcttcgccatgggcaggggcttttccccgaaggcgctgtcaatcctgctgatactcgcggcgcttttgcagttcaacgcacagaaagtgaaagcgctgcgcaacgcattcgtgggctgcgccgcgctgttggtggctggtctgtggtatttcggcaacgaagtgtttctacagctataccccgtgctggtgagcctctccgtgctggccgtgtttgccttcagcctcaagtgcccgcccaccgtccctgagatgtttgccaggctccgccaccgcgacctgcccccccaggccgtcgcctactgccgaaaggtcgcgctgatgtggtgctgcttcttggccgtgaacgcggttgtcgccctctgcacagtattcctctctagggaggcgtggatgctctacaacggcctgatatcgtacctgctgatgggcattctcatggccggggaatatggctacagactccggcggatgaagagcctgcaatttgctggagacaaaggtctcgccgagagcgaagagggtctgtgccggcgggcggacggggaggagttaaaagcatga

SEQ ID NO: 26880 - protein, 196 aa, Unknown
  Obtained from environmental sample
  misc_feature (1)..(196): Xaa is any amino acid
MVLAYPFAVFFAMGRGFSPKALSILLILAALLQFNAQKVKALRNAFVGCAALLVAGLWYFGNEVFLQLYPVLVSLSVLAVFAFSLKCPPTVPEMFARLRHRDLPPQAVAYCRKVALMWCCFLAVNAVVALCTVFLSREAWMLYNGLISYLLMGILMAGEYGYRLRRMKSLQFAGDKGLAESEEGLCRRADGEELKA

SEQ ID NO: 26881 - DNA, 507 bp, Unknown
  Obtained from environmental sample
  misc_feature (1)..(507): n is a, c, g, or t
atgaaaaaagtaattatcagcagcgctatagtaatagttcttggactgcttatcgcactgggaccaaagttcatatttaaagtttgcgatacctacatgccaacaaccgaaagcgcgtcgtccgcaagtgcggatgcagacgcagattgctgcgctgaacctgcgcaaagcagttgctgcggcacttcattaaccgatctccctatttgtttttggacggcgcaagccgaaatgggcatgggattgttaatcaccgctttgggcgcttgtatgatagttttcaccgagcagaaaacacatcttggtttgcttatcggtatattcttttcaagtatcatcgctctggcaattcccaattttcttatcaccggttgtacctcgatggatatggattgccacagggttgctttccccgcgcttaccattgaaagcgccattttattggtattctcggcgataatgatcactcttattgncatgaagaaatcacctgaagccgctgtctga

SEQ ID NO: 26882 - protein, 168 aa, Unknown
  Obtained from environmental sample
  SIGNAL (1)...(19)
  misc_feature (1)..(168): Xaa is any amino acid
MKKVIISSAIVIVLGLLIALGPKFIFKVCDTYMPTTESASSASADADADCCAEPAQSSCCGTSLTDLPICFWTAQAEMGMGLLITALGACMIVFTEQKTHLGLLIGIFFSSIIALAIPNFLITGCTSMDMDCHRVAFPALTIESAILLVFSAIMITLIXMKKSPEAAV

SEQ ID NO: 26883 - DNA, 624 bp, Unknown
  Obtained from environmental sample
  misc_feature (1)..(624): n is a, c, g, or t
atggtctttgaaatacgcactcctgttgagagcggcactactcaggttttccgcaagattgaaggccacggcagtccgtccaacagaatcatctgggacggcaagagcgacaagggagagcttgttcagtccgcaatgtactatccatatacattcaccgcgaccgacgctcttggaaactccagttccacggaaggcaaaatcggcattgacgtgcttgtcatccgcgacggcgacaggctgagaatacaaatcccctcaatccaattcagaccgaatttcgcggacttccaaggtctgcccaaggacgttgttgacaacaacatgcgcataattaggcgcatcgcgcagatactcaaccaattccgcgattacaaggtacaagtggaaggccacgctaatcccactcagccggtaggtccagcgcgcgacagggaagaacctgaattaagacgcatcagcgaatcgagggcaagggcaattgtcgatttattggtacgcaacggcgtattgcgaagcagactgaccgccacaggcgccggctcctccaaaacaatcgccccctttgaagaccgcgacaactggtggaaaaaccgtagggtagagttttatttgataagataa

SEQ ID NO: 26884 - protein, 207 aa, Unknown
  Obtained from environmental sample
  DOMAIN (103)...(199): OmpA family
  misc_feature (1)..(207): Xaa is any amino acid
MVFEIRTPVESGTTQVFRKIEGHGSPSNRIIWDGKSDKGELVQSAMYYPYTFTATDALGNSSSTEGKIGIDVLVIRDGDRLRIQIPSIQFRPNFADFQGLPKDVVDNNMRIIRRIAQILNQFRDYKVQVEGHANPTQPVGPARDREEPELRRISESRARAIVDLLVRNGVLRSRLTATGAGSSKTIAPFEDRDNWWKNRRVEFYLIR

SEQ ID NO: 26885 - DNA, 429 bp, Unknown
  Obtained from environmental sample
  misc_feature (1)..(429): n is a, c, g, or t
atgaataaccccgcggatacatttaccgctctcggcatcgaatcatcattaacgcaaaaactaaaagaacgcgcaatcgaaaaacccaccgcggttcaaaaccttgtcatcccgcgcctgcttgccggaaaagacacggttttccgctcggcgacaggaaccggcaaaaccttcgcctatctgcttccggctcttcaacgaattgcatccgaaggcggcagtttgttaatatgcgcccccactctggaactttgttcccagataaaagcggaagttgactttttaacgccaagccttcccgcttcccgcaggaataccgctctgcttatcggttccgtcaaaatcgaaaaacaaattgaaaatttaagaagagccaaacccgtatcatcgtggaaatccgggcagactgctgtcctcgtgccgatctga

SEQ ID NO: 26886 - protein, 142 aa, Unknown
  Obtained from environmental sample
  DOMAIN (30)...(142): DEAD/DEAH box helicase
  misc_feature (1)..(142): Xaa is any amino acid
MNNPADTFTALGIESSLTQKLKERAIEKPTAVQNLVIPRLLAGKDTVFRSATGTGKTFAYLLPALQRIASEGGSLLICAPTLELCSQIKAEVDFLTPSLPASRRNTALLIGSVKIEKQIENLRRAKPVSSWKSGQTAVLVPI

SEQ ID NO: 26887 - DNA, 321 bp, Unknown
  Obtained from environmental sample
  misc_feature (1)..(321): n is a, c, g, or t
ttggggcatgttgcctttggagctatatgggagcaaattgttttatccaacatgaaaggtaatttcccaaatgcggaaattttttattacagaagttccagcggagcggaaatggattttgtagttaagatgaatgggaaaatttttgcagttgaatgtaaggcttctttcacaagcactttatccaaaggaaatttttctgcaatagaagatatttctcctgaacggacatttgtagtttcgccgtcagaggataattggtctattaagaaaggtattgatgctgtttctataagcgggttggtgaagggtttgatatga

SEQ ID NO: 26888 - protein, 106 aa, Unknown
  Obtained from environmental sample
  misc_feature (1)..(106): Xaa is any amino acid
MGHVAFGAIWEQIVLSNMKGNFPNAEIFYYRSSSGAEMDFVVKMNGKIFAVECKASFTSTLSKGNFSAIEDISPERTFVVSPSEDNWSIKKGIDAVSISGLVKGLI

SEQ ID NO: 26889 - DNA, 1218 bp, Unknown
  Obtained from environmental sample
  misc_feature (1)..(1218): n is a, c, g, or t
atgttagagagaacgctttcaaaaactgtgcaatccatttcaaagggctttcctgttattttgctcactggcccaaggcaggttggcaaaaccacattgcttaaaaatttaagcaatgcaaaaagaaaattcgttagtctagatgacttggaagagcgtaaacttgctcaaacagaccctgccggatttttgcagaaacataaaacgcctttgataatagatgaggttcaatatgcccctggcttatttccatacataaaaatgcacattgattcaaatgggaaaaacggcgaattttggttaacaggttcgcaaaaattccatttaatgcaggggttgcaggaatctcttgcagggcgcgtagcgattttagacttgctcggcttttccgcttatgagcttaacaacaaagctaaaatgcatattccttttttgccctcaaaaaaatggtttttgcaaaactcaaaaatacataagaaaaatcatagcgttcatagtatatacaaggctatatgggaaggttcttttccaaggttgcttgcaagcaaaaataaaaaccgcgaagttttttataggtcttatattcaaacttacattcaaagagatgtaaaagatttttatcaggttagtgataatctagctttttacaattttttgagagccattgccgcgagaactggaaatatattgaattatgcggatttggcaagagacataaataaagacgcaaaaaccgcacggatttggctttctattttggaacgctccggtttgataaaactgcttgaaccgtattacaggaatataaataaaagaatgataaaaagcccaaagatatattttttagacacagggcttgcaagttatttaaccggctgggattctcccaaaactcttgaagcgggggcaatggcaggggcaatgctggaaacttatgcttttattgaaattttgaaaagctattggcataacggcaaagatgtttccatatccttttacagagattcagaacataaggaaatagattttttaatagagagcaacggcaaactatatccaatagaggttaaaaaaactgccactcccggattgctggacattaaaaattttgcttctctgcaagaaacaagtatggaaataggtcacggcacagtgctttgcctccgcagtgatagcataccgattggcaaaaatgttacagcagtgcctatatattaa

SEQ ID NO: 26890 - protein, 405 aa, Unknown
  Obtained from environmental sample
  misc_feature (1)..(405): Xaa is any amino acid
MLERTLSKTVQSISKGFPVILLTGPRQVGKTTLLKNLSNAKRKFVSLDDLEERKLAQTDPAGFLQKHKTPLIIDEVQYAPGLFPYIKMHIDSNGKNGEFWLTGSQKFHLMQGLQESLAGRVAILDLLGFSAYELNNKAKMHIPFLPSKKWFLQNSKIHKKNHSVHSIYKAIWEGSFPRLLASKNKNREVFYRSYIQTYIQRDVKDFYQVSDNLAFYNFLRAIAARTGNILNYADLARDINKDAKTARIWLSILERSGLIKLLEPYYRNINKRMIKSPKIYFLDTGLASYLTGWDSPKTLEAGAMAGAMLETYAFIEILKSYWHNGKDVSISFYRDSEHKEIDFLIESNGKLYPIEVKKTATPGLLDIKNFASLQETSMEIGHGTVLCLRSDSIPIGKNVTAVPIY

SEQ ID NO: 26891 - DNA, 921 bp, Unknown
  Obtained from environmental sample
  misc_feature (1)..(921): n is a, c, g, or t
atgtcacgaaaaacagcacagctatttgatttgatgttcaagagcataataaaggatgcgagctcatctgcggttgtgcatttgataaatggcatttacaaaaagaactatccattagatacaatggtaactattgaaccaaacgaacttattaaagaacaccctaaatctggcaaaatggagaaaatagtctccgatataataatcactctgcatagcgaaaacaaaaaagacactttcttgttggaagcacagatagatgacgatttggagatgatacttaggattttcaattacggcactttgattgcattggataaaaaaactgtttcagatgacggatcttgtattagaatagagatgccctctcctgtggttatttacttggaaacgagcaatgcgaaagacattgtttctgttgagataaagtttccaaataaaaagagcgtagtttatgagatacctacgttcaaggtgttgcagcattctgttgccgagttggagaatatggcgttgcttctgccgttttacattttgaaaatccgcaaggagttggagagaaagggtattgattcagccgagcgaaagattttgtcaaagaggttggagggttatgttatagagataggcaaagtttttaaaaggttggtaaaaaataactatattacggctaaggatgcagctatgcttttgcataggttgttgaatatgaatttggaactctatggcaagtatgaggagtttgtggaggtagatatgacattgaagcagttggtagatacaggcatagacgaggctatggcgaaagtggcaaaaactgaaaaaagccgcaccgccaaagctatgaaagctgggggtgaggctgtggataagattatgcgttatactgggctttcacgccgcgagattatgactttgtag

SEQ ID NO: 26892 - protein, 306 aa, Unknown
  Obtained from environmental sample
  misc_feature (1)..(306): Xaa is any amino acid
MSRKTAQLFDLMFKSIIKDASSSAVVHLINGIYKKNYPLDTMVTIEPNELIKEHPKSGKMEKIVSDIIITLHSENKKDTFLLEAQIDDDLEMILRIFNYGTLIALDKKTVSDDGSCIRIEMPSPVVIYLETSNAKDIVSVEIKFPNKKSVVYEIPTFKVLQHSVAELENMALLLPFYILKIRKELERKGIDSAERKILSKRLEGYVIEIGKVFKRLVKNNYITAKDAAMLLHRLLNMNLELYGKYEEFVEVDMTLKQLVDTGIDEAMAKVAKTEKSRTAKAMKAGGEAVDKIMRYTGLSRREIMTL

SEQ ID NO: 26893 - DNA, 753 bp, Unknown
  Obtained from environmental sample
  misc_feature (1)..(753): n is a, c, g, or t
atgatgttcagctccaccatcgtggtacagggcaccgccaccgcngtaatcaccggcaccggcgccgagaccgaaatcggtcgcatccaagacttgatggaaagcgctaccgatgaggaaaccccgctgtccaagactatggatgctttcggtaaaaaggtcaccatgttcatcttgggcgtgtccgccgtaatggccattgccgcttacttcttgcacggcacccgcgctatggacctgttcagcgccgccgtaggtgtagccgtagccgcagtacctgaaggtttgaccgccgtagtagcaattgcattggctctgggtgttaaggccctggctcagcgcaactccatcagccgcaacctcacctccaccgagaccttgggcgccatcaccaccatctgctcggacaagaccggcaccctgacccaaaacgagatgaccgtaaccacggttcgcaccttcagccacgattaccaagtaaccggcaccggctacgctccccatggcgactttattgtggatggcgaaaccgttaccaccaacaatgagctgaccgctttggccgaaaccatggtggtatgtaacgacgccatcatcaacgaaaacaagaacaacgcattgtggaccttgaccggccagcccactgatggtgccgtgctttccatgggttacaagaccggcttcaccggcgaaaactgggaacgcattgccgaaatcccgtttattccgccaccaagtacatggccaccctag

SEQ ID NO: 26894 - protein, 250 aa, Unknown
  Obtained from environmental sample
  DOMAIN (1)...(126): E1-E2 ATPase
  misc_feature (1)..(250): Xaa is any amino acid
MMFSSTIVVQGTATAVITGTGAETEIGRIQDLMESATDEETPLSKTMDAFGKKVTMFILGVSAVMAIAAYFLHGTRAMDLFSAAVGVAVAAVPEGLTAVVAIALALGVKALAQRNSISRNLTSTETLGAITTICSDKTGTLTQNEMTVTTVRTFSHDYQVTGTGYAPHGDFIVDGETVTTNNELTALAETMVVCNDAIINENKNNALWTLTGQPTDGAVLSMGYKTGFTGENWERIAEIPFIPPPSTWPP

SEQ ID NO: 26895 - DNA, 453 bp, Unknown
  Obtained from environmental sample
  misc_feature (1)..(453): n is a, c, g, or t
gtggaggagggcatagtggccggcggcggcgtggcgctgatacgggccgcgacggcgttggacggtctgaagttggatggcgacgagaagatcggtgtggacatcatccgccgagcctgcgaggaaccgctgcgtatgatagtgaccaacgccggtctggaggcctccgtggtcgccaacgaggttaaagagaaaaagggcggctacggcttcaacgcctacacctgcaagtacgaagacctgattgaggccggcgtgatcgacccgacaaaggtgactcgcacggcgctggaaaacgccgcgtccatatccggccttgtgctgaccacggagtgtgtgatctgcgacattccggtggaaacctgctcggcgcatggcggcggtatgccggacatgggtgggatgggaggcatggggggaatgggcggtatgggcggtatgggaatgatgtag

SEQ ID NO: 26896 - protein, 150 aa, Unknown
  Obtained from environmental sample
  misc_feature (1)..(150): Xaa is any amino acid
MEEGIVAGGGVALIRAATALDGLKLDGDEKIGVDIIRRACEEPLRMIVTNAGLEASVVANEVKEKKGGYGFNAYTCKYEDLIEAGVIDPTKVTRTALENAASISGLVLTTECVICDIPVETCSAHGGGMPDMGGMGGMGGMGGMGGMGMM

SEQ ID NO: 26897 - DNA, 417 bp, Unknown
  Obtained from environmental sample
  misc_feature (1)..(417): n is a, c, g, or t
gtgtgtatgtcaagcgtaaaacataaaaagacagggcatataaagacgacgccggatgcaccgagggcgtctgaaccggctaaacaccatgagccgtcaaggcagagtgttgatgataatggctctacggcttgtggtatcaataccgccccgcccgaatcggagttcgtcgatgccgacggtaccgatgagattgaggcgcttcgtaatgaggttgaggcggggaaggacaggtatctgcgcctcatggccgagttcgacaattacaagcgccgctccggcaaggagtacgagcgccttgtctcggcggccaacgagaagttgatcttggagatggtggaggtgcgtgagaattttgagcgggcgttgaagtcgggcggagctggcggggagtcgcgccgttctacgagggaatga

SEQ ID NO: 26898 - protein, 138 aa, Unknown
  Obtained from environmental sample
  misc_feature (1)..(138): Xaa is any amino acid
MCMSSVKHKKTGHIKTTPDAPRASEPAKHHEPSRQSVDDNGSTACGINTAPPESEFVDADGTDEIEALRNEVEAGKDRYLRLMAEFDNYKRRSGKEYERLVSAANEKLILEMVEVRENFERALKSGGAGGESRRSTRE

SEQ ID NO: 26899 - DNA, 438 bp, Unknown
  Obtained from environmental sample
  misc_feature (1)..(438): n is a, c, g, or t
atgcaacttggcaatgaaaacactatagatgaccattctataaccaaaaatttccatttccatgactgtgcgatcagtttgcaaggcgagttaaatacattagctcgcagtttgaaggcaggcaaaaaagagacggacaatgatgtgaaagaattgctattggctgcaaaagaaatagaacaagtccagaatcttattccggaaaccggtgttgaaatttctgccgaaataaaaacttcggttaaaaaaaagggactactcaatcggctaaaagatatttgtaacgatttatacgatgaaaattccgcgttgcacaagaaggtatccaaaatcaaacgtggcatagaaactgcgcaggagatagccaaacaatataacaaaatagccgaatggtttggcttacctcaagtgccaaaaccacttttagggaatcactga

SEQ ID NO: 26900 - protein, 145 aa, Unknown
  Obtained from environmental sample
  misc_feature (1)..(145): Xaa is any amino acid
MQLGNENTIDDHSITKNFHFHDCAISLQGELNTLARSLKAGKKETDNDVKELLLAAKEIEQVQNLIPETGVEISAEIKTSVKKKGLLNRLKDICNDLYDENSALHKKVSKIKRGIETAQEIAKQYNKIAEWFGLPQVPKPLLGNH

SEQ ID NO: 26901 - DNA, 993 bp, Unknown
  Obtained from environmental sample
  misc_feature (1)..(993): n is a, c, g, or t
ttgctggaagcgcagcagctgatagccatgcgccgttatgccgcggctattgaatctcttgctatttttcagcctgtcgctgtagaaacagccgatgccgccatgctgcgcctggccgcccttaaggggcttgttaatggcggggcgtcatcttataccgtggaattccgccggagaatgtctgaggcgatgaaccgttattcacgggatacccgcgcgctgcgcctgctttttgattacgcgaattatgcttatgccaatgggcgggaacctaaccgcgatgacattaggattatggaactggccctggaacgtctgccattcctgcttcccgcagaccctgaattggcctggatagccgctccctttataaatgacatcgaaaaggcaaggaccttgcttgctgactatcgcgccggttcttcaaagccgaatcccgcgtctctggttcccgcgttgaatttgggcttgttggacgatatagacgcggttgatgaactttttgcgacgggtaatcccgccgcggattccgcgcaatctgccgctcagtttgttgttgacaaggatattctcgttaatgtatggaaattgcttcgcagcgaaggaggacggaatcacctcagcaggaagcttcaggttttttccggcgcgataactgaagatgaagatcatgacggctatgtggaaagccgttctgtttacaaacaggggatcattgaggaatatcattacgacgccgatcaggacaggcttgaagatgtgacaattatattcaacgcgggcaatccccaatgggcccgtatgccggcattaccggcggtcgtcttttgngaaagtatctttcagtgcagcgggcgatgctggaaaatggactctacctgcccgcgccgggcggcttccggttcgccccccttggatttatcgagatntgcgccggtgacagtacctcaggtcttttatatccgcagcggcagcctctccagcaggctataa

SEQ ID NO: 26902 - protein, 330 aa, Unknown
  Obtained from environmental sample
  misc_feature (1)..(330): Xaa is any amino acid
MLEAQQLIAMRRYAAAIESLAIFQPVAVETADAAMLRLAALKGLVNGGASSYTVEFRRRMSEAMNRYSRDTRALRLLFDYANYAYANGREPNRDDIRIMELALERLPFLLPADPELAWIAAPFINDIEKARTLLADYRAGSSKPNPASLVPALNLGLLDDIDAVDELFATGNPAADSAQSAAQFVVDKDILVNVWKLLRSEGGRNHLSRKLQVFSGAITEDEDHDGYVESRSVYKQGIIEEYHYDADQDRLEDVTIIFNAGNPQWARMPALPAVVFXESIFQCSGRCWKMDSTCPRRAASGSPPLDLSRXAPVTVPQVFYIRSGSLSSRL

SEQ ID NO: 26903 - DNA, 795 bp, Unknown
  Obtained from environmental sample
  misc_feature (1)..(795): n is a, c, g, or t
ttgtttgattatgtaaacgacaggccttatgtttcatcttcttttatgagcaccgccatatcccgcgtttacggaaccgccatgtccggccgctgtgaaaaaaaacaggctcttgccgacagcgctttggaccttcgcgcctcccttgtcatgctgccctgccgaggcgataccgccatgctggaaaaggttttcgcgcccctgggttataaagttgaatgggaaagcggccttttggacgacagttttcccgaatggggagacagctgttatgtgaatttaactgtcagcggaaaagtaaggctgcaggatctcctgcggcacatctatgtattgattcctgtttttgattaccgcaaacattactggataaacgataaagaggttgacaagctcctttcccacggctcgggctggctggaaaaccacccggaaaaaaattttatcacaaggcgttatttcgcgaggcttggccattttacaaggcaggcccttaagcgccttaatcgtattgataacggcgagggcggcgcggaaagtcccgtaacggaaggcgagcctgaagcagagccgtccgccgcgataaggacgccccgccttaacgatcagcgcatgctcgccgtattgggcgaattgaaagcatgcggcgcaagatcggtaatcgacatgggctgcggggaaggccattttttacggcttctgataaaggaaaagcaatttaccgccatagccggaaccgacgtatccgccgttgttttaaacatacagccgacaatcttaaacttgacaatatga

SEQ ID NO: 26904 - protein, 264 aa, Unknown
  Obtained from environmental sample
  misc_feature (1)..(264): Xaa is any amino acid
MFDYVNDRPYVSSSFMSTAISRVYGTAMSGRCEKKQALADSALDLRASLVMLPCRGDTAMLEKVFAPLGYKVEWESGLLDDSFPEWGDSCYVNLTVSGKVRLQDLLRHIYVLIPVFDYRKHYWINDKEVDKLLSHGSGWLENHPEKNFITRRYFARLGHFTRQALKRLNRIDNGEGGAESPVTEGEPEAEPSAAIRTPRLNDQRMLAVLGELKACGARSVIDMGCGEGHFLRLLIKEKQFTAIAGTDVSAVVLNIQPTILNLTI

SEQ ID NO: 26905 - DNA, 372 bp, Unknown
  Obtained from environmental sample
  misc_feature (1)..(372): n is a, c, g, or t
gtgggtaaggccattatctgcacagtaaagggcgacctgcacgatatcggaaaaaaccttgtcaaaatgatgatcgaagggaacggcatagaagttatcgatcttggggtggactgccctaaagaaaaagttgttcaggctgtgcgggaatcggacgcgaaggttttatgtttgtccgcgcttcttacaacgaccatgactgcccagaaagacgtgattgacgcgcttgaagaagcgggtcttcgcgcaaaggttaaagtaatgataggcggcgcgcctgttacgcagggttatgcgtccgaaatcggcgcggatgcgtactgtcccgatgccgcgacagcggcggaggtttgccgctctttttatgactga

SEQ ID NO: 26906 - protein, 123 aa, Unknown
  Obtained from environmental sample
  DOMAIN (2)...(120): B12 binding domain
  misc_feature (1)..(123): Xaa is any amino acid
MGKAIICTVKGDLHDIGKNLVKMMIEGNGIEVIDLGVDCPKEKVVQAVRESDAKVLCLSALLTTTMTAQKDVIDALEEAGLRAKVKVMIGGAPVTQGYASEIGADAYCPDAATAAEVCRSFYD

SEQ ID NO: 26907 - DNA, 537 bp, Unknown
  Obtained from environmental sample
  misc_feature (1)..(537): n is a, c, g, or t
gtggaaatacgcatagaaaacagttccgttatctgcaattcctgcgaaggagaaaccgttttacttgcctgcaaaaacgcgggtttctttatttccgctccgtgcggaggggaaaaaagatgcggaaaatgcaaggtaaaactccttgaagggcgggtaacgggggatacgccggatgaaaacggcaaagtccgcgcctgctgcgctgtccctattactgatataacgattgcctgcgatagagaattatttccttcaggcggtgaaattcaggcttgtggtcaaaatacttcgtttaatttttcgggaactcttctgcgcgccgcagctgctattgatataggaactacaaccgtttccgcgcagcttgtcaatcttgatacggcgcaggttgttgatacaatttcccaattaaacgatcagcgtgttttcggcgcggatgtaatgagccgaatcggcgcggcaaaaagcggcaaaacccggagaactctttaccctgataaaccgccagacagaacggataataaagtcctttaa

SEQ ID NO: 26908 - protein, 178 aa, Unknown
  Obtained from environmental sample
  DOMAIN (3)...(74): 2Fe-2S iron-sulfur cluster binding domain
  misc_feature (1)..(178): Xaa is any amino acid
MEIRIENSSVICNSCEGETVLLACKNAGFFISAPCGGEKRCGKCKVKLLEGRVTGDTPDENGKVRACCAVPITDITIACDRELFPSGGEIQACGQNTSFNFSGTLLRAAAAIDIGTTTVSAQLVNLDTAQVVDTISQLNDQRVFGADVMSRIGAAKSGKTRRTLYPDKPPDRTDNKVL

SEQ ID NO: 26909 - DNA, 1530 bp, Unknown
  Obtained from environmental sample
  misc_feature (1)..(1530): n is a, c, g, or t
gtgctttttccgcagactgtcgttcccatttttattacatacaaaccgggcattgccgctttggacgaagcgttaaaaagggacaaccgtctttttgcggcgtgcttaaaaaagaacgaacttcgcctttcctccgacgaaccttacgcaatcggcactgtggtaagaattatatcgcacttaaaacttcccgataacactttccgtgttgtatttcaatgcgaatatcggggaacaattctttctattaatcaacatcaaacttattcgatggtaagagtcgagccgctgagaactatcggattaagcgaacctttaagctccgaggatttgggtttaatgcgcagtgttcaaaaatcattttcccaatatgccgagtattcgggaagaataggaccggacactcttaccgccgtggaaaaatcggaagacccggaacgattggcgaaccttgtatgcaacgccgtgtatattaaatcggagaaaaaaatcgaactgctggggtgcggcgatacaagggaaagatttctttcgatacttgaaatgctggaaaaagaaaatgaaatttacggtattcaaaaaaatatttcgggcaaggtcagaaggcggatggacaagcgccaccgcgaatatattcttaacgaacagttacgtgaaattaacaaagagcttggcaaggataaaatagaagacgagttcgccattcttgaaaaaagaattacggaaaaaaatcctcctgtgnaagttaaggaaaaagctgagaaagagataaaaaggcttagaaaactccagcccctttcccctgaagccgcggttttacggggctaccttgagtggatagccgaccttccatggagtaatttcacgacggattccgttaaccttgcggaagcggagaaaatccttgatgaagatcattttggcatgaagaaagcaaaggaccgaataattgaatttatagccgtgcgacagttacaggttgacgaagcgctaaaaaacgaaatgttaaaagatgacgttattaaagatgatacccttaaagatgaagcaattaaaaaagaagaccctaaaaataacgcgaaaacatcagttccccaatcggtaaaagggccaatcctctgttttgtaggaccgccgggaacgggaaaaacaagcctgggaaaatccgtcgcgcgcgccctgggaaggaattttgtgcgtatttcattgggcggcgtgcgcgatgaggcggaaatcagggggcaccgtaaaacttacgtgggagcccttcccggtaaaataattcaatccatgtgcaaggcgggaacgaccaatcccgtgtttttgttagatgaaattgacaagctttcaagcgattttcgcggagaccccgcctccgcccttcttgaagtgcttgaccctgaacagaactcaacttttaccgaccactatcttgaagttcaatacgatctttccaaagtgatgtttttaactacggcaaactcacttcactcaattccgtatcccctgcttgaccgcatggaaatatga

SEQ ID NO: 26910 - protein, 509 aa, Unknown
  Obtained from environmental sample
  DOMAIN (372)...(509): ATPase family associated with various cellular activities (AAA)
  misc_feature (1)..(509): Xaa is any amino acid
MLFPQTVVPIFITYKPGIAALDEALKRDNRLFAACLKKNELRLSSDEPYAIGTVVRIISHLKLPDNTFRVVFQCEYRGTILSINQHQTYSMVRVEPLRTIGLSEPLSSEDLGLMRSVQKSFSQYAEYSGRIGPDTLTAVEKSEDPERLANLVCNAVYIKSEKKIELLGCGDTRERFLSILEMLEKENEIYGIQKNISGKVRRRMDKRHREYILNEQLREINKELGKDKIEDEFAILEKRITEKNPPVXVKEKAEKEIKRLRKLQPLSPEAAVLRGYLEWIADLPWSNFTTDSVNLAEAEKILDEDHFGMKKAKDRIIEFIAVRQLQVDEALKNEMLKDDVIKDDTLKDEAIKKEDPKNNAKTSVPQSVKGPILCFVGPPGTGKTSLGKSVARALGRNFVRISLGGVRDEAEIRGHRKTYVGALPGKIIQSMCKAGTTNPVFLLDEIDKLSSDFRGDPASALLEVLDPEQNSTFTDHYLEVQYDLSKVMFLTTANSLHSIPYPLLDRMEI

SEQ ID NO: 26911 - DNA, 480 bp, Unknown
  Obtained from environmental sample
  misc_feature (1)..(480): n is a, c, g, or t
atggacgaacgtccggggtgggatgaatatttcatgagactggccgccttggccgccacccgttcgacctgtctgcggcggcaggtgggggctctcttggtggccgaccgccgggtcctggccacgggttacaacgggccgccccgggggctgccccattgccaagaggcgggctgcctgagggagagcttgaatatcccctccggccagcgccacgaaatgtgccggggcatccacgccgaacagaacaccattctccaggccgcccagcacggcgtgccggttcgccgggccaccttgtactgcacacatcagccttgcgccatctgcgccaagctgattttgaaccttgacgtccgccgtctggtcctccatggcgactaccctgatgaactggccttgaagctcttgcgggaagccggtttcggcctggaggagaacgggcttttcaccgtctggtccaaggcggacgctgattag

SEQ ID NO: 26912 - protein, 159 aa, Unknown
  Obtained from environmental sample
  DOMAIN (5)...(126): Cytidine and deoxycytidylate deaminase zinc-binding region
  misc_feature (1)..(159): Xaa is any amino acid
MDERPGWDEYFMRLAALAATRSTCLRRQVGALLVADRRVLATGYNGPPRGLPHCQEAGCLRESLNIPSGQRHEMCRGIHAEQNTILQAAQHGVPVRRATLYCTHQPCAICAKLILNLDVRRLVLHGDYPDELALKLLREAGFGLEENGLFTVWSKADAD

SEQ ID NO: 26913 - DNA, 606 bp, Unknown
  Obtained from environmental sample
  misc_feature (1)..(606): n is a, c, g, or t
gtgaggcccgccgacatagtcaccagcaccacccataagaccctgcgggggccccggagcggcctgattctttccaagcgcgccctggcccggcaaatcgacgcccaggtcttccccggccttcagggcggccccctcatgcacatcatcgcggccaaggcggtggccttcggcgaagccttgaccgatgaattcaaggcttaccagcggcaagtcctggccaatgcccggcgcctggccgaaggcttgcgggcctccggcttcaggctggtttccggcggcaccgacacccacctgatcctcctggatctccggccaaagaacatcaccgggctggaggccgaaaagaccttggaaaaggccggcttggccgccaataaaaacgccatcccctttgacccggagccgtcttacgtgacctccggcctccggctgggcaccgcggccctgaccaccagggggtttaaggagccggaaatggaccgggtggcggaattcatcggggaggccctgaaccgggtcggcgatgaagccgccttgggcgggctgcgcggccgggtggaagccctggcccgcggcttccccctctatacgggttttgaatga

SEQ ID NO: 26914 - protein, 201 aa, Unknown
  Obtained from environmental sample
  DOMAIN (1)...(167): Serine hydroxymethyltransferase
  misc_feature (1)..(201): Xaa is any amino acid
MRPADIVTSTTHKTLRGPRSGLILSKRALARQIDAQVFPGLQGGPLMHIIAAKAVAFGEALTDEFKAYQRQVLANARRLAEGLRASGFRLVSGGTDTHLILLDLRPKNITGLEAEKTLEKAGLAANKNAIPFDPEPSYVTSGLRLGTAALTTRGFKEPEMDRVAEFIGEALNRVGDEAALGGLRGRVEALARGFPLYTGFE

SEQ ID NO: 26915 - DNA, 636 bp, Unknown
  Obtained from environmental sample
  misc_feature (1)..(636): n is a, c, g, or t
ttgaaggccctctccacccgcaacagcgagccggagcgggccagccggccctttgaccaggaccgcgacggcttcgtcatcggcgagggggccggttttttgcttttggaggaatgggaccacgccgtggcccggggggcccgcatctacgccgaggtggccggtttcggcgcttcggccgacgcctttcacatgaccgcgccccccgatgacggagagggcgcggtcctggccatgcgggccgccttggatgacgcggccgccttggacctgggcccggccgacataggctacatcaacgcccacggcacttccaccggcttgaacgatttgatcgagacccgggccatcaagacggtttttggcccgcgggcccgggacctggccataagttccaccaagtccatgaccggccatctcctgggcggggccgggggggtggaggccgtaatctgcgccttggccttgaagcacggcctcatgccccccaccataaatctcgaccggcccgacccggaatgcgacctggattatataccaaaccgcgcccggccggcccggctcctggccgccttgagcaattccttcggtttcggcggcaccaacggctgcctgatcatgaaggccgccggctga

SEQ ID NO: 26916 - protein, 211 aa, Unknown
  Obtained from environmental sample
  DOMAIN (50)...(210): Beta-ketoacyl synthase, C-terminal domain
  misc_feature (1)..(211): Xaa is any amino acid
MKALSTRNSEPERASRPFDQDRDGFVIGEGAGFLLLEEWDHAVARGARIYAEVAGFGASADAFHMTAPPDDGEGAVLAMRAALDDAAALDLGPADIGYINAHGTSTGLNDLIETRAIKTVFGPRARDLAISSTKSMTGHLLGGAGGVEAVICALALKHGLMPPTINLDRPDPECDLDYIPNRARPARLLAALSNSFGFGGTNGCLIMKAAG

SEQ ID NO: 26917 - DNA, 642 bp, Unknown
  Obtained from environmental sample
  misc_feature (1)..(642): n is a, c, g, or t
atgcagcccggcggccaccaagcgggcgatatgggccatatccaccatgaggacggccccggccgcctcggccgcgcccttgaacttgccaaagtccaggctcctgggataagccgaagccccggccacgatgacggccggcttatgccgcgcggccaaggccagcacctcgtcgtagtccaccagctcgtcgtccgcccggaccccgtaaggcaggacgttgaagaggcggccggagaaattgaccggcgcgccgtgggtcaggtggccgccgtgggccagactcatggccaagatggtatccccgggcttcatcaccgccaggtaggcggccatgttggccgcggagccgcaatgcggctggacattggcgtgctcggccccgaagagccgccgggcccggctcgcggccaggtcttccgcctggtcggcgaactcgcagccgccgtagtagcgggcgccgggataaccttcggcgtatttattggtcaagaccgagccggcggcggccagtacggccggcgagacgaagttttcagaggcgatgagctcgagccccaggcgctggcggcccaattcattcctgatgatggcggcgacctgggggtcgctccgctccaattcttttatcattatttttaa

SEQ ID NO: 26918 - protein, 213 aa, Unknown
  Obtained from environmental sample
  misc_feature (1)..(213): Xaa is any amino acid
MQPGGHQAGDMGHIHHEDGPGRLGRALELAKVQAPGISRSPGHDDGRLMPRGQGQHLVVVHQLVVRPDPVRQDVEEAAGEIDRRAVGQVAAVGQTHGQDGIPGLHHRQVGGHVGRGAAMRLDIGVLGPEEPPGPARGQVFRLVGELAAAVVAGAGITFGVFIGQDRAGGGQYGRRDEVFRGDELEPQALAAQFIPDDGGDLGVAPLQFFYHYF

SEQ ID NO: 26919 - DNA, 750 bp, Unknown
  Obtained from environmental sample
  misc_feature (1)..(750): n is a, c, g, or t
gtgaaacatggctttgttattcccgtgtacaggcatggcgaaaccgtggggccgctggcggaaaagctgtccgccacgggcctgcctgttatccttgtggacgacggaaacgacgagcggaccaaagaaatcctagccgaatgccagaagaaaatcccttcaattgttcttgtcagtcttaaaaaaaatattggcaagggcggagctgttaccaaaggctttcaaaaagctgccgagcttggcctgacccatgtactgcaaattgacgccgacgaccaacacgatacggctatgaccggcttttttttggacgagtccgccaaaaatccggacaaggttatctgcggctttcctgtatttgatgaaaaagccccaaaaaacagggttgtcgggcgcagggtttcaaatttttgggctgcagtagttacgctttcaagagatcttaaagacgtgctttgcggcttcagggtttacccgcttgatgctgcattgaaattatgcagtaatccctttatggacaggcgcatgggctttgacgcggaaatcctggtgcgcctttactggaaaaatgtagttcctgttttttatcctataaaggtcagttacccctctggcggcgtttccaatttccgcgtcttccaggataaccttcgcataagctggatgtttaccaggctttgtgcagggatgcttttgcgcttccccatgttattaattttgcgcgttaaacgcaacgcagggcggctatga

SEQ ID NO: 26920 - protein, 249 aa, Unknown
  Obtained from environmental sample
  DOMAIN (4)...(167): Glycosyl transferase family 2
  misc_feature (1)..(249): Xaa is any amino acid
MKHGFVIPVYRHGETVGPLAEKLSATGLPVILVDDGNDERTKEILAECQKKIPSIVLVSLKKNIGKGGAVTKGFQKAAELGLTHVLQIDADDQHDTAMTGFFLDESAKNPDKVICGFPVFDEKAPKNRVVGRRVSNFWAAVVTLSRDLKDVLCGFRVYPLDAALKLCSNPFMDRRMGFDAEILVRLYWKNVVPVFYPIKVSYPSGGVSNFRVFQDNLRISWMFTRLCAGMLLRFPMLLILRVKRNAGRL

SEQ ID NO: 26921 - DNA, 483 bp, Unknown
  Obtained from environmental sample
  misc_feature (1)..(483): n is a, c, g, or t
ttgaaaacctggttatcccaaagagatggcgctttcctgagactctgcctgttgatgcgcagggcaaaaaaaagaaggaagatattgagctgctcttctcataaagaagaagattccccgcatggttttgcgagtcttgaaggcgtaaaggtaattgagcaaaaggaaaatgccgttgaaattggtttttttgtaccggaaacaagcccttattttgacggccattttcccgaattcagcctgctccctgccgttgcccagacagaactggttatccgtttcgcttcggaatattttggaaccggcattgacgcggcggaaatgaaacgtattaaatttacgaagtttatccgccccaatgttacgcttcttatgcggcttgaaaaaagcgaaaaatccgtagagtttaaaatattctcgcccgctgaagaatgcgtgtattcatacggaacaatttcctttgaccgggaaagcgaaaagtga

SEQ ID NO: 26922 - protein, 160 aa, Unknown
  Obtained from environmental sample
  misc_feature (1)..(160): Xaa is any amino acid
MKTWLSQRDGAFLRLCLLMRRAKKRRKILSCSSHKEEDSPHGFASLEGVKVIEQKENAVEIGFFVPETSPYFDGHFPEFSLLPAVAQTELVIRFASEYFGTGIDAAEMKRIKFTKFIRPNVTLLMRLEKSEKSVEFKIFSPAEECVYSYGTISFDRESEK

SEQ ID NO: 26923 - DNA, 375 bp, Unknown
  Obtained from environmental sample
  misc_feature (1)..(375): n is a, c, g, or t
ttggtaaagatgctgccaaacgggcattttatattgatgggccgtcttgatactgtagtcaagatcgagggaaagcgaatttcgctgccggagattgagggccgtataatggaatccggctttgcttccgatgtttgcgtaatccnccttgaggacaagcgccagtaccttgccgcagcgatagtttttaacgaaaagggcagggaaaaattcgcgggcctggaaaagcatcaggtaaattctttctggcacgaataccttttgcgcttttttgaaaacctggttatcccaaagagatggcgctttcctgagactctgcctgttgatgcgcagggcaaaaaaaagaaggaagatattgagctgctcttctcataa

SEQ ID NO: 26924 - protein, 124 aa, Unknown
  Obtained from environmental sample
  misc_feature (1)..(124): Xaa is any amino acid
MVKMLPNGHFILMGRLDTVVKIEGKRISLPEIEGRIMESGFASDVCVIXLEDKRQYLAAAIVFNEKGREKFAGLEKHQVNSFWHEYLLRFFENLVIPKRWRFPETLPVDAQGKKKKEDIELLFS

SEQ ID NO: 26925 - DNA, 726 bp, Unknown
  Obtained from environmental sample
  misc_feature (1)..(726): n is a, c, g, or t
atggatgaaaccttaaaagataaacttaagctgttgcgtcagcgtcttccgactatgggcttaaaacaaggtgtggcgcttctcgaaaaaacaaacggcgatattgacgcagcggaaaatctgtttaaggcaaaaatgcaggaaattgtcatagcaaaaacaggtgttgaagcggatatggcagcaagccatttacaaaaaaataattttgatatagcgctggcattaagaagcattgacgaagaacgttatactttgactgaaagaattctaaaaagatataaagacgacaaaaaagaggcattgagaagattagccgacgctgtttctgataataataatataaaaagagaattttggctggattttgatgatttggctaaacagccgcctgaaatattttgcgtcctggctgttgttgaatggctgaactatgaaagctgggaagatttgagtagcgcgctttattttaattttgatctcgttgttgaaaaaatagagaaagaactttcttttgccgaaattgcggaaacattaaagaaagcaaaacaaatttatgaagcacaatatgaggcacagataacaaaactcaaaaaagaagggtggatgggtcctacgcctgaatttttagaacaatgggatttatttgaaaagcaacgaccaatgcttattgacaaattgtacgaatttgttcaaaaaaatatagatagttttaattttccatga

SEQ ID NO: 26926 - protein, 241 aa, Unknown
  Obtained from environmental sample
  misc_feature (1)..(241): Xaa is any amino acid
MDETLKDKLKLLRQRLPTMGLKQGVALLEKTNGDIDAAENLFKAKMQEIVIAKTGVEADMAASHLQKNNFDIALALRSIDEERYTLTERILKRYKDDKKEALRRLADAVSDNNNIKREFWLDFDDLAKQPPEIFCVLAVVEWLNYESWEDLSSALYFNFDLVVEKIEKELSFAEIAETLKKAKQIYEAQYEAQITKLKKEGWMGPTPEFLEQWDLFEKQRPMLIDKLYEFVQKNIDSFNFP

SEQ ID NO: 26927 - DNA, 543 bp, Unknown
  Obtained from environmental sample
  misc_feature (1)..(543): n is a, c, g, or t
atggacaaagattttaacctcgacaaatacatcaggaaagttcctgacttcccaaaaaaggggatactgttttatgatataacaagtatcctgtgccagccggaagcttttcagttttgcatagaagctatggtagatatatacaaagacaagaagatcgaggcggtggccgcaattgaggcgcgcggctttcttttcgctgctcctttcgcggtacgcatgggtattccccttattccaatccgcaaaaaaggcaagctccccggaacaaccctgtcaaaaaaatacgaacttgaatacgcccaggccgaaatagaagttcacaaagaagacgttccggcaggcaagcgtatacttttaacggacgacctaattgccactggaggaacgctgaacgccgcaagggcgcttctcaacgaaggcgggggccgaggttccggagatcttcggcgtagtgtccctcccattctttggtatgaaaaaatgcttagtcctacgcctgtaacaaccctcattccatatcaccgccgaatgaccctatga

SEQ ID NO: 26928 - protein, 180 aa, Unknown
  Obtained from environmental sample
  DOMAIN (26)...(154): Phosphoribosyl transferase domain
  misc_feature (1)..(180): Xaa is any amino acid
MDKDFNLDKYIRKVPDFPKKGILFYDITSILCQPEAFQFCIEAMVDIYKDKKIEAVAAIEARGFLFAAPFAVRMGIPLIPIRKKGKLPGTTLSKKYELEYAQAEIEVHKEDVPAGKRILLTDDLIATGGTLNAARALLNEGGGRGSGDLRRSVPPILWYEKMLSPTPVTTLIPYHRRMTL

SEQ ID NO: 26929 - DNA, 621 bp, Unknown
  Obtained from environmental sample
  misc_feature (1)..(621): n is a, c, g, or t
atgattacgctcaacatgctcggcaagccgtgtccaattccggtggtcgaggcgaaaaaggctctgtcgcaagggcaggacgttatggtgctggttgacaacgccattgccgtacagaacctggaaaaaatggcgaccggcctggggcatggtttttcctatgagcaaaaaagtgaaacggagtataccgtggcaatcattgtaaaaagctccgcagctgatccggcttcgtgtcaggtgatggcgcctgcggcggcgccagaggcgatgcctttggagtcaggtggaggtcaaattttccttattaccggcgatcaaataggcataagcgccgaggagccgggaaaaaaattaatgcaaacttttttgtactcattggcgcagcttcctaaagcgccggaaattatactgctgataaacgccggagtcaaactcgccgcccaggggtctgaagttctggataatttgaaggcccttgccgaacatggcgcggatatacgctcatgcggacagtgcctgacttattacgggcttactgaaaaactggctgtggggaagatcaccaacatgatggagattgtggaatttttgacttcgtcaaggcgaacggtaacaatttaa

SEQ ID NO: 26930 - protein, 206 aa, Unknown
  Obtained from environmental sample
  DOMAIN (1)...(66): SirA-like protein
  misc_feature (1)..(206): Xaa is any amino acid
MITLNMLGKPCPIPVVEAKKALSQGQDVMVLVDNAIAVQNLEKMATGLGHGFSYEQKSETEYTVAIIVKSSAADPASCQVMAPAAAPEAMPLESGGGQIFLITGDQIGISAEEPGKKLMQTFLYSLAQLPKAPEIILLINAGVKLAAQGSEVLDNLKALAEHGADIRSCGQCLTYYGLTEKLAVGKITNMMEIVEFLTSSRRTVTI

SEQ ID NO: 26931 - DNA, 423 bp, Unknown
  Obtained from environmental sample
  misc_feature (1)..(423): n is a, c, g, or t
ttgaaccgttatgccgcggaaaaaatgcttaagtttaatatcagcgcctgtaccgatgtgacaggtttcggactgctctgccatttactggaaatgtgcggcaattcagtctcagcggagatttggcctgaggctctgccgattatcaatgaagccgcggattacgcggatgattttcttctcacggccgcggcccagcgcaaccgtaaccattttagcagacagggacaggtggaaaagctgcccttcgccctgcaggagttgatgtttgatcctcaaacctcgggcgggctgttgatctgcgttgataccgaacagtcccggcaactgcttggctcaatacaaaaagacgaccccaatgcgcggataatcgggcgtataattaagccctatggtcgtgataacatagttatttggaggtaa

SEQ ID NO: 26932 - protein, 140 aa, Unknown
  Obtained from environmental sample
  misc_feature (1)..(140): Xaa is any amino acid
MNRYAAEKMLKFNISACTDVTGFGLLCHLLEMCGNSVSAEIWPEALPIINEAADYADDFLLTAAAQRNRNHFSRQGQVEKLPFALQELMFDPQTSGGLLICVDTEQSRQLLGSIQKDDPNARIIGRIIKPYGRDNIVIWR

SEQ ID NO: 26933 - DNA, 318 bp, Unknown
  Obtained from environmental sample
  misc_feature (1)..(318): n is a, c, g, or t
gtgatagtcgccggtgccggcggagccgctcacctgccggggatgaccgcctccaaaacgtcgttgccggttatcggcgttcccgtccaatcaaaagcgctcaatggtatggattccctcctgtcaatcgttcaaatgcccgccggcgtcccggtggccgccatgtccataggccgcgccggagcggtaaacgcgggtctcatggcggcggcgatattggggaataagtatccgaaaataaaagaggcgctggacggatatagaaagagccagacggagaaggtgctggataatcctgatcccaggagcgtcggttga

SEQ ID NO: 26934 - protein, 105 aa, Unknown
  Obtained from environmental sample
  DOMAIN (1)...(102): AIR carboxylase
  misc_feature (1)..(105): Xaa is any amino acid
MIVAGAGGAAHLPGMTASKTSLPVIGVPVQSKALNGMDSLLSIVQMPAGVPVAAMSIGRAGAVNAGLMAAAILGNKYPKIKEALDGYRKSQTEKVLDNPDPRSVG

SEQ ID NO: 26935 - DNA, 1089 bp, Unknown
  Obtained from environmental sample
  misc_feature (1)..(1089): n is a, c, g, or t
ttgacgactacaataggtatcttaggcgccggacagcttgcccggatgctcgctctttccggaattcctctcggcctgcgctttgtcacgctggaccccgctaccgacgcctgcgcctcggttgtgtccgcgcatattgtcggggattatgacgacagggataagctttcgcggttcgccgggatggttgatgccgtcacctacgagttcgagaacgttccggcggaaagcgttagttacttgtccgaaaggctgcccgtctacccgtctcccgaagcgctcgcgttatcgcgtgacagattcacggagaagagtctctttgtcgagctcggcatcccaacgccgaaatttctcgcagtggatactcttgacggattgaaatcggcggtatgtgagatcgggctgccggcggtgctcaagacgcgcacgcttgggtacgacgggaagggccagtcggtcataaaatccggcgaagatatagaagcggcgtggacgagggcggacggcgctccgtgcgttctggaggcgttcgtcccctttacaagggaaataagcgtcgtggccgtcagaggtcgcggcggtgaaaaatctttctatccgatctgcgagaacacgcattccggcggtattctccgtcatactatttgccgtttgaacgaccctatgcagtctgtcgcggaggggctggcgagccgtttgctggaacgctttgactacgtgggcgttttggctttggaactctttgacgcgggcggcaaactgacggcgaacgagatggcgccgcgcgtccacaacaccgggcattggtcgatagacggggcgcggacgagtcagtttgaaaaccacgtccgcgccgtggccggcttgccgctcggcgggacggaggctgtttgccgcaacgccatggtcaattttataggcgcgatgccggaggcggcggaggtgttgaaggtgaacggggcgcgtctgcacgactacgggaaggcggcgagaccggggaggaagctgggtcacgccacggtctgcggggcgggagaggaagcggtgacggcggggctgaacaggttgctgggtttggcaggaaaatga

SEQ ID NO: 26936 - protein, 362 aa, Unknown
  Obtained from environmental sample
  DOMAIN (99)...(274): ATP-grasp domain
  misc_feature (1)..(362): Xaa is any amino acid
MTTTIGILGAGQLARMLALSGIPLGLRFVTLDPATDACASVVSAHIVGDYDDRDKLSRFAGMVDAVTYEFENVPAESVSYLSERLPVYPSPEALALSRDRFTEKSLFVELGIPTPKFLAVDTLDGLKSAVCEIGLPAVLKTRTLGYDGKGQSVIKSGEDIEAAWTRADGAPCVLEAFVPFTREISVVAVRGRGGEKSFYPICENTHSGGILRHTICRLNDPMQSVAEGLASRLLERFDYVGVLALELFDAGGKLTANEMAPRVHNTGHWSIDGARTSQFENHVRAVAGLPLGGTEAVCRNAMVNFIGAMPEAAEVLKVNGARLHDYGKAARPGRKLGHATVCGAGEEAVTAGLNRLLGLAGK

SEQ ID NO: 26937 - DNA, 1467 bp, Unknown
  Obtained from environmental sample
  misc_feature (1)..(1467): n is a, c, g, or t
gtgcatctgcccgacgatctctccgggcttgacgcgtacaaggcgcggctcaggtacgaggagctgtacaagatcgcgctggatttgcggtggagcaggcggaaattcgcgttgccgggttattccatgtcgccgggggatctggcggacaggttacgcgccgcgctgccgtttaaattgacggagtctcaggaggcggcggtgcgtgtgctgttcgccgacgcggcgcgtcctacgcggatgcatcggctgttgcagggcgacgtggggtcgggcaagacggtgacggcgctcttcgcggcgctgccggcgctcaacagcgggcggcaggtggcctggatggcgcccacggagattctggccaagcagaccaagtccgcggttgaagggtaccttgccgatctggggattcgggtagagtacataggcgcgggcgacgcgccggagaagcggcgggcgctcggcggactggcctcgggggcgctgcgcttcgcggtgggcacccacgccctcttcatgccctccgtgaagtttagcaatttaggaatggtgataatagacgagcagcataagttcggcgcggctcagcggcttaagctgcaggagaaggggccggcgagcgattttctgctgatgtcggcgacgcccataccgcagaccttggctaagacgctctacggcgacctcgacgcggtggagatcgggtcgaggccgggccgggcgccggtgtcgacgcgcatagtgccggaggggcggcgcgccgacatggagggtttcattcttgagcggatatgcgccggggcgcgggtgttttacgtagtgcctcggatagagcagcagcggtcggatgatttggaggatgcggaaggcggcgggtcgggcggcggtaagcgcgggcgtccggcgtccgacgggggcggtcaggcggacggtctgccggtgaagacggtcgagggcgtggcggaggcgctgaagaaggggccgttggcggcagtacctatatatattgtacatggccgtatgccggcggacgagcgcgacgaggctatacgcgcctttagggagggtccgccgggcgtattggtgtcgactacgatcgtggaggtcggcgtcgacgtgccggacgcggcggtgatggtcatagagaacccggagctcttcgggctggcgcagctgcaccagataagggggcgggtgggcaggggggaggcggcctcgtactgctttctgctgccgggcgcggaggcctgccgggacgagcggacgatggggcggctgaaattcctgtgcggctgctcggacggctttgagatagccgagtgggacctgcgcaaccgcggcccgggggacgcggcggggtacaggcagtccggctgggacgacctggcggccgccgacattctggaggacgcggagacgtttttgtgcatattatcggagatggatatccttttcgcgaagggttag

SEQ ID NO: 26938 - protein, 488 aa, Unknown
  Obtained from environmental sample
  DOMAIN (57)...(218): Type III restriction enzyme, res subunit
  misc_feature (1)..(488): Xaa is any amino acid
MHLPDDLSGLDAYKARLRYEELYKIALDLRWSRRKFALPGYSMSPGDLADRLRAALPFKLTESQEAAVRVLFADAARPTRMHRLLQGDVGSGKTVTALFAALPALNSGRQVAWMAPTEILAKQTKSAVEGYLADLGIRVEYIGAGDAPEKRRALGGLASGALRFAVGTHALFMPSVKFSNLGMVIIDEQHKFGAAQRLKLQEKGPASDFLLMSATPIPQTLAKTLYGDLDAVEIGSRPGRAPVSTRIVPEGRRADMEGFILERICAGARVFYVVPRIEQQRSDDLEDAEGGGSGGGKRGRPASDGGGQADGLPVKTVEGVAEALKKGPLAAVPIYIVHGRMPADERDEAIRAFREGPPGVLVSTTIVEVGVDVPDAAVMVIENPELFGLAQLHQIRGRVGRGEAASYCFLLPGAEACRDERTMGRLKFLCGCSDGFEIAEWDLRNRGPGDAAGYRQSGWDDLAAADILEDAETFLCILSEMDILFAKG

SEQ ID NO: 26939 - DNA, 564 bp, Unknown
  Obtained from environmental sample
  misc_feature (1)..(564): n is a, c, g, or t
atgacagatgaaactgacattaacgacaggttagtcgtcagtcagattgtatccggacagaaggacctgttccgcattttggtgcggcagtatgaaagagcggttttcggaatgggcataagctttttccgtaataaagaggacgcttccgattttacgcaggaagtgttccttaaagcctaccggagccttcatggttttgagggaagaagccgtttttcaacatggctttataaaatagcgtataacaccgctataaacgaggtaaacagaaggaaggaataccacagccttgccgatgaaaaaatagacaggctttccaatcccggcgatacgccggaaaggatcgcgctgaaaaaagcggcaatggaggctgttcagacggctgtaaaggatctgcctgaacgtttcagagtctgcgtggatttgtactttcattatgatcgctcgcatcaggagattgaggcgattaccggttatccggtaaacacgataaagtctcatgtgttcagggcgaagaaaatgctcagggaaaaactggagcattttaaggagtcgcaatga

SEQ ID NO: 26940 - protein, 187 aa, Unknown
  Obtained from environmental sample
  DOMAIN (129)...(178): Sigma-70, region 4
  misc_feature (1)..(187): Xaa is any amino acid
MTDETDINDRLVVSQIVSGQKDLFRILVRQYERAVFGMGISFFRNKEDASDFTQEVFLKAYRSLHGFEGRSRFSTWLYKIAYNTAINEVNRRKEYHSLADEKIDRLSNPGDTPERIALKKAAMEAVQTAVKDLPERFRVCVDLYFHYDRSHQEIEAITGYPVNTIKSHVFRAKKMLREKLEHFKESQ

SEQ ID NO: 26941 - DNA, 951 bp, Unknown
  Obtained from environmental sample
  misc_feature (1)..(951): n is a, c, g, or t
atgtatagttacttatggaacttgggggaaaaattatccattctcgcgggcgcggcaaaatacgacgcctcatgcgcctcatcaggcagtgacggaaagggggcgcttgggggaaaaaaattcggcgcgagcgtgccggccggggtttgccatagctggaccgaggacgggcgctgcgtcagccttctcaagctgcttttctccaatgtctgccgttatgactgcgcctactgcgtgaaccgcgcttcggcggatatcccgcgaagcagcttcaccgtgcaggaactggttgacttaaccagcgaattctaccggcgcaattatatagaaggattatttctgtcttcggggattttcgccgatcccgacattgtaatggaaaaacttatagaaaccgcgcggactctgcggacgcaggcgggttatgccggctatatccacctaaagataatccccggcacaggcgaccgccttatcaaagaggcgggtctttgggcggacaggctcagcgttaacattgaattgcccacggaaaaaagccttgtccacctagcgccggacaagtccggtcagtcgattcttggggcgatgggggatttttcgaatatcagttgtgagtttgaggaagcccgccgcaagccgcgttttttgccgcgggggaaggcggcagttcccgctttcgcgccggcggggcagagtacccagcttattgtaggcgccagcgcggaagatgaccgtcagatcataaacctttcaagctcgctgtaccgtanattttcccctgcggagggtatattactccgcgtttatccaccctgggattccggcgcgtggttacagcggcgcctctgtaagaggcgatccccgtctgccggacattccccggccgcctttggtacgcgaacaccgtctctatcaggcggactggctcttgcgggtttatcactttaa

SEQ ID NO: 26942 - protein, 316 aa, Unknown
  Obtained from environmental sample
  DOMAIN (65)...(255): Radical SAM superfamily
  misc_feature (1)..(316): Xaa is any amino acid
MYSYLWNLGEKLSILAGAAKYDASCASSGSDGKGALGGKKFGASVPAGVCHSWTEDGRCVSLLKLLFSNVCRYDCAYCVNRASADIPRSSFTVQELVDLTSEFYRRNYIEGLFLSSGIFADPDIVMEKLIETARTLRTQAGYAGYIHLKIIPGTGDRLIKEAGLWADRLSVNIELPTEKSLVHLAPDKSGQSILGAMGDFSNISCEFEEARRKPRFLPRGKAAVPAFAPAGQSTQLIVGASAEDDRQIINLSSSLYRXFSPAEGILLRVYPPWDSGAWLQRRLCKRRSPSAGHSPAAFGTRTPSLSGGLALAGLSL

SEQ ID NO: 26943 - DNA, 984 bp, Unknown
  Obtained from environmental sample
  misc_feature (1)..(984): n is a, c, g, or t
atgttagaaagactttcagttgattctgcggcggacgcgctggaaaaggttaaacaggaaattgcaaaggtatttattggccagaaagagctggtagatcacgctattatcactttgctggctggtgggcacattctggtagaaggcgtgccggggctgggcaaaacccttctggttcgcgccctggcaaaagccctgggcggcgattccaggcggattcaatttacaccggatctaatgccaagcgacatcaccggcaacataatgcttgatgtccaggcgggaaaattcatcacgcggaaggggccggtctttgccaacattctcatcgcggacgagataaaccgcgctcccgcgaaaacccaggcagcgctttttgaggccatgcaggaattccaggtaagccttgacggaaccgagtatccgctcccaaagcccttcatggttttggccaccgaaaatccctttgaacacgaaggcacttacccgctgccggatgcccagaaagacaggtttttaatgaagcttttgattgactatccggctatggaagaagaaaaagagatggtcagccgggtgttggaaggcggaacgggggcggatctttcccttgagaacgtcaatattgtactgtcttctattgaagaatttgtagcgattcgcgatacggcttcgcgtgtccgcgccgcccccgaagtaattgactacgcggtaaggcttgtttcagccaccagagaagggggagcaatagagaccggcgctgggccgcgtggaagccttgcccttatccgctgcgcccgtggtcgcgcactcctggaacgccgggactttgtgattcccgacgatgtaaaggcgctggcggttccggttttgatccaccgcgtaaccctttcatcggaaagtgagctggaagggcaaaacgaggtacaggcggtaaaggccctcctgtccagggttgaagcgcccagagtggagtttgaatga

SEQ ID NO: 26944 - protein, 327 aa, Unknown
  Obtained from environmental sample
  DOMAIN (44)...(239): ATPase family associated with various cellular activities (AAA)
  misc_feature (1)..(327): Xaa is any amino acid
MLERLSVDSAADALEKVKQEIAKVFIGQKELVDHAIITLLAGGHILVEGVPGLGKTLLVRALAKALGGDSRRIQFTPDLMPSDITGNIMLDVQAGKFITRKGPVFANILIADEINRAPAKTQAALFEAMQEFQVSLDGTEYPLPKPFMVLATENPFEHEGTYPLPDAQKDRFLMKLLIDYPAMEEEKEMVSRVLEGGTGADLSLENVNIVLSSIEEFVAIRDTASRVRAAPEVIDYAVRLVSATREGGAIETGAGPRGSLALIRCARGRALLERRDFVIPDDVKALAVPVLIHRVTLSSESELEGQNEVQAVKALLSRVEAPRVEFE

SEQ ID NO: 26945 - DNA, 1545 bp, Unknown
  Obtained from environmental sample
  misc_feature (1)..(1545): n is a, c, g, or t
ttgtcccttttgaccctggggtcgcgcattttggggctggccagagagatgacaaaggcggctcttttgggaaccagcgccctgtcggatgcattttcggtggcttttatgatcccgaaccttttccgccgacttttcgcggaggggtcagttgcggtggcgtttgtccccaccttcaaagaataccttttacagagtgaaaacggccaggggtcgcctgacagcataaaggaattcctttcctgctttcttacctttcttagtttttttgttaccctcacggtgatggctgggattgccctttgcccacttttaatccggtttttcggcatggaagatttttcagagaccgtatttctcacccgcctgatgttcccgtttcttgccttcgtttccattgcggctttttttcaggggatactcaacagccttaagatttttgccccttccggttttgcacctatactcctcaacgcgataacaattctctgcgcttacgctctaagtccctacacgcagaaccccgccagggcgatggcgataggaatccttatcggtggatttatagaagccgcgatgcagcttccctttgttttatcgcataaaanaaggatacggtttttctttacaggtttaaaaagggcgataaacaatcctggcacaagaaaggttttacgccttgtanggccaactgtaataggcatggcggcttaccagttgaacgacatggtatccaccgctctggcgggcaatggcggggagggcattgtctcaagccttcagtattcgctcaggctgcaggaacttattctgggggtctntgcggtttccatcgggacggtgcttctgcctgactntgcggagtacgcgaaatccgggcgctgggacatttttaacaggcggctttcatcgggtatgaatatcatcgcctttattacgataccaattacctttttttcgttgtcccaggggcggagcctgattgcgctccttttccaaaccaggagctttaacgaggaatcggcacgactgaccctggctgcttttcactttcatatgccggggctttactttattgcccttaaccgcatcctggccccggctttttatgctcaaagcgatgcgaagtcccctacgattgcggggattttttcttttgccgttaacattgcgctcgccgccattctggcttttccgtttaaaggctcaggcattgcctttgccttgtcgtttgccagcgcggtcaatactgtggcgcttttgttttttctgagaagaaatcgggagataacgcttggcagtaccctcaaatccgcccttggctacgctgcaaaactaattttattttctgcccttgcccttattcccgtcctcttgctttcgccttggctttcggagctgttttcgggaaaggggcgcattatttcctatggcgtaccgctttttataaacgctcttgcttacgcgggaacaggctttatctttttagctgttacaagagataaacagtttttaggaatgataagaataatttataagaaataa

SEQ ID NO: 26946 - protein, 514 aa, Unknown
  Obtained from environmental sample
  DOMAIN (230)...(395): MatE
  misc_feature (1)..(514): Xaa is any amino acid
MSLLTLGSRILGLAREMTKAALLGTSALSDAFSVAFMIPNLFRRLFAEGSVAVAFVPTFKEYLLQSENGQGSPDSIKEFLSCFLTFLSFFVTLTVMAGIALCPLLIRFFGMEDFSETVFLTRLMFPFLAFVSIAAFFQGILNSLKIFAPSGFAPILLNAITILCAYALSPYTQNPARAMAIGILIGGFIEAAMQLPFVLSHKXRIRFFFTGLKRAINNPGTRKVLRLVXPTVIGMAAYQLNDMVSTALAGNGGEGIVSSLQYSLRLQELILGVXAVSIGTVLLPDXAEYAKSGRWDIFNRRLSSGMNIIAFITIPITFFSLSQGRSLIALLFQTRSFNEESARLTLAAFHFHMPGLYFIALNRILAPAFYAQSDAKSPTIAGIFSFAVNIALAAILAFPFKGSGIAFALSFASAVNTVALLFFLRRNREITLGSTLKSALGYAAKLILFSALALIPVLLLSPWLSELFSGKGRIISYGVPLFINALAYAGTGFIFLAVTRDKQFLGMIRIIYKK

SEQ ID NO: 26947 - DNA, 864 bp, Unknown
  Obtained from environmental sample
  misc_feature (1)..(864): n is a, c, g, or t
ttgtttccggaccaaaagggattaggtaaaagccttaccttgcggaacatctgtaaagaagctttaaaaaagggactgcctgttattctggtcaaacaacattttgagaacatcacgccgtttatcgaaaccatctgccagccttcagttgtggtttttgacgagtttgaaaaaatatattgcgatcataaccgaaccgagaaaaacgaacttgaaggtcaggacagtttgcttaacttgtttgattcttctcttaacgggaaaaagttgtttctgcttgcgtgtaatgacgtacgcaatttatcagaatatttgctaaacagaccgggtaggcttcattaccatttcaggatgaaccgactttccattagcgagataacagaatactgcacggataagctaagtaaagaaaaccacaatcttattcccgacatttgttctatgggagcacgcatccctgatttttcatacgatatgctacggtctattatctttgaactgaatacctgcaattgcggtttggcggaaactagaaaggttttgaacattgaagcaaggtcaaagtctgcgtttaattacaccatctattttaaatcaggtaaaaacgaaaccggatttgactatatagatacggccaataaccgttgccgccttagctggtattggaaaacggacggcaaccacgcctctgcaacggttgatatgtccgaagcaaaatggataggaaacgctgacggttcactgcatcttgacgggaagaatgtttgctggacacaaaaagcggaaaaaagtaatgaccgcatagaaaaaataatctttattcccgcgaaagacattttttctggttcctacgattgggactga

SEQ ID NO: 26948 - protein, 287 aa, Unknown
  Obtained from environmental sample
  misc_feature (1)..(287): Xaa is any amino acid
MFPDQKGLGKSLTLRNICKEALKKGLPVILVKQHFENITPFIETICQPSVVVFDEFEKIYCDHNRTEKNELEGQDSLLNLFDSSLNGKKLFLLACNDVRNLSEYLLNRPGRLHYHFRMNRLSISEITEYCTDKLSKENHNLIPDICSMGARIPDFSYDMLRSIIFELNTCNCGLAETRKVLNIEARSKSAFNYTIYFKSGKNETGFDYIDTANNRCRLSWYWKTDGNHASATVDMSEAKWIGNADGSLHLDGKNVCWTQKAEKSNDRIEKIIFIPAKDIFSGSYDWD

SEQ ID NO: 26949 - DNA, 519 bp, Unknown
  Obtained from environmental sample
  misc_feature (1)..(519): n is a, c, g, or t
atgcaggataaagtttgtttgtttccatttgacgcttgtcagatacattgtaacggcaatgtcagtttttgctgtgacatttggagtaaaaacaattacctcggcaatatttacacagaacctttcgagcagatctggaattcgcccatggcgcaagccatccggaaaagcgttctgagcggcgcttatgcctattgcaatcgtcagatttgtccgtatccgacccgctctgtgcagccgggagaccgggaatttctgtccttatatccgaagcggatcgatatagccaccgacaatgaatgtaatctggcttgctttacctgccgccgggaaccgttccgcaattctcccgccgaactgcatgaactgaatgaaaaaattgacggaattatgcctctgctgaaaaacgcttctgtcgtatacatggcgggcaacggcgatccttttgctagccggcactatcgcttgttgatcaggcgcatagcccaagcctaccccggcattagatttatgttttga

SEQ ID NO: 26950 - protein, 172 aa, Unknown
  Obtained from environmental sample
  misc_feature (1)..(172): Xaa is any amino acid
MQDKVCLFPFDACQIHCNGNVSFCCDIWSKNNYLGNIYTEPFEQIWNSPMAQAIRKSVLSGAYAYCNRQICPYPTRSVQPGDREFLSLYPKRIDIATDNECNLACFTCRREPFRNSPAELHELNEKIDGIMPLLKNASVVYMAGNGDPFASRHYRLLIRRIAQAYPGIRFMF

SEQ ID NO: 26951 - DNA, 753 bp, Unknown
  Obtained from environmental sample
  misc_feature (1)..(753): n is a, c, g, or t
ttggagggggaaataatgaacgttttagcggtacatgaggaaaaagcgcaggttatccaattcaggcagttggataatgacgaacaacagcgggaaactgacaggaaaacgcgcagtgaaaccatgccggcggttatcaaggtggtttccgccggaggggcggggggaaacgcgttaaaccgcatgatcgataccggattgtccggggttgaatttattgctattaacaccgacattcaggaccttaaggaaaagagcaaggccgatgtcaaagtgcaaattggcgtcaaggtaacgggagggcgcggagccggaggtgttcccgagaaaggggaaaaagccgcgcttgaagatcaggaagcgattgccgcggccgttaaaggcgccgacatggtatttatcaccgcgggaatgggcggcggaaccgggaccggatcggcgcacgttattgccagaatcgctaagagcttaggcgcccttgtcatcgcgattgttacccttccttttgaatatgaaggccgttacaagaaaaaactcgctatggacggaatcgcgaagttaacaaacgaagtagacgcgattattgttattccaaaccagaatctttttaaaattatagacagcaacactcaatggaaagacgcttatgtgttagctgataaagttttatgtttgggcgtgcgcggaatggcggagttaattacaaagatcggggactgtaatgttgatttcgccgacgggaaacaattatga

SEQ ID NO: 26952 - protein, 250 aa, Unknown
  Obtained from environmental sample
  DOMAIN (44)...(238): Tubulin/FtsZ family, GTPase domain
  misc_feature (1)..(250): Xaa is any amino acid
MEGEIMNVLAVHEEKAQVIQFRQLDNDEQQRETDRKTRSETMPAVIKVVSAGGAGGNALNRMIDTGLSGVEFIAINTDIQDLKEKSKADVKVQIGVKVTGGRGAGGVPEKGEKAALEDQEAIAAAVKGADMVFITAGMGGGTGTGSAHVIARIAKSLGALVIAIVTLPFEYEGRYKKKLAMDGIAKLTNEVDAIIVIPNQNLFKIIDSNTQWKDAYVLADKVLCLGVRGMAELITKIGDCNVDFADGKQL

SEQ ID NO: 26953 - DNA, 741 bp, Unknown
  Obtained from environmental sample
  misc_feature (1)..(741): n is a, c, g, or t
atgcataaaccgcgctgttttagggtaaacgagcttattttacagacgcttgccgccggccgcgcggcgattacgcaggaagaaatggatttgggagttgtgttagttgatctcggggccgggactaccgacgttcttgtttatgtagacgggacgccatattcaacgtacacaatacccgccggagggactcaggttacgggcgacatatccataattaaaaatatatctttggataacgccgagaaaattaaaatagacgcgggctgctgctgggacgagtttttagaagatgacgaagatgtgattgttccgggagtaggcggcaggccgcccatgaaaattccgcgctcccagatactgagtatcataaaaccaagaatggaagagctttttaaaatggttaaacagcatattgactctttaagcctttcgcggcatctgggcgggggcgtagtgcttacgggcggaggagcgcagctgcacggagttgtggaactggcgaacaatattttaaggctgccggcgcgtcttggaactccgataccgacaaaagatttggaaggattggccgaagagtatcgtacgacggcgtacgcaacagtcgtagggctggcgcttgaaggcgcgacacgcgcgcattttgacgcgcaaataaatcatggttcaagacagacggaaaacaagggacccgcgcttattgataaattcaaagcgtggcttaaagaagagtttttttga

SEQ ID NO: 26954 - protein, 246 aa, Unknown
  Obtained from environmental sample
  DOMAIN (33)...(205): Cell division protein FtsA
  misc_feature (1)..(246): Xaa is any amino acid
MHKPRCFRVNELILQTLAAGRAAITQEEMDLGVVLVDLGAGTTDVLVYVDGTPYSTYTIPAGGTQVTGDISIIKNISLDNAEKIKIDAGCCWDEFLEDDEDVIVPGVGGRPPMKIPRSQILSIIKPRMEELFKMVKQHIDSLSLSRHLGGGVVLTGGGAQLHGVVELANNILRLPARLGTPIPTKDLEGLAEEYRTTAYATVVGLALEGATRAHFDAQINHGSRQTENKGPALIDKFKAWLKEEFF

SEQ ID NO: 26955 - DNA, 1674 bp, Unknown
  Obtained from environmental sample
  misc_feature (1)..(1674): n is a, c, g, or t
gtgaagaaggttatgcagatcgctcgggaagagtcggttaggctcgggaacgattacgtgggcacggagcatttgctgctcggcctgataaaagagggcgacggcgtcgcggtcgcggttatgcgcggcatgggcgtagaccttgaagacctgagcgcgaacatagagaagaccataacctccgtgggcgggatgatgatggtggggcagatgctgccgttcacgccgcgggcgaagaaggtcttggagatcgcggcgaacgaggcgcggtcgatgtcgcacaagtacatcggcacggagcacctgctcttggcgctaatgaaggacaccgagtcggcggcggccagcgcgcttgccgcggcgggcctcgagtacgaccgcgtgaaagaggagattggccacgtgctcaagggcggagaggttagcggcgcgccggccacgtccaaagagaagagcaagacgcccatgctggaccacttcggacgcgacctcacggccatggcgcgggaggggaaactcgaccccgtaatcgggcgcgaaaaggagatcgagcgggtggtacaaatcctcagccgccgaaaaaagaacaaccccgtgttgatcggagaaccaggaataggaaagacggcgatagtcgaaggccttgcccaaaaaatcatcgaaaaaagcataccgcaggtacttgaaaacaagcgcgtcgtaaacctcgacatggcctctatggtcgccggcacaaagtaccgcgggcaattcgaggagcgcctgaaagcgctcatgctggagctacagaaaaacgagaacgtcgtcatattcatagacgagttgcacacgatagtcggcgccggcggttccgagggcagtttagacgcctcaaacatcttcaaacccgccctctcccgcggcgagatacagtgcgttggcgccacgacgctcgacgaataccgcaaatacatagagaaagacggcgctctcgccaggcgcttccaaacgataatggtcgatccgccgaacgtaaacgagacgatacagatactctccggcctgcgccataactacgaggaacaccacaaagtcacctattcagagaaggctatcgccatggcggtcaagctctccgaacggtacatatcggatcgtttcctgcccgacaaagcgatagacgtgattgacgaggccggcgcgaggaagcggctgtcgagcatggagataccgacggagatacgcgagatcgagaaggagattgccgaggttctgcgcgagaaggaaacggctatagagcaccaagactttgagtcggcggcgacgctgcgcgatacgcaggagaaactcaacggcgccctcttagaggccaaggcgctgtggcggagggccaagtccgaggagcggctcttggtagacgaatcgacgattactgaggttatcgccacgatgaccggcataccgctggcgcggcttgccgaggaagaggctaaaaaggtgttgcacctcgaggacgaattgcgccaaagggtcatcggccaagacgaggcgctcggcgctgtggcgaggagcatcaggcgttctcgcgccggcctgcacaacacccgtcgcccaatcgcctccttcatatttttaggggccgaccggcgtggggaaaacggagcttgccaaggcgcttgccaaggcgctttttga

SEQ ID NO: 26956 - protein, 557 aa, Unknown
  Obtained from environmental sample
  DOMAIN (411)...(446): UvrB/uvrC motif
  misc_feature (1)..(557): Xaa is any amino acid
MKKVMQIAREESVRLGNDYVGTEHLLLGLIKEGDGVAVAVMRGMGVDLEDLSANIEKTITSVGGMMMVGQMLPFTPRAKKVLEIAANEARSMSHKYIGTEHLLLALMKDTESAAASALAAAGLEYDRVKEEIGHVLKGGEVSGAPATSKEKSKTPMLDHFGRDLTAMAREGKLDPVIGREKEIERVVQILSRRKKNNPVLIGEPGIGKTAIVEGLAQKIIEKSIPQVLENKRVVNLDMASMVAGTKYRGQFEERLKALMLELQKNENVVIFIDELHTIVGAGGSEGSLDASNIFKPALSRGEIQCVGATTLDEYRKYIEKDGALARRFQTIMVDPPNVNETIQILSGLRHNYEEHHKVTYSEKAIAMAVKLSERYISDRFLPDKAIDVIDEAGARKRLSSMEIPTEIREIEKEIAEVLREKETAIEHQDFESAATLRDTQEKLNGALLEAKALWRRAKSEERLLVDESTITEVIATMTGIPLARLAEEEAKKVLHLEDELRQRVIGQDEALGAVARSIRRSRAGLHNTRRPIASFIFLGADRRGENGACQGACQGAF

SEQ ID NO: 26957 - DNA, 900 bp, Unknown
  Obtained from environmental sample
  misc_feature (1)..(900): n is a, c, g, or t
atgtatttgcggtattcgtcgagcgtcgtggcgccaacgcactgtatctcgccgcgggagagggcgggtttgaagatgtttgaggcgtctaaactgccctcggaaccgccggcgccgactatcgtgtgcaactcgtctatgaatatgacgacgttctcgtttttctgtagctccagcatgagcgctttcaggcgctcctcgaattgcccgcggtactttgtgccggcgaccatagaggccatgtcgaggtttacgacgcgcttgttttcaagtacctgcggtatgcttttttcgatgattttttgggcaaggccttcgactatcgccgtctttcctattcctggttctccgatcaacacggggttgttcttttttcggcggctgaggatttgtaccacccgctcgatctccttttcgcgcccgattacggggtcgagtttcccctcccgcgccatggccgtgaggtcgcgtccgaagtggtccagcatgggcgtcttgctcttctctttggacgtggccggcgcgccgctaacctctccgcccttgagcacgtggccaatctcctctttcacgcggtcgtactcgaggcccgccgcggcaagcgcgctggccgccgccgactcggtgtccttcattagcgccaagagcaggtgctccgtgccgatgtacttgtgcgacatcgaccgcgcctcgttcgccgcgatctccaagaccttcttcgcccgcggcgtgaacggcagcatctgccccaccatcatcatcccgcccacggaggttatggtcttctctatgttcgcgctcaggtcttcaaggtctacgcccatgccgcgcataaccgcgaccgcgacgccgtcgccctcttttatcaggccgagcagcaaatgctccgtgcccacgtaa

SEQ ID NO: 26958 - protein, 299 aa, Unknown
  Obtained from environmental sample
  misc_feature (1)..(299): Xaa is any amino acid
MYLRYSSSVVAPTHCISPRERAGLKMFEASKLPSEPPAPTIVCNSSMNMTTFSFFCSSSMSAFRRSSNCPRYFVPATIEAMSRFTTRLFSSTCGMLFSMIFWARPSTIAVFPIPGSPINTGLFFFRRLRICTTRSISFSRPITGSSFPSRAMAVRSRPKWSSMGVLLFSLDVAGAPLTSPPLSTWPISSFTRSYSRPAAASALAAADSVSFISAKSRCSVPMYLCDIDRASFAAISKTFFARGVNGSICPTIIIPPTEVMVFSMFALRSSRSTPMPRITATATPSPSFIRPSSKCSVPT

SEQ ID NO: 26959 - DNA, 435 bp, Unknown
  Obtained from environmental sample
  misc_feature (1)..(435): n is a, c, g, or t
ttgcccgcggtactttgtgccggcgaccatagaggccatgtcgaggtttacgacgcgcttgttttcaagtacctgcggtatgcttttttcgatgattttttgggcaaggccttcgactatcgccgtctttcctattcctggttctccgatcaacacggggttgttcttttttcggcggctgaggatttgtaccacccgctcgatctccttttcgcgcccgattacggggtcgagtttcccctcccgcgccatggccgtgaggtcgcgtccgaagtggtccagcatgggcgtcttgctcttctctttggacgtggccggcgcgccgctaacctctccgcccttgagcacgtggccaatctcctctttcacgcggtcgtactcgaggcccgccgcggcaagcgcgctggccgccgccgactcggtgtccttcattag

SEQ ID NO: 26960 - protein, 144 aa, Unknown
  Obtained from environmental sample
  misc_feature (1)..(144): Xaa is any amino acid
MPAVLCAGDHRGHVEVYDALVFKYLRYAFFDDFLGKAFDYRRLSYSWFSDQHGVVLFSAAEDLYHPLDLLFAPDYGVEFPLPRHGREVASEVVQHGRLALLFGRGRRAANLSALEHVANLLFHAVVLEARRGKRAGRRRLGVLH

SEQ ID NO: 26961 - DNA, 405 bp, Unknown
  Obtained from environmental sample
  misc_feature (1)..(405): n is a, c, g, or t
atggtctttcaggatactgcctcgtcgcttaaccccgtaaaaaaaatcggctggcttctggaagagccgctgatcattcaccgactcggcgcgaaagaacagcgagcgcgaaaggttgacgagatgcttgcccgagtcgggcttgacagttcatgcaagacacgccgcgtgcatgagttttcaggaggccagaagcagcgaatctgcatagggcgcgccctcatgctccaaccgaaaatcctcattgcagatgaagccataagctcgcttgacgtttccgccggcgctcagatactgaacctcttccgcgaattgcgcgacagcctggggctgacgattatttttatttcgcataacacgggggcggtggagtatttgtgcgacagggttttacagctaaaataa

SEQ ID NO: 26962 - protein, 134 aa, Unknown
  Obtained from environmental sample
  DOMAIN (1)...(134): ABC transporter
  misc_feature (1)..(134): Xaa is any amino acid
MVFQDTASSLNPVKKIGWLLEEPLIIHRLGAKEQRARKVDEMLARVGLDSSCKTRRVHEFSGGQKQRICIGRALMLQPKILIADEAISSLDVSAGAQILNLFRELRDSLGLTIIFISHNTGAVEYLCDRVLQLK

SEQ ID NO: 26963 - DNA, 312 bp, Unknown
  Obtained from environmental sample
  misc_feature (1)..(312): n is a, c, g, or t
ttgcttcctgtgggcacagtgggcacatacacggaaatagtcgccatcggctcggagcttttgaacgctgggcgcgttgacaccaactccatctggatagcggaccgccttgcagagttaggtctgcatctgcacctcaagacctgcgtgggcgacgactttggcgaactcaaggactgtctggcgggcgtgatagaaagaagtgaacggtctggaaaacagaccctgataatcaccactggcggcctaggggccacattcgacgaccgcaccaaagaggctttagcgcggtccttggtgcccagatgttaa

SEQ ID NO: 26964 - protein, 103 aa, Unknown
  Obtained from environmental sample
  DOMAIN (12)...(102): Probable molybdopterin binding domain
  misc_feature (1)..(103): Xaa is any amino acid
MLPVGTVGTYTEIVAIGSELLNAGRVDTNSIWIADRLAELGLHLHLKTCVGDDFGELKDCLAGVIERSERSGKQTLIITTGGLGATFDDRTKEALARSLVPRC

SEQ ID NO: 26965 - DNA, 549 bp, Unknown
  Obtained from environmental sample
  misc_feature (1)..(549): n is a, c, g, or t
atggacggtacaggtcaggcaccagactcttttctcttctggccggtgttcttcaagcggaacggcctggctttctgggcggcgttcgcggagcgatacggcggccccacggtgcttggcaagtatcccagcttcatggaggcggacaaggtggaggcgctgctcgcctccgtgtccgacatgagccagaagacggccatagtcgcgcccatcgagacggagattcagcttctggaggccgcaaagaccggctccatcgacacctacgagcggctgctgcgctacatggacgaggagataagcaaggcggtccttggcgagacgctgaccaccagcatcggcgacaaaggctcctatgcggcatcccagacccacaacggtgtgcggatggagctgataaagtccgacgccgacctgctgtccgccacgctcaacgccacgctgatgacctggctggcggagttccatttccccggcgcgaacccgccacggatatggcgcagggtggaggcgccctttgacggcaaggccgaggccgagaaggactag

SEQ ID NO: 26966 - protein, 182 aa, Unknown
  Obtained from environmental sample
  misc_feature (1)..(182): Xaa is any amino acid
MDGTGQAPDSFLFWPVFFKRNGLAFWAAFAERYGGPTVLGKYPSFMEADKVEALLASVSDMSQKTAIVAPIETEIQLLEAAKTGSIDTYERLLRYMDEEISKAVLGETLTTSIGDKGSYAASQTHNGVRMELIKSDADLLSATLNATLMTWLAEFHFPGANPPRIWRRVEAPFDGKAEAEKD

SEQ ID NO: 26967 - DNA, 714 bp, Unknown
  Obtained from environmental sample
  misc_feature (1)..(714): n is a, c, g, or t
ttggagatgcaagccgagcaaatacaaaaaatgcaagaggaaattcaccaaagcagggttttaagtgctcttggagaaatggctgcaaccgtggctcacgagattagaaacccccttggcggaatagccggttatgccagtttgcttgcgaggagcattccacccgaagacccaaagcgaaaatatgtggataaaataataggcggaatttccagcctcaacaagatagtcagcaacttgcttgtttataccagaaaaacaaatttgcaaaagcaaaacacagatttggttgcttgggcagaggcaattttgtctcacgctgaaattgaaattgaaaaggaaaaaaagcaagttcgcatagaacgcgattttccggcagagcctttgaatgcggaaattgacagcgaaaaactgcagcaggttatgcttaacctgcttataaacggtattcaggcaatagaagatgatggcaaaatttttgtcagcattaaattaaacggaaaggctgcggaaataaccgttgcagacacgggaaaaggcattgaacaggagcatttgaaaaacatattcacaccttttttcacaacaaaagaacaaggcacaggccttggccttgccattgtgaaaaaaatagtggacttgcacgaaggagagatatccgttgagagcgagccgaataaaggtacgcagttttgcataaggatcaatgtttag

SEQ ID NO: 26968 - protein, 237 aa, Unknown
  Obtained from environmental sample
  DOMAIN (23)...(89): His Kinase A (phosphoacceptor) domain
  misc_feature (1)..(237): Xaa is any amino acid
MEMQAEQIQKMQEEIHQSRVLSALGEMAATVAHEIRNPLGGIAGYASLLARSIPPEDPKRKYVDKIIGGISSLNKIVSNLLVYTRKTNLQKQNTDLVAWAEAILSHAEIEIEKEKKQVRIERDFPAEPLNAEIDSEKLQQVMLNLLINGIQAIEDDGKIFVSIKLNGKAAEITVADTGKGIEQEHLKNIFTPFFTTKEQGTGLGLAIVKKIVDLHEGEISVESEPNKGTQFCIRINV

SEQ ID NO: 26969 - DNA, 486 bp, Unknown
  Obtained from environmental sample
  misc_feature (1)..(486): n is a, c, g, or t
atgctctttcttagcggctcccttgcagtttcaaatttcaggctttcgcaatttccagtaaaaggaataagcgcagaatatttacacatagcagaaaccacaagagacctaaacccagaagaacacaaaaaactggaaatacttttggaatacggtgaatgtaaaaaatctggtaaatcctcaaatgaccatcctgcggatgttcgccagcgagtaagtagcgtatgggcgtctgaaaatcttggttcagacgttttaatagtagcccccagagcaggcacaataagcccttggagttcaaaggcaacagacataatgcatatatgcggactttctgccattaaacgcatagaaagagcagttgtttggacatttgcagagggattgccctcggagagcatgctttttgacagaatgaccgagcagatttttcacaagaaagaagaacttgccactctgttcactcacaaagaacaaaaactttaa

SEQ ID NO: 26970 - protein, 161 aa, Unknown
  Obtained from environmental sample
  misc_feature (1)..(161): Xaa is any amino acid
MLFLSGSLAVSNFRLSQFPVKGISAEYLHIAETTRDLNPEEHKKLEILLEYGECKKSGKSSNDHPADVRQRVSSVWASENLGSDVLIVAPRAGTISPWSSKATDIMHICGLSAIKRIERAVVWTFAEGLPSESMLFDRMTEQIFHKKEELATLFTHKEQKL

SEQ ID NO: 26971 - DNA, 810 bp, Unknown
  Obtained from environmental sample
  misc_feature (1)..(810): n is a, c, g, or t
atggcgctgaagaaaaagactgttaaggacattgactttaagggcaagcgcgttttaatgcgggttgactttaatgtgcctatggataagggcgtgattcaggacgatacccgcatccaagccgctctgccgaccattaagtacgttttggaacaaggcgcgaaaagcctcgtactaatgtcccatctcggcgaccccaagaaggacatggccaaatctaaggagaaggcggagaaggcggggaaaccgtttgacgaggagcagtacctagcctacaagcataagatgaagccgctcgccgagcatttgtctaaacttttgggcaaaaatgtcgccctagcccccgactgcgtcagcgacgagaccaaatctatggcggccaaactcgacgggggatctatcctcatgttggagaatacgcgcttccacaaggaggagacctccaaggatgccgccgaccgcgagaagatggctaaggcgctcgcggaactcggcgacgtctacgtgaacgacgctttcggcacggcccaccgggcgcacgcctcaactgagaccgtcgcccacttccttccggcggtggccgggttcttgatggagaaggaactcgtgttcttgcaggagaaggtcgttgacgcgcctgtgaagcctttcgtggcgattatcggcggggcgaaggtctcgtcaaagatcgcggttcttgagagtctgctctccaaggtcgacagcatgattatcggcggcggcatggcctacaccttccagaaggcgctcggtcagagcatcggcgagtcgctcgtgaagacgacatga

SEQ ID NO: 26972 - protein, 269 aa, Unknown
  Obtained from environmental sample
  DOMAIN (2)...(269): Phosphoglycerate kinase
  misc_feature (1)..(269): Xaa is any amino acid
MALKKKTVKDIDFKGKRVLMRVDFNVPMDKGVIQDDTRIQAALPTIKYVLEQGAKSLVLMSHLGDPKKDMAKSKEKAEKAGKPFDEEQYLAYKHKMKPLAEHLSKLLGKNVALAPDCVSDETKSMAAKLDGGSILMLENTRFHKEETSKDAADREKMAKALAELGDVYVNDAFGTAHRAHASTETVAHFLPAVAGFLMEKELVFLQEKVVDAPVKPFVAIIGGAKVSSKIAVLESLLSKVDSMIIGGGMAYTFQKALGQSIGESLVKTT

SEQ ID NO: 26973 - DNA, 624 bp, Unknown
  Obtained from environmental sample
  misc_feature (1)..(624): n is a, c, g, or t
atgttcgtgatgggcgtgaaccacaagacctacaagaaggagatgaccatcgtctccaacgcctcctgcacgaccaactgcctcgcccccgtcgcgaaggttttgcacgacaactggggcatcaaaatgggcctgatgagcacaatccacgcctgtacggcgacgcagaagacggttgacgggccatcgctcaaggactggcgcggcggccgcggcgcgggccagaacatcatcccctcctccaccggcgccgccaaggccgtcggcaaggtgattcccgaactcaacggcaagctcaccggcatggctttccgcgtgcccacacccgacgtctccgtagtcgacctcacggcgctccttgagaagccggccaagtacgacgacattaaaaaggcgatgaaagcggcttccgaaagcggcgacctcaagggcgttttggcctacacggaggacgaggtggtctccaccgacttcctcggcgagtgccacacgtcgatattcgacgccaaggcgggaatcgcgctcagcgacgacttcgtcaaggtcgtctcttggtacgacaacgagatgggctactcgcacaaggtttgcgaactcatcatgcacatggacaccgtgaagtaa

SEQ ID NO: 26974 - protein, 207 aa, Unknown
  Obtained from environmental sample
  DOMAIN (28)...(186): Glyceraldehyde 3-phosphate dehydrogenase, C-terminal domain
  misc_feature (1)..(207): Xaa is any amino acid
MFVMGVNHKTYKKEMTIVSNASCTTNCLAPVAKVLHDNWGIKMGLMSTIHACTATQKTVDGPSLKDWRGGRGAGQNIIPSSTGAAKAVGKVIPELNGKLTGMAFRVPTPDVSVVDLTALLEKPAKYDDIKKAMKAASESGDLKGVLAYTEDEVVSTDFLGECHTSIFDAKAGIALSDDFVKVVSWYDNEMGYSHKVCELIMHMDTVK

SEQ ID NO: 26975 - DNA, 399 bp, Unknown
  Obtained from environmental sample
  misc_feature (1)..(399): n is a, c, g, or t
ttgaggtcgccgctttcggaagccgctttcatcgcctttttaatgtcgtcgtacttggccggcttctcaaggagcgccgtgaggtcgactacggagacgtcgggtgtgggcacgcggaaagccatgccggtgagcttgccgttgagttcgggaatcaccttgccgacggccttggcggcgccggtggaggaggggatgatgttctggcccgcgccgcggccgccgcgccagtccttgagcgatggcccgtcaaccgtcttctgcgtcgccgtacaggcgtggattgtgctcatcaggcccattttgatgccccagttgtcgtgcaaaaccttcgcgacgggggcgaggcagttggtcgtgcaggaggcgttggagacgatggtcatctccttcttgtag

SEQ ID NO: 26976 - protein, 132 aa, Unknown
  Obtained from environmental sample
  SIGNAL (1)...(26)
  misc_feature (1)..(132): Xaa is any amino acid
MRSPLSEAAFIAFLMSSYLAGFSRSAVRSTTETSGVGTRKAMPVSLPLSSGITLPTALAAPVEEGMMFWPAPRPPRQSLSDGPSTVFCVAVQAWIVLIRPILMPQLSCKTFATGARQLVVQEALETMVISFL

SEQ ID NO: 26977 - DNA, 510 bp, Unknown
  Obtained from environmental sample
  misc_feature (1)..(510): n is a, c, g, or t
atgaactacacggatattgaatggtgcgatatgacattgaatccggttacgggctgtttgcatggctgcccttattgctatgcaagaaaacaagtgcgccgctttgaggggagatatgaagagatattcggcggcaatggcacgggaagccctttcaaaatacatgaacttgaaaccccggagaaaaggataacaaagaaaggcgaattcatgaaagcgccttatcctttcggttttgatcctacattccatatataccgcttggaccagccgcagagcatgaaaaaaacaaagagcatatttataggggatatggcggatttgttcggtcattgggtccctgatgaatggattaaaaaagtattaaacacttgcaaaaaagcccctcaacaccggtatatatttttaacgaaaaattacagcagatataacgaattacgcgaaaaaggaattctgccattaaataaaaatatgtatttcggcgtgagcgtgacaacagaaagacaataa

SEQ ID NO: 26978 - protein, 169 aa, Unknown
  Obtained from environmental sample
  DOMAIN (2)...(169): Phage protein Gp37/Gp68
  misc_feature (1)..(169): Xaa is any amino acid
MNYTDIEWCDMTLNPVTGCLHGCPYCYARKQVRRFEGRYEEIFGGNGTGSPFKIHELETPEKRITKKGEFMKAPYPFGFDPTFHIYRLDQPQSMKKTKSIFIGDMADLFGHWVPDEWIKKVLNTCKKAPQHRYIFLTKNYSRYNELREKGILPLNKNMYFGVSVTTERQ

SEQ ID NO: 26979 - DNA, 432 bp, Unknown
  Obtained from environmental sample
  misc_feature (1)..(432): n is a, c, g, or t
ttgcccaagccttggccccgccggaatggtgatcctgctttccttaatcttttcccgctcgtcatccaaaaaaagtttttcgtactgggcaattctggccttgcttttggcgtgcctgcctttggggctcatgtgtatccattcaagctcccgctggagctgcttgcgcctgtcgctttcgcccttttcttcctgtgcaaggcgctgttccttttgttcaagccaggacgaatagttgcccttccagggaataccctcgccgcggtcaagttccagaatccagccggcgacattgtccagaaaatagcggtcgtgcgtaacggcaataacagtccccgcgtattccctgaggtgcctttcaagccaggcgacggtctcggcgtccaggtggttcgttggctcgtcaagcaggagtatgtccggtttttttag

SEQ ID NO: 26980 - protein, 143 aa, Unknown
  Obtained from environmental sample
  misc_feature (1)..(143): Xaa is any amino acid
MPKPWPRRNGDPAFLNLFPLVIQKKFFVLGNSGLAFGVPAFGAHVYPFKLPLELLAPVAFALFFLCKALFLLFKPGRIVALPGNTLAAVKFQNPAGDIVQKIAVVRNGNNSPRVFPEVPFKPGDGLGVQVVRWLVKQEYVRFF

SEQ ID NO: 26981 - DNA, 480 bp, Unknown
  Obtained from environmental sample
  misc_feature (1)..(480): n is a, c, g, or t
atggatggtttatcgcatacctttgacttctatcaaaatgaaataggcattacatattatttggaaaattcatccgcggaggctctgccttattttaaagacgcaatggcgattaactcttcaggagtaggttcaaacggtcaatcttacaattatggttattgtcttgcgctctgctctgaagaaacatcggagaattggaataaagctttaagttatttggacaaggctttgataatttcgccggataagcctcagcctttggcgttgaaaggaacttgtttatataaactgaacaaatataacgaggccattgcctgctttgatatggcgttgagcaagaaatacggtattttatcaaatgctgaaaaaaaggatgtttttacgaaaagagcaaattgttatgccgctttgggcatgaaggataaagcggataaggataatgcggaagcagaccgtttagcgaaacttcccgcttaa

SEQ ID NO: 26982 - protein, 159 aa, Unknown
  Obtained from environmental sample
  misc_feature (1)..(159): Xaa is any amino acid
MDGLSHTFDFYQNEIGITYYLENSSAEALPYFKDAMAINSSGVGSNGQSYNYGYCLALCSEETSENWNKALSYLDKALIISPDKPQPLALKGTCLYKLNKYNEAIACFDMALSKKYGILSNAEKKDVFTKRANCYAALGMKDKADKDNAEADRLAKLPA

SEQ ID NO: 26983 - DNA, 333 bp, Unknown
  Obtained from environmental sample
  misc_feature (1)..(333): n is a, c, g, or t
ttgagtttatcaaaggcaggcgcctcgcgtcttctgcttggtttaattattcttttaattgttttgggagccgcggcggccgtatacacgctgcgaagcaatcccgtagaagacgctcttgccgccaatcgtgtaattagtatcctctatgtaattgaagaagataaaaagcctgtcagcacctatgtattaatgtattatcccgggacaaaccgcgccgctgtttttgacatacccggaaatttggggctgttaattacaaaaatcaaccgcgttgaccgaatcgacaaagtgtacgattcgtcaagaatcggcagtatcaaaacgaaatga

SEQ ID NO: 26984 - protein, 110 aa, Unknown
  Obtained from environmental sample
  SIGNAL (1)...(26)
  misc_feature (1)..(110): Xaa is any amino acid
MSLSKAGASRLLLGLIILLIVLGAAAAVYTLRSNPVEDALAANRVISILYVIEEDKKPVSTYVLMYYPGTNRAAVFDIPGNLGLLITKINRVDRIDKVYDSSRIGSIKTK

SEQ ID NO: 26985 - DNA, 411 bp, Unknown
  Obtained from environmental sample
  misc_feature (1)..(411): n is a, c, g, or t
ttggcaaaacaaatggaacccaaacttttattgaaaatggtgaaggacgacggctttccggttacggaaattgaaaagacaaaaccaaaccttcttcacggaagggctgcggcggtattgctaaaggaacgcttctgtattcataataaagatgtgcttgaggcggtggcgtttcatacgtccggaaaagaaaacatgagcccgctggcaaaggtggtctatattgccgacaaaattgaagtgtcaaggaatattgagagcgccttaagaaagatgtgcgtaaatgaagatttagacagtattctttatgctgttctgaaaaagcaaatcggcaaactgcaatcaaagggagtgaatttgtttgaggatacattgcggctgctgaacaaaatgaaggaaagagcgcgttga

SEQ ID NO: 26986 - protein, 136 aa, Unknown
  Obtained from environmental sample
  misc_feature (1)..(136): Xaa is any amino acid
MAKQMEPKLLLKMVKDDGFPVTEIEKTKPNLLHGRAAAVLLKERFCIHNKDVLEAVAFHTSGKENMSPLAKVVYIADKIEVSRNIESALRKMCVNEDLDSILYAVLKKQIGKLQSKGVNLFEDTLRLLNKMKERAR

SEQ ID NO: 26987 - DNA, 864 bp, Unknown
  Obtained from environmental sample
  misc_feature (1)..(864): n is a, c, g, or t
gtgaaactcggtatttttgggggcagttttaatccggtgcattacgggcatttttttcttgttgacgccgctgtttcaaaattaaaactggacagggttgtaatgattcccgccttccgttctccttttaagcttgaggctgagaacatggaaggcagcgcggacgacaggcttgatatgcttgccgccgccgccgccggcgacagcagggtggctatcgacgactgtgagatcaggcgcggaggagtttcctacaccgtggacacaatcgaggacattgccgcccgctatctgcctgacggaaagccggcgcttattatcggggacgatcttgcggacgattttccaaaatggcgcgacagtaataaaattctggaactggcggatatagttatcgtacgcaggaataagcccgtatcaggtaatccggaaaccgtatacccgtttgcgcatacccttcttgataacgaaataatggatatttcctcgcaaatgatacgggataagataaaaaccgatcgggactggcgttcccttgtgcctgccggggcaagggcaattatcgaagacaggcggctttacggctataacggcagcggacagtcatcgaacttaaagttcgcgaacataaagttcgcgaacataaagttcgcgaacgacaaggattgttcccgggaagttattttacgcatagaggaggaggcgcatagggttcttactattgagcgttttcttcattccagaaacactgcccttttagcgcatgatcttgccgcccgcttcgggcatagactcaaagggcgggttatcttgcgggaattgcgcacgatttggcaaaacaaatggaacccaaacttttattga

SEQ ID NO: 26988 - protein, 287 aa, Unknown
  Obtained from environmental sample
  DOMAIN (5)...(169): Cytidylyltransferase
  misc_feature (1)..(287): Xaa is any amino acid
MKLGIFGGSFNPVHYGHFFLVDAAVSKLKLDRVVMIPAFRSPFKLEAENMEGSADDRLDMLAAAAAGDSRVAIDDCEIRRGGVSYTVDTIEDIAARYLPDGKPALIIGDDLADDFPKWRDSNKILELADIVIVRRNKPVSGNPETVYPFAHTLLDNEIMDISSQMIRDKIKTDRDWRSLVPAGARAIIEDRRLYGYNGSGQSSNLKFANIKFANIKFANDKDCSREVILRIEEEAHRVLTIERFLHSRNTALLAHDLAARFGHRLKGRVILRELRTIWQNKWNPNFY

SEQ ID NO: 26989 - DNA, 897 bp, Unknown
  Obtained from environmental sample
  misc_feature (1)..(897): n is a, c, g, or t
atggccgggcctcaggttaattcggcaattctaatagtcaatctccataaacaagacgccgcggcggcagccgaggaaatccggcgggaacttgaaggcgtgggggtacagaccacccttttcgcttttgaggggcgtcccgccactccccctgagggcaaatgggacatcgctttcagcctgggaggcgacggaactgtcctgtatacggcgcggatccttgcccatacaggcacgccaatcctccccgtacatcttggaaccctgggatttatcgccggcgtggaaaggcatgaatggctttgggtctacaggcgctggctttcaggtgaaataaggctttccagacgctgtatgctggaattttccattgaaaggggcggtaaatatgccgttaataatagtgtatgcctgaatgacgtggtgatttcatctttggggatagcaaagctgatacgtttgcaggcaagaacagaggttgcccccggcgaatttgcggaaattggttcctatcgctcggatgggcttataatcgctactcccaccggttccacgggttattccatggcggccggcgggccgatattggatccggagatggaagcgcaaattatcagcccaatctgcccctttaccttgtcgaaccgcccgctggtgcttccgtcacggcaggcattacagataacggtttgcaaggagcagcggagcggggtgctgctgacttgcgacgggcaggagacctttgatctggaccccggtgacttggtcaccataaaacattcgccgcattacgcgcttctgattaccgcggggtattcgtcgtattacaaagcgttagcggaaaaattggcctggtcctccgtaggaggcgcgtcctccggggggattcatgcttga

SEQ ID NO: 26990 - protein, 298 aa, Unknown
  Obtained from environmental sample
  DOMAIN (8)...(270): ATP-NAD kinase
  misc_feature (1)..(298): Xaa is any amino acid
MAGPQVNSAILIVNLHKQDAAAAAEEIRRELEGVGVQTTLFAFEGRPATPPEGKWDIAFSLGGDGTVLYTARILAHTGTPILPVHLGTLGFIAGVERHEWLWVYRRWLSGEIRLSRRCMLEFSIERGGKYAVNNSVCLNDVVISSLGIAKLIRLQARTEVAPGEFAEIGSYRSDGLIIATPTGSTGYSMAAGGPILDPEMEAQIISPICPFTLSNRPLVLPSRQALQITVCKEQRSGVLLTCDGQETFDLDPGDLVTIKHSPHYALLITAGYSSYYKALAEKLAWSSVGGASSGGIHA

SEQ ID NO: 26991 - DNA, 687 bp, Unknown
  Obtained from environmental sample
  misc_feature (1)..(687): n is a, c, g, or t
atgcttgaggagcttacgataagaaattttgccctggtcgattctatttccctctccttccggcccggctttaacgtgcttacaggcgaaaccggcgcgggcaagtcgataattgtcggctccctcgggtttctaatgggcgcaaaaaccgaggtcgacgttatacgatcaggctgtgaggaggcgagcgtttcagccattgtgtcaataggcaagggaaacaacggcgcttttgaatggcttaaaagccgtgaaatcagcagtgaagaggataccgtcatcgtccgccggaatattaaaacatcgggcaagggctcaatttacatacaggaaacgccggttacaagaacggatcttgcgggttttatgacccagctttttgatcttcacgggcagcatgaccacgggtcattgctgagaaaggaaaaccaccgccgcttcctggacgctttcgccggcattgaggaagaagctttagcttacaacaggctttttaccgagcttgccgaaaagcgcaaaacgctggaggcgtcgttcagttcccagaaggacagggaagcgaggatggaaattctgcgctacgccgtggaagaaatttccgccgcggccctccgcagcggggaactgcgcgatcttgaaaacgaggcgcaaatactttcaggtttgaaaaacttgccgcttatataa

SEQ ID NO: 26992 - protein, 228 aa, Unknown
  Obtained from environmental sample
  DOMAIN (1)...(198): RecF/RecN/SMC N terminal domain
  misc_feature (1)..(228): Xaa is any amino acid
MLEELTIRNFALVDSISLSFRPGFNVLTGETGAGKSIIVGSLGFLMGAKTEVDVIRSGCEEASVSAIVSIGKGNNGAFEWLKSREISSEEDTVIVRRNIKTSGKGSIYIQETPVTRTDLAGFMTQLFDLHGQHDHGSLLRKENHRRFLDAFAGIEEEALAYNRLFTELAEKRKTLEASFSSQKDREARMEILRYAVEEISAAALRSGELRDLENEAQILSGLKNLPLI

SEQ ID NO: 26993 - DNA, 1122 bp, Unknown
  Obtained from environmental sample
  misc_feature (1)..(1122): n is a, c, g, or t
atgatattaaaaaattatcagtgcaacgcactagacatcttgcaaagattctttgaggcttgccgtatttccggcgcgaaaagcgcgtatgaggctattacaggcgagccggagatcgccgtacggctagatcgcttactgagtggaaaatacgagtgttgggagtctataccgaatacgccgcgagtgtgtttgaaagttccgacaggcggcggcaaaactattattgcggcatatgcggtgaaagttgtttccgatacttggttggagcgtgaaaatccggtcgttctttggtttacgccgtccgataccatccgtaagcagaccagcgaggcattgaagaatccgcgtcatccgtaccgtatggcgttggacgagcaattcgacggttgcgtccgtatctttgacattgacgaaaaattcaacattcgtccggcggatattgacggcggtgtttgtatcatagtttcgacaatgcagtcttttgtaaaagaagataccagcaaatacaatgtttacaaggataatgaaaatcttgaaagccattttgttaaaatgccgcacgccaaatatgcgggtatggaaatgctggacgacggtagccgtccaaagtattcattcgcaaacttattgtattatcatagaccgattatgatagtggacgaagctcacaaagtagttaccaacttatcacaggaaacccagcggaggctcaaccccgccgccattattgaattcacggcaacaccgcgtccgaacaacaacacgctctacaatgttcgcgcctctgaactcaaagaggaagagatgataaagttgcctattgagttgcgtgagcattccgggtgggaagcggcggtagatgaggcgattgcgaagcgtgaggaattggaaaaagcggcggaaaacgaaagcgagtatatccgcccgatcttgttatttcaggcgcaaagcaaagataaagaggtaacggtggaagtccttaagagttaccttcttgaaacgagcaatttgccggaaagtcaaataaaaatagccaccggcgagcaaaaggaacttgacgatatagacctctttaatcccgatgaaccaacacgctatattatcacagtcgaggcctaa

SEQ ID NO: 26994 - protein, 373 aa, Unknown
  Obtained from environmental sample
  DOMAIN (43)...(252): Type III restriction enzyme, res subunit
  misc_feature (1)..(373): Xaa is any amino acid
MILKNYQCNALDILQRFFEACRISGAKSAYEAITGEPEIAVRLDRLLSGKYECWESIPNTPRVCLKVPTGGGKTIIAAYAVKVVSDTWLERENPVVLWFTPSDTIRKQTSEALKNPRHPYRMALDEQFDGCVRIFDIDEKFNIRPADIDGGVCIIVSTMQSFVKEDTSKYNVYKDNENLESHFVKMPHAKYAGMEMLDDGSRPKYSFANLLYYHRPIMIVDEAHKVVTNLSQETQRRLNPAAIIEFTATPRPNNNTLYNVRASELKEEEMIKLPIELREHSGWEAAVDEAIAKREELEKAAENESEYIRPILLFQAQSKDKEVTVEVLKSYLLETSNLPESQIKIATGEQKELDDIDLFNPDEPTRYIITVEA

SEQ ID NO: 26995 - DNA, 717 bp, Unknown
  Obtained from environmental sample
  misc_feature (1)..(717): n is a, c, g, or t
ttgcacaaccaaaaatggcgaacagatattattgagatgcagcggcatcctcaggtaaactttaaagacagaacattcgtttatgttgcagaggctattctcgaacagaaaaaaaggggtaaatggaatttcgatttagcgcctctaatttccgtaaacattcttaattttcgcatagacaagaggaagaaaaccgacaaaaacatttcgtatgttaagttgatagacactgacactaacgaagttttttacaaaaaactctcttttgtatatctcgaattgcctcgtttcaagaagaaagtacacgaattgcagacaaaccgcgatatatggatgtttgtacttaaaaacctcagaaaactaaataatttgcccgatgaaataagcaatgaaattttcaaaaaactctttcaaatggctgaaattgcggcattatccgaagaagacagaaaaaaatattatcaatcacttaaagattataacaatatgtacacaatcgttgacgaaaagaacgacaccattgctaaaaagaacaaaacaataatagcaaagaacaaaacaatttctggtttgaaacaggagaacgtaacctataaacaacaggtcgaagcctctctacatagggaagctgcctatcaacaacaggtcgcagcaaaagacaaaatcattgaagatttgatgcagcgtttagctttatccggcgctcaatctaattag

SEQ ID NO: 26996 - protein, 238 aa, Unknown
  Obtained from environmental sample
  misc_feature (1)..(238): Xaa is any amino acid
MHNQKWRTDIIEMQRHPQVNFKDRTFVYVAEAILEQKKRGKWNFDLAPLISVNILNFRIDKRKKTDKNISYVKLIDTDTNEVFYKKLSFVYLELPRFKKKVHELQTNRDIWMFVLKNLRKLNNLPDEISNEIFKKLFQMAEIAALSEEDRKKYYQSLKDYNNMYTIVDEKNDTIAKKNKTIIAKNKTISGLKQENVTYKQQVEASLHREAAYQQQVAAKDKIIEDLMQRLALSGAQSN

SEQ ID NO: 26997 - DNA, 432 bp, Unknown
  Obtained from environmental sample
  misc_feature (1)..(432): n is a, c, g, or t
ttggttgacgattacgcccacaaccctgcgaaaatagcggcaagtattcgctcctgccaagattttgcaaaaggaaaagtgttcgcttggtttcagccgcacggttttggtccaacaaaatttttaaaagacgatttggtaaaagaaatttccgaggttttgcgcncaagcgatgaaatgtggttcagctccatatattacgcaggcggcacagcagaccgcagctttgattcggatattctttcaaatgctttgaaggaaaaaggctgcaatgcaaattttatttcaaatagagaagagtgcttaaagaaaataataagcaaagcaaaatctggcgatgttattttgcttatgggggcgagagaccccagtttgtcggagttctctaagggtgtacatcaacgaattcggtctggaattgctcaactttaa

SEQ ID NO: 26998 - protein, 143 aa, Unknown
  Obtained from environmental sample
  misc_feature (1)..(143): Xaa is any amino acid
MVDDYAHNPAKIAASIRSCQDFAKGKVFAWFQPHGFGPTKFLKDDLVKEISEVLRXSDEMWFSSIYYAGGTADRSFDSDILSNALKEKGCNANFISNREECLKKIISKAKSGDVILLMGARDPSLSEFSKGVHQRIRSGIAQL

SEQ ID NO: 26999 - DNA, 603 bp, Unknown
  Obtained from environmental sample
  misc_feature (1)..(603): n is a, c, g, or t
atgttcgcttctctctggcgcctttcaattcaggatatggcccgcatgcgcgttaaagacgcttacggccttcaccgtgtcgtgtatgatctttttgatcctgtgcgtgacaacgccgctgagtccagcggcattctttatgccgaccggggaatgaaaaagggctggcgcgagattctcattgtttctgaccgcagcccccggcaagcctcctgcggcaggcttgaaacacgcgacattccggaaaagctgctcaatttcccagcgtaccgtttcgaaatcaccatcaaccccgtcaaacgcgacagcgcaagcggcaagcttgtgcctctgcgcacgcgcgaagcggtcagcgaatggtttgccgccaaagcgccggcttggggctttgagccggcggatctggaagtgcagtccctgaatgtggcccagtttgagaagaagggacagcaggtgacgctggggcaggccacactgaccggtcttttgcatgtgcgcgatgccgggcttttcgcgcacagcttcatgcgcggcatcggccggggcaaggctttcggctgcggcctgttgcaaataatacccatccacacattcaaccgataa

SEQ ID NO: 27000 - protein, 200 aa, Unknown
  Obtained from environmental sample
  misc_feature (1)..(200): Xaa is any amino acid
MFASLWRLSIQDMARMRVKDAYGLHRVVYDLFDPVRDNAAESSGILYADRGMKKGWREILIVSDRSPRQASCGRLETRDIPEKLLNFPAYRFEITINPVKRDSASGKLVPLRTREAVSEWFAAKAPAWGFEPADLEVQSLNVAQFEKKGQQVTLGQATLTGLLHVRDAGLFAHSFMRGIGRGKAFGCGLLQIIPIHTFNR

SEQ ID NO: 27001 - DNA, 705 bp, Unknown
  Obtained from environmental sample
  misc_feature (1)..(705): n is a, c, g, or t
atgaatacgccgcatctgcttttatggctgaaagcccctttgcagagctggggggtgaacgcgaaattcaaccggcggacgacattggactttccctcccgatccgccgtgctcggcctgctgtgcgccgctcttggcgcgggcggggagcaaaaggaactgctggccctgttcgccccattggggcaaacggtcattgcctacacccgcagggacaaaaaaggcaaggccgcccccgcgctgcaactgtgcgattttcatatggtcggcagcagttatgacgacaaagacccctggcagaagctgcacattcccaaaaccagcgaagggaagcccgctgtaggcggaggaacaaagctgacgtacaggtattacctgcaggacgcggcctttgccgtggccctggccgtgccgatagcggtgcggcgggagttggaagaggcccttgcctctccctgctgggatatcagtctgggcagaaagtgctgtgtgcccacggaatttgtgtatcagggcatgcacgcgtccatggatgccgcgcggcagcgcgcggaggaactggcgcaggcgaaacaatacgcggagaggttccgggtattggacggcgcgcatgatggcgagcagattattttgtcggatgtgccgctgcgatttggacctgacaagctgtatggcgagcgaacggtgacagtgaggacaacatga

SEQ ID NO: 27002 - protein, 234 aa, Unknown
  Obtained from environmental sample
  misc_feature (1)..(234): Xaa is any amino acid
MNTPHLLLWLKAPLQSWGVNAKFNRRTTLDFPSRSAVLGLLCAALGAGGEQKELLALFAPLGQTVIAYTRRDKKGKAAPALQLCDFHMVGSSYDDKDPWQKLHIPKTSEGKPAVGGGTKLTYRYYLQDAAFAVALAVPIAVRRELEEALASPCWDISLGRKCCVPTEFVYQGMHASMDAARQRAEELAQAKQYAERFRVLDGAHDGEQIILSDVPLRFGPDKLYGERTVTVRTT

SEQ ID NO: 27003 - DNA, 849 bp, Unknown
  Obtained from environmental sample
  misc_feature (1)..(849): n is a, c, g, or t
atggaaattatgattacaaatgcggagctaattcattttatacaaaatgccgctggttgggctattaccggggatacatcggaacaaacaatgtttattcttttcgggacaggggcgaatggaaaaagtacctttctgaatacgattatgaatctgttaggcgattatgccattgcaacgcctaccgagacttttatgcggaaaaatggcgaccatattaccaatgatatagcccgattaagagggacgaggtttgttacgacaacggaggcggattatggccggcggctgtctgaaccgctgattaaacagataacagggaatgataaaatgactgcccgcttcctgtacggagaattttttaactttaagcctactttcaagattttcatggctactaaccataagcctgttatcaaggggactgaccacggaatatggcggcgtattaaacttgtgccgttcattactcggattgatgaagaaaaacaggacaaacacctggaagaaaagctaatacaagaaagttcagggatattgaattggcttattatcggggctatgcgctggtgtacggaaggtttgaaaacgccgaaggttattatcagggcaacagatgaataccgtgcggaaatggacgttatagggaatttcatcaaagagcgatgtgtccaggagcaaggtaaatctatcagggcgagggaactttttaagtgctatcaggactggtgcgatgagcataacgaacacgcagtaagcgagcgttttcttggtttgaggttaaaggaaatggggcttgaacaaaaacggctgactgacgggcggtattggcaggggattgggctgtag

SEQ ID NO: 27004 - protein, 282 aa, Unknown
  Obtained from environmental sample
  DOMAIN (1)...(267): Poxvirus D5 protein-like
  misc_feature (1)..(282): Xaa is any amino acid
MEIMITNAELIHFIQNAAGWAITGDTSEQTMFILFGTGANGKSTFLNTIMNLLGDYAIATPTETFMRKNGDHITNDIARLRGTRFVTTTEADYGRRLSEPLIKQITGNDKMTARFLYGEFFNFKPTFKIFMATNHKPVIKGTDHGIWRRIKLVPFITRIDEEKQDKHLEEKLIQESSGILNWLIIGAMRWCTEGLKTPKVIIRATDEYRAEMDVIGNFIKERCVQEQGKSIRARELFKCYQDWCDEHNEHAVSERFLGLRLKEMGLEQKRLTDGRYWQGIGL

SEQ ID NO: 27005 - DNA, 849 bp, Unknown
  Obtained from environmental sample
  misc_feature (1)..(849): n is a, c, g, or t
ttggccgagctaagacgaacgggagagctggcaaagagtttcgcggatatcgtaaacgtcgtcaacctgcttaccacagaactgaaaaatttaagcaaagacataaaaaccgacggcgacacggacgtgaaattggactccgcccgtttctccggcgcttacagcgaagttgtcgaaagcataaacacattcaccgaaacccttcttgaagcccagaaatcggctctgctcaccgtgtctaccatgtttgagtcaaacccgcaaatcaatttgttgtttaacgacaagctcaaattaatcgactgtaatcccgaagcgtccagattcctgcatttcaaaacaaaagaagaaatgctggaaggttttcacgaccgcatgagcaaaatcattcctaaagtcagatccgacggacagccctcgatgtctttggaagaacagttaaaggtagccgcggatgatggcagagccaatttggagacggagattcattttgaagacggcattcgcagattggtcgtaaatttaagaaagataccgtataagggcagttttgccatagtcgcgtacgtattcaatataaccgaaatcttccagcgggaaatgcagttggcgcacgccatggaattaaacgagcttcagcttgccaaactgaatctggtagtgcaggggactaaaatcggcttgtgggatatggaagtggtaatggaagatcccgtaaacccgaacaacgtctttgtatggtcgaaagagttcaggaatatgttaggctacaccgacgagaaagatttccccaacatcttaagcagttggagcgacctcttgcaccccgaggacaggaaaggacgctga

SEQ ID NO: 27006 - protein, 282 aa, Unknown
  Obtained from environmental sample
  misc_feature (1)..(282): Xaa is any amino acid
MAELRRTGELAKSFADIVNVVNLLTTELKNLSKDIKTDGDTDVKLDSARFSGAYSEVVESINTFTETLLEAQKSALLTVSTMFESNPQINLLFNDKLKLIDCNPEASRFLHFKTKEEMLEGFHDRMSKIIPKVRSDGQPSMSLEEQLKVAADDGRANLETEIHFEDGIRRLVVNLRKIPYKGSFAIVAYVFNITEIFQREMQLAHAMELNELQLAKLNLVVQGTKIGLWDMEVVMEDPVNPNNVFVWSKEFRNMLGYTDEKDFPNILSSWSDLLHPEDRKGR

SEQ ID NO: 27007 - DNA, 729 bp, Unknown
  Obtained from environmental sample
  misc_feature (1)..(729): n is a, c, g, or t
gtgcttcgctacgctcgcaatgacaatgatcccagtgttcacgacgacggtgttgtgaaaaatattatatttatgattatgcctacgaacacattaaaagagatttgcggctgcatccacctgcataccacgttctccgacggcggctgcgactacgataccgtcatcaacgccgccggcgacgccggtctcgactacgtctgcgtaaccgaccacaacaacttcggcgggcgccacgccggctttgagggcctgcgcggcaacggcgtctttgtcgtggtcggatacgagcacaacgacgaacataaccaaaaccactacctggcgttcggggtcgaggaaatagcctacggtttgaccgacccgaaaacgtacgtagacgcgataagtaaaatgggcgggataggtttcttggcgcaccccgcggagaagcgcgattacattcggagcttgcctccatacccgtggacgcggtgggacgtggagggtttcgacggtatagagatttggaaccagatatcggattggatggagcggctgcgcggctggcacagtctgacgcgtctcttttcgcccaaccgaaagttaggcccgcccccgcccgagctgatggcgcgctgggaccggctgaacctgaagcgcttcgtgagcgccataggcggcgtggacgcccacagccgcaaattcaaatggggccccttcggctgcgtcatttctcggccgatctga

SEQ ID NO: 27008 - protein, 242 aa, Unknown
  Obtained from environmental sample
  DOMAIN (37)...(228): PHP domain
  misc_feature (1)..(242): Xaa is any amino acid
MLRYARNDNDPSVHDDGVVKNIIFMIMPTNTLKEICGCIHLHTTFSDGGCDYDTVINAAGDAGLDYVCVTDHNNFGGRHAGFEGLRGNGVFVVVGYEHNDEHNQNHYLAFGVEEIAYGLTDPKTYVDAISKMGGIGFLAHPAEKRDYIRSLPPYPWTRWDVEGFDGIEIWNQISDWMERLRGWHSLTRLFSPNRKLGPPPPELMARWDRLNLKRFVSAIGGVDAHSRKFKWGPFGCVISRPI

SEQ ID NO: 27009 - DNA, 324 bp, Unknown
  Obtained from environmental sample
  misc_feature (1)..(324): n is a, c, g, or t
atgaacgaaaccgtcaaagccgaactggacaaaatcgtaagcgccttagccggaacggggctcgtgaccaaggtcatactcttcggctcttacgccaagggcgaggagaccccgaggagcgacattgatttgtgcgtcctgacgacagtaaaggacaggcgtccgttagacgtcggaatagaattgctggtgaaactgacagatgtacaagaaaccgcgttagatttgattccgttcaatcaagacgaattttccgcccgagcaaagtgtccgggcacattccaaaacgacataatgaagcatggagtcgtgttatatgggtga

SEQ ID NO: 27010 - protein, 107 aa, Unknown
  Obtained from environmental sample
  DOMAIN (2)...(105): Nucleotidyltransferase domain
  misc_feature (1)..(107): Xaa is any amino acid
MNETVKAELDKIVSALAGTGLVTKVILFGSYAKGEETPRSDIDLCVLTTVKDRRPLDVGIELLVKLTDVQETALDLIPFNQDEFSARAKCPGTFQNDIMKHGVVLYG

SEQ ID NO: 27011 - DNA, 918 bp, Unknown
  Obtained from environmental sample
  misc_feature (1)..(918): n is a, c, g, or t
atgaagactcgccaacgcggacggcaaattgagtttgacgtggtttccaatccagaattcctgcgcgaaggttccgccgtatatgattttacccatcccgaccgggtgatcatcggcagcgggagcgaacgggcgaggaaaataatgaaggacgtgtaccgttccctttacctgaatgaaactccctatatagaaaccagccttgaatcggcggagatgataaagtatgcgtctaacgcttttctggccgtaaaaattactttcataaacgagattgccaatctctgtgaaaaaaccggcgccaatgtaaaggatgtttcccgcgcaatgggtaaagacggccgaatcggagccaagtttctgcaccccggcccgggttacggcggttcctgttttcccaaggataccagggctcttgcgaaaatcggcagggacaatgatgaagtgcagcgtattgtagaaacggctatagaaacaaatgaacggcaaaaaatccgcgccgcccaaaagatagaaactattcttggcactcttgatgggaagaccgtcgccatgctcggcctcgcgttcaaacccaacaccgatgatatgcgggaatccccgtcaatcgccatctgcaattatctcgcgggccgcggcgcanagctccgtctgtacgatcccgccgcgatgaaagaagccgtgtggcgtttggcaaatgtaaaagattctttgtattttgccgcagatgaatatgacgcggcgcgggacgcgcacgccctgataatcgtgacggagtggaatcagttcaggaaccttgatctttcaagaatatataaatcgctcatttcaccttattttatagatcttcgcaacatttacaaaccggaagaagcggaaacgccggatttaaaatattttgggattggcggacaatga

SEQ ID NO: 27012 - protein, 305 aa, Unknown
  Obtained from environmental sample
  DOMAIN (184)...(289): UDP-glucose/GDP-mannose dehydrogenase family, UDP binding domain
  misc_feature (1)..(305): Xaa is any amino acid
MKTRQRGRQIEFDVVSNPEFLREGSAVYDFTHPDRVIIGSGSERARKIMKDVYRSLYLNETPYIETSLESAEMIKYASNAFLAVKITFINEIANLCEKTGANVKDVSRAMGKDGRIGAKFLHPGPGYGGSCFPKDTRALAKIGRDNDEVQRIVETAIETNERQKIRAAQKIETILGTLDGKTVAMLGLAFKPNTDDMRESPSIAICNYLAGRGAXLRLYDPAAMKEAVWRLANVKDSLYFAADEYDAARDAHALIIVTEWNQFRNLDLSRIYKSLISPYFIDLRNIYKPEEAETPDLKYFGIGGQ

SEQ ID NO: 27013 - DNA, 987 bp, Unknown
  Obtained from environmental sample
  misc_feature (1)..(987): n is a, c, g, or t
atgcctaacgccggtttcccgaatgtacgggaagctctggcaaaaaaaatctcaaaagaacagaatgtaaatattgacggctctcatgtaataatggcggccggagcggcaggcgctttaaacacggttttcaaggcaatttgcaatcccggcgatgaaattatagttacgcgcccttatttcatggaataccgcgcatacgcggccaatagtcaggcaaaacttgtcgaagtaaaagcgcttgacgatttcaatttggatattaacgcaatcggcgcggtattaaatgaaaagacagccgccgtccttataaattcgcccaataatcctacaggcaaagtatattccgcatccgatctttccgctctttcatcactgcttacagactttggcaaaaaatcggggcggtttccgtatcttgtttcggacgaaccctaccgtgaaatcgtgtatggatgtgatgttccgccggtattaagctgttacagcgaatcaattgttgtcagttcctattcaaaaaacctctctcttgcgggagagcgtataggctatattgcggtaagccccgctatttgcggcaaagacgaaattttcaacgcgcttgtctactgcgcaagggttcttggttttgtaaatgcgccggctcttatgcagcgaattgtagccgagcttacggaggaacgtgtagatattgacgtgtacgcgcaaagaaaagacgcttttatgaaagcgttagacgaaaccgggnatgaatacgctgttccgcagggggcgttctatcttttctgcaaagtcccgaaaagcaaaacaggcaggcaggaagcggacgataaggcgtttacggaacatcttaaaaagcatttaatcttaggcgtgcaaggttcgggcttcggaaaatccggttggctgcgtttcgcgtattgcgtagacgaaaaaattatcggcgcgtcacaagacgcgtttattaaagcgatggaaacatggtaa

SEQ ID NO: 27014 - protein, 328 aa, Unknown
  Obtained from environmental sample
  DOMAIN (5)...(227): Beta-eliminating lyase
  misc_feature (1)..(328): Xaa is any amino acid
MPNAGFPNVREALAKKISKEQNVNIDGSHVIMAAGAAGALNTVFKAICNPGDEIIVTRPYFMEYRAYAANSQAKLVEVKALDDFNLDINAIGAVLNEKTAAVLINSPNNPTGKVYSASDLSALSSLLTDFGKKSGRFPYLVSDEPYREIVYGCDVPPVLSCYSESIVVSSYSKNLSLAGERIGYIAVSPAICGKDEIFNALVYCARVLGFVNAPALMQRIVAELTEERVDIDVYAQRKDAFMKALDETGXEYAVPQGAFYLFCKVPKSKTGRQEADDKAFTEHLKKHLILGVQGSGFGKSGWLRFAYCVDEKIIGASQDAFIKAMETW

SEQ ID NO: 27015 - DNA, 786 bp, Unknown
  Obtained from environmental sample
  misc_feature (1)..(786): n is a, c, g, or t
atgatattaatggctgtcctggcacctttggtcacacagaataatccctatgtttccctagagaacgaagctggaaagatcattaagaatatgtccccaaaggagtcaaagacattcctggggaccgacaacctgggcagggacatttacagccgagtggtttactcatcccgggtttcgttgagtgtgggtatagtagccgtcagcatttctacggccatcggtgttatattgggctcactggctggttattttggtaaatggattgacctgtttataatgcgtgttgtggacgtggtgtactgtttcccggtgatgtttttagtaatcataatagccacgtttctgaagcccagtatttataacatcatgatggtcatcggtctctgcaactggacagggtcagcccgttttgtgcgcggagagatattacgagtaagggaacttgaattcgtacaagcttcggtttcgctgggggctaccagcgcacgcataatattcagccacgtcctgcctaacatcaccgctccaataatagtggaatccacgatacagatggccagggccatcctcaccgaagcggccctaagctatttaggcgtgggagtgcagatgccgacagcaagttggggcaatatgctcatggacgccaacaacatagccacacttaccttgcgaccctggcagtgggtaccgccgggtttgtgcatcctgttggcggtgttgagcatcaactttatcggcgacggcttgagggatgccttcgatgccagacagaggaagtga

SEQ ID NO: 27016 - protein, 261 aa, Unknown
  Obtained from environmental sample
  DOMAIN (57)...(261): Binding-protein-dependent transport system inner membrane component
  misc_feature (1)..(261): Xaa is any amino acid
MILMAVLAPLVTQNNPYVSLENEAGKIIKNMSPKESKTFLGTDNLGRDIYSRVVYSSRVSLSVGIVAVSISTAIGVILGSLAGYFGKWIDLFIMRVVDVVYCFPVMFLVIIIATFLKPSIYNIMMVIGLCNWTGSARFVRGEILRVRELEFVQASVSLGATSARIIFSHVLPNITAPIIVESTIQMARAILTEAALSYLGVGVQMPTASWGNMLMDANNIATLTLRPWQWVPPGLCILLAVLSINFIGDGLRDAFDARQRK

SEQ ID NO: 27017 - DNA, 654 bp, Unknown
  Obtained from environmental sample
  misc_feature (1)..(654): n is a, c, g, or t
atgctggaattggcgcgtaataacggcgttgagaaatttttgtatgtcagttccggcgaggtgtacggcgtgcttgacggcagcttgaatatcatcgcggaatcatatacaggtaacgtagacataaccaacgtgcgttcatgttatgccgagagcaaaagaatgggtgaaaacatgtgcgtatgctggtcatatcaatacggatttcatgttaatatgttgaggctgtctcatacctacggcccgggcgttgaattggacgatggacgcgtattcggtgattttgtaaaaaatattgtacgtaatgaggatatcgtactaaactctgacggtaaggccaaaagaacttttttatatattagcgacatgatagtggggctttttacggttttattcaacggcgaaaacggacacgcctacaatatcgccgctgacacggaaacagaaattttggaattggcttcaatgctatgcggactgtatccgcaaaagaaattatctgtaaaatttaatgaatcgattgcgcctgccggttatatacgttctacgtcggtaggagcgatgttatcaacggaaaaactgaaacaattaggttggaaacaaaccattccgatagagcatggattccgccgcatgattgaaagttattcttag

SEQ ID NO: 27018 - protein, 217 aa, Unknown
  Obtained from environmental sample
  DOMAIN (1)...(143): NAD dependent epimerase/dehydratase family
  misc_feature (1)..(217): Xaa is any amino acid
MLELARNNGVEKFLYVSSGEVYGVLDGSLNIIAESYTGNVDITNVRSCYAESKRMGENMCVCWSYQYGFHVNMLRLSHTYGPGVELDDGRVFGDFVKNIVRNEDIVLNSDGKAKRTFLYISDMIVGLFTVLFNGENGHAYNIAADTETEILELASMLCGLYPQKKLSVKFNESIAPAGYIRSTSVGAMLSTEKLKQLGWKQTIPIEHGFRRMIESYS

SEQ ID NO: 27019 - DNA, 345 bp, Unknown
  Obtained from environmental sample
  misc_feature (1)..(345): n is a, c, g, or t
atgacaacgctcaacatgctcggcaagctgtgtccaataccggtggtcgaggcgaaaaaggccctgttacaggggcaggatgttacggtgctggttgacaacagcatcgcggtacagaacctggaaaaaatggccgccggattggggtatggtttttcctatgaacaaaaaggagaagctgagtacgccgtgacaattattgtaaaaaactcaggcgccggggccggcttcgtgtcaggtgatgcggccggaggccatgcccccttgagcgtcaagtggccaaatattccttattacgggcgatcaaataggcataagcgcccgaggaagcgggaaaaaaattaa

SEQ ID NO: 27020 - protein, 114 aa, Unknown
  Obtained from environmental sample
  DOMAIN (1)...(70): SirA-like protein
  misc_feature (1)..(114): Xaa is any amino acid
MTTLNMLGKLCPIPVVEAKKALLQGQDVTVLVDNSIAVQNLEKMAAGLGYGFSYEQKGEAEYAVTIIVKNSGAGAGFVSGDAAGGHAPLSVKWPNIPYYGRSNRHKRPRKREKN

SEQ ID NO: 27021 - DNA, 507 bp, Unknown
  Obtained from environmental sample
  misc_feature (1)..(507): n is a, c, g, or t
gtgggtattgtcatggccgcccaaagagtcggcgcggcaagcgctgacgccatgcaaaaggccgtgaacagcatgagaaggctgaaccgctatgccgcggaaaaaatgcgcggatttaatattagcgcctgtactgacgtgacgggtttcgggctgctctgccatttattggaaatgtgcggcaattcagcctcagcggagctttggcctgaagaactgcctattatcaatgaagccgcggattacgcgaatgattttctgcttacggccgcggcccagcgcaaccggaatcattttggcaaacggggacaggcggataaactgcccttcgccgtacaggaattaatgtttgatccccaaacttcaggagggctgttgatctgcgttgatgccgagcagtcccaacaactgttagacgctatacaaaaagacgatcccgacgcgcggataatagggcgtattataaatcgtcaggatgaaaaaatattatttggaggtaagaaatga

SEQ ID NO: 27022 - protein, 168 aa, Unknown
  Obtained from environmental sample
  DOMAIN (1)...(165): AIR synthase related protein, C-terminal domain
  misc_feature (1)..(168): Xaa is any amino acid
MGIVMAAQRVGAASADAMQKAVNSMRRLNRYAAEKMRGFNISACTDVTGFGLLCHLLEMCGNSASAELWPEELPIINEAADYANDFLLTAAAQRNRNHFGKRGQADKLPFAVQELMFDPQTSGGLLICVDAEQSQQLLDAIQKDDPDARIIGRIINRQDEKILFGGKK

SEQ ID NO: 27023 - DNA, 825 bp, Unknown
  Obtained from environmental sample
  misc_feature (1)..(825): n is a, c, g, or t
atgtggatttttttgaccgctttaaaaagttcggaatcagattcccccggagagaaagaaatgaatatcgcgttaattggcttcggcaaaatgggaaaaatgatagacaaaatcgcntgcgctcaggggcataaattttccgccgttgtagaccctttgnccgcggacgctcaggcgggaataaaaatatcaaaaacaatcgcggaagcggagcttacttccgttgacgcggctatcgaatttacccagcctgatacggcggtaacaaatatcctcgcccttgcggaaagaaaaatcccgatagttgtgggaacaaccgcgtggcaggcgcgtcttgacgaggtaagcaaagcggtagaaagtgcggacacttctcttatttgggcatcaaacttttcgattggagtaaatatgttttatcgcatcgcgtggtacgccgcgcagttggcgaataatttttcagagtacgacataggcggctttgaggctcatcacaataaaaaaatggacagcccttcgggaacggcaaaaactctggctgagggcgtgctttccaaaatcgacaggaaaaagaaaattgtatgggagacattgaaccgcaagccggaagccgatgagattcactttccaagcctgcgtatgggccatgttcccggcactcacagcttgttttntgattcgcaagccgatacaatcgaaattacccacactgcccgcagccgcgaaggtttcgcgtctggcgcggtgcttgcagctctttggctaacagcgaaggagcggcgcggaatttttacgatggacgatatgctgaaggagtatgtatga

SEQ ID NO: 27024 - protein, 274 aa, Unknown
  Obtained from environmental sample
  DOMAIN (21)...(132): Dihydrodipicolinate reductase, N-terminus
  misc_feature (1)..(274): Xaa is any amino acid
MWIFLTALKSSESDSPGEKEMNIALIGFGKMGKMIDKIACAQGHKFSAVVDPLXADAQAGIKISKTIAEAELTSVDAAIEFTQPDTAVTNILALAERKIPIVVGTTAWQARLDEVSKAVESADTSLIWASNFSIGVNMFYRIAWYAAQLANNFSEYDIGGFEAHHNKKMDSPSGTAKTLAEGVLSKIDRKKKIVWETLNRKPEADEIHFPSLRMGHVPGTHSLFXDSQADTIEITHTARSREGFASGAVLAALWLTAKERRGIFTMDDMLKEYV

SEQ ID NO: 27025 - DNA, 858 bp, Unknown
  Obtained from environmental sample
  misc_feature (1)..(858): n is a, c, g, or t
atgtctggcacgttcaaagacctgcaagtcccgcccacgttggtatcgttcgccctcgctccggtggacgtcactagggtaatatcgcctgagtttaagcgggtcgggagcgccgtggtctttgtgtctatatgggttgacgaagtgggaatgcctgattttgaggtgataaacagatgctactccgcggtacacaagggaattgtagacgggcagattctcgcggttcacacagtggggcgcggcggtatctctgaggccatggccaagatgtgcttcggtaaccgcatcggtttcaagatcgacgagggcgtcaatccggcggaactctttaaacctgactacgccggtcttgttgttgagctggacaaaagagtaaacacggatagaaacgtactcggcatcggcgaaaattgcaccattctagggagtacgatagaggataaaaagattgtataccataatgtgcaaattgatattgacgaattgtacgagaagtgggatggtgtgttggatggcgttttcccggcgagggcggggacgggcgagtcgggcgataacgtatacgagaaatttttgaacggtattaatatatatgcaaataatcatccgtataccaagaaagcgaatataaaggcggcgaagccgcgtgtgcttatacctatattccccggcataaactgcgagtacgacagcgcccgcaagtttgccaaagcgggagcggagtgcgattttttcgtctttaaaaacatncatcccaatgacatagatgagtcggtaaagataatctctgctcagatagcgaacactcaaatcctgatgatccccggcggcttcagcgccggagacgaagtctga

SEQ ID NO: 27026 - protein, 285 aa, Unknown
  Obtained from environmental sample
  misc_feature (1)..(285): Xaa is any amino acid
MSGTFKDLQVPPTLVSFALAPVDVTRVISPEFKRVGSAVVFVSIWVDEVGMPDFEVINRCYSAVHKGIVDGQILAVHTVGRGGISEAMAKMCFGNRIGFKIDEGVNPAELFKPDYAGLVVELDKRVNTDRNVLGIGENCTILGSTIEDKKIVYHNVQIDIDELYEKWDGVLDGVFPARAGTGESGDNVYEKFLNGINIYANNHPYTKKANIKAAKPRVLIPIFPGINCEYDSARKFAKAGAECDFFVFKNXHPNDIDESVKIISAQIANTQILMIPGGFSAGDEV

SEQ ID NO: 27027 - DNA, 681 bp, Unknown
  Obtained from environmental sample
  misc_feature (1)..(681): n is a, c, g, or t
ttgggtgggcgcatgtttttttacctccccccggaacaatggaagccgccctttggccttgacggcccggaagcgcggcatgtcaccaaggtattgcgcctggggccgggcgcggaattgcgcctgctcgacggcgcgggccgcgagggcgtgttccgcgtggcggctgttcgcaaggaccgcgtggagcttgccctgctttccgaaacaactcatgccgcgcccgtatgccgggccattgtggcggttgcctggagcaaggccgtccggcgcggcttttttttggaaaaagccgtggaactcggagccgccgagttgtggtgctggcaggcgcgacgcagccaggggcgtatgccggacgatgtgcgggaaaattggcagggcgggcttgtggccggattgaagcaatgcggcaatccctacctgcccgtggtgcgcgccttgttcgggggggcgcgcgagcttgcggcccgtgcgccggagcagccgcgtatcctgttgcaggaaccgggcgaattttgcccgaggatcgatcttgcccaagtgggccggaaaggcgatactgtctatgtcatcgggcctgagggcggtttcgacccgcaggaaagggagacgctgatcaaggcgggctgcgtgccggcaagcctcggcgaacgcccctgcgcggaaacctgtccataa

SEQ ID NO: 27028 - protein, 226 aa, Unknown
  Obtained from environmental sample
  DOMAIN (18)...(218): Protein of unknown function (DUF558)
  misc_feature (1)..(226): Xaa is any amino acid
MGGRMFFYLPPEQWKPPFGLDGPEARHVTKVLRLGPGAELRLLDGAGREGVFRVAAVRKDRVELALLSETTHAAPVCRAIVAVAWSKAVRRGFFLEKAVELGAAELWCWQARRSQGRMPDDVRENWQGGLVAGLKQCGNPYLPVVRALFGGARELAARAPEQPRILLQEPGEFCPRIDLAQVGRKGDTVYVIGPEGGFDPQERETLIKAGCVPASLGERPCAETCP

SEQ ID NO: 27029 - DNA, 423 bp, Unknown
  Obtained from environmental sample
  misc_feature (1)..(423): n is a, c, g, or t
gtgcagcgctgggtgtcgcttatgttcggcgatgcgagctgcgaggtgcatctggcggatgcgcgggtgcatgtgtgcatgactgcgggcgaagattccggcatgctgatcgggcgtgagggccagaccctcgccgccgtgcagtatcttgcctcgcgtatcgtttcgcgcggcatgggcgccgccgtgcgcgtcaatctggacgccggggactaccggcagcgccaggacgacaaattgcgggagctggccctgcatctggcggccaaggtgaagaacacgggccggccctgttccacccgtcctttaagctcctatcaccgccgcatcatccacctggcgctgcaagaggatgaacaggtacagacccgcagcacgggagacggcgccctgaagcgggtggtggtgcagcgccggcgttag

SEQ ID NO: 27030 - protein, 140 aa, Unknown
  Obtained from environmental sample
  DOMAIN (84)...(139): R3H domain
  misc_feature (1)..(140): Xaa is any amino acid
MQRWVSLMFGDASCEVHLADARVHVCMTAGEDSGMLIGREGQTLAAVQYLASRIVSRGMGAAVRVNLDAGDYRQRQDDKLRELALHLAAKVKNTGRPCSTRPLSSYHRRIIHLALQEDEQVQTRSTGDGALKRVVVQRRR

SEQ ID NO: 27031 - DNA, 759 bp, Unknown
  Obtained from environmental sample
  misc_feature (1)..(759): n is a, c, g, or t
atgaacaaaacagaaacgctggatattttacaaaaaataaaaaacggtgatatatcaccagaagacgctttatcaaaattgtgtacccaaccatttgaggatttgggatacgcaaaactggaccatcaccgtgaattgcgaaagggcattccagaagttatatacggcactggaaaatcatcggagcaaataaatggcatagcaaaagcaatgctcgctaaagggcaggatttgatactgataactaggctgcaatcgaaaaaagccgaagtagttcaaaaaaacttgcccttgctatactacgaaacagcacagattggagtaataggcgatatacctaaaccaaatggcataggcaagattgtagtcgccacaggcggcacaagcgatataccggtggcggaagaagctgctatcacggcagaagttctcggtaatgaggttgttcgtatatatgatgtgggtgttgcgggaatacataggctgctctctaagatggacgatattatgaatgcgcaagtcattatttccattgcagggatggaaggtgcattaaccagcgttataggcggtcttgtcgattgtccggttatcggagttcccacaagcgtaggttatggggcatcattcaagggaataactgccttgctgtctatgctcaattcctgtgcgagcggcgtgagcgtggttaatattgataacggttttggagctggatatttagcgagtataataaaccatcaaaagggagttaaatga

SEQ ID NO: 27032 - protein, 252 aa, Unknown
  Obtained from environmental sample
  DOMAIN (119)...(251): AIR carboxylase
  misc_feature (1)..(252): Xaa is any amino acid
MNKTETLDILQKIKNGDISPEDALSKLCTQPFEDLGYAKLDHHRELRKGIPEVIYGTGKSSEQINGIAKAMLAKGQDLILITRLQSKKAEVVQKNLPLLYYETAQIGVIGDIPKPNGIGKIVVATGGTSDIPVAEEAAITAEVLGNEVVRIYDVGVAGIHRLLSKMDDIMNAQVIISIAGMEGALTSVIGGLVDCPVIGVPTSVGYGASFKGITALLSMLNSCASGVSVVNIDNGFGAGYLASIINHQKGVK

SEQ ID NO: 27033 - DNA, 681 bp, Unknown
  Obtained from environmental sample
  misc_feature (1)..(681): n is a, c, g, or t
gtggaacgggataacagtttcaatatctattttatagatttgcaaatgccgggtatggacggcctgaagctgtcacatgaattaaaagcgcggatatctgaagattcagaagtaattataatgaccgccaatgaatggactatcggcgcggaagaaaccaagaatacgagggttgataaattcctttccaagcctctgttcccgcctgttatagaggatgttataaatgaatatctttctgaaaaagaacaggaagaggtgaatgtacaaagctttgacggggtgtatgaaggccgtagggtattgctggcggaagatgtggaaataaaccgtgaaattttaataacgctgcttgaacctacgcttttgaaagtggactgcgctgaaaacggaaaagaggccgtcagaatgttttccgaagcgccggaaaagtacgacatgatctttatggacgtacagatgcctgaaatggacggttatgaggcgacacggcgcatcagggcttttgaggcggaacgcaattctgcctcacggccaaagggtattccgataatagcaatgaccgccaatgtgtttcgcgaagatatagaaaaatgcctggaagccggaatgaacgatcacatcgggaaaccgttaaatttagatatagttttgggaaagctccgtatttacttaacttag

SEQ ID NO: 27034 - protein, 226 aa, Unknown
  Obtained from environmental sample
  DOMAIN (99)...(222): Response regulator receiver domain
  misc_feature (1)..(226): Xaa is any amino acid
MERDNSFNIYFIDLQMPGMDGLKLSHELKARISEDSEVIIMTANEWTIGAEETKNTRVDKFLSKPLFPPVIEDVINEYLSEKEQEEVNVQSFDGVYEGRRVLLAEDVEINREILITLLEPTLLKVDCAENGKEAVRMFSEAPEKYDMIFMDVQMPEMDGYEATRRIRAFEAERNSASRPKGIPIIAMTANVFREDIEKCLEAGMNDHIGKPLNLDIVLGKLRIYLT

SEQ ID NO: 27035 - DNA, 822 bp, Unknown
  Obtained from environmental sample
  misc_feature (1)..(822): n is a, c, g, or t
ttgctccgtaccacaaacgccgtacgtgattctatatatgcttcaggcaatcaagtccttatcgctcaatttgaagaattaggtcgtctacggcaacagatcagcgcattacggcaaaaagaaggaaataacgaaacatacatcaaaagtcttgaagataaagccgaagctttggacaaatctttaatgcaatcttccgccgcttttagggaattaaaagcggacttggctatcaactggcaaagcgtacaaaaaaaccttcaaaaaaatgaagccgcgattgaatttgtctcttttcaaatctacgacaaaaaatggacaaacaccacccaatacgcagtccttgtcctgcgtcccggcatggccgcgcctacatgggttccgttatgtgaagaaagcacgctaacggagctttttgccaaactcgaaggcaagagaccgcaggagcaggcgcggattctctacgacgaatatggttccgccctttacaacgcaatttggcggcctctggaaaaagagatgaaaggcgttactactattttttactcaccttccggcttgttgcacaaagtaccatttagcgcaattccggtagatggaaaaacaaggctcatggacaaatacagtcttaacatggtttccagtacgcgcgaagttacatatcgcaacaaaaaggcggcgaaattaaactccgctgttgtttacggcggacttgattacactgttgacgcggatacaatgaacaaagacgcgctggcgtataacgtaccggggacgcgttccggttcacagagagacggaatgtttacgtcgataccgtag

SEQ ID NO: 27036 - protein, 273 aa, Unknown
  Obtained from environmental sample
  misc_feature (1)..(273): Xaa is any amino acid
MLRTTNAVRDSIYASGNQVLIAQFEELGRLRQQISALRQKEGNNETYIKSLEDKAEALDKSLMQSSAAFRELKADLAINWQSVQKNLQKNEAAIEFVSFQIYDKKWTNTTQYAVLVLRPGMAAPTWVPLCEESTLTELFAKLEGKRPQEQARILYDEYGSALYNAIWRPLEKEMKGVTTIFYSPSGLLHKVPFSAIPVDGKTRLMDKYSLNMVSSTREVTYRNKKAAKLNSAVVYGGLDYTVDADTMNKDALAYNVPGTRSGSQRDGMFTSIP

SEQ ID NO: 27037 - DNA, 360 bp, Unknown
  Obtained from environmental sample
  misc_feature (1)..(360): n is a, c, g, or t
atgaaacctttcggcagctcaaaaaccaaagtcgaagagtacccgctatttcctttaagagagcttgttatttttccccagacaataatatcagtttttgttacctacaaatcgggcattgccgccatagaagaggcccttaaaggagatatgcggctttttgcagtatgcttaaaaagtgccgagactgccgcttcaggccaaaagcctgaagaaatatgggatgccgggacagtggtacgtattgtccagaatttaaggctcccagacaacaccttccgggtggttcttcaggnggaataccgggcgctcctggtatcngtaaatcagaaaaataatttccaccctggcaaaggttga

SEQ ID NO: 27038 - protein, 119 aa, Unknown
  Obtained from environmental sample
  misc_feature (1)..(119): Xaa is any amino acid
MKPFGSSKTKVEEYPLFPLRELVIFPQTIISVFVTYKSGIAAIEEALKGDMRLFAVCLKSAETAASGQKPEEIWDAGTVVRIVQNLRLPDNTFRVVLQXEYRALLVSVNQKNNFHPGKG

SEQ ID NO: 27039 - DNA, 921 bp, Unknown
  Obtained from environmental sample
  misc_feature (1)..(921): n is a, c, g, or t
atgaaggcagtgcagaaatcgtttgcccaatacgcggagtttacaaaaaagatcggcacagaaattctctccgctgtggaaaaaaccgaaaacccggaaaaacttgtcaacatcatcgccaacgccatgtcgataaaagcggacagaaagatcggccttatccgcgtcgcggatcccgcttcaaggcttgaaaaacttcttgaaacccttgaactggaaaacgaaattttcggaattcaaaaaaatatttccggcaaggtaaaaagccggatggataaaaaccagcgcgactatattcttcacgagcagctcaaggaaataaacagagagcttgggaaggataccacagaagatgagtttgccgatctggaacgtagtattgaggaacgccgtccgggcgaggaagtgctggccaaggcccggaaagaaattgccagactcagaaaacttcaggtgttttctcccgaagccggagtactaaggggctacctggaatggatcaccgatcttccctggagcgaatacagcgccgacacatcagacctctcggaagccgagaaaattctcaacgaagatcattacgaaatgaaaaaggccaaggaaaggatcattgaatttatcgcggtcaggcagttgaacactcaagcccttatccagacggaaaatgctgctgtgatttctcaagatcagaaatccccggctccccttggtataaaggggccgatactctgctttgtcgggcctccgggaacgggcaaaaccagcctcggcaaatccgtcgccagggcgctgggacgcanatttgtgcgcatctcccttggcggcgtccgggacgagggcgaaatacggngccacagaaaaacatacgttggcgcattgccgggaaaattatccagtcaatgcggaagggccgaaacatga

SEQ ID NO: 27040 - protein, 306 aa, Unknown
  Obtained from environmental sample
  misc_feature (1)..(306): Xaa is any amino acid
MKAVQKSFAQYAEFTKKIGTEILSAVEKTENPEKLVNIIANAMSIKADRKIGLIRVADPASRLEKLLETLELENEIFGIQKNISGKVKSRMDKNQRDYILHEQLKEINRELGKDTTEDEFADLERSIEERRPGEEVLAKARKEIARLRKLQVFSPEAGVLRGYLEWITDLPWSEYSADTSDLSEAEKILNEDHYEMKKAKERIIEFIAVRQLNTQALIQTENAAVISQDQKSPAPLGIKGPILCFVGPPGTGKTSLGKSVARALGRXFVRISLGGVRDEGEIRXHRKTYVGALPGKLSSQCGRAET

SEQ ID NO: 27041 - DNA, 450 bp, Unknown
  Obtained from environmental sample
  misc_feature (1)..(450): n is a, c, g, or t
gtgttggttcgtggtaaaaatataaaatattggtatttgttgataaacttttacttcttttttcctgatgtgctttttgaagtcttgtttttatcagtctgctttttctttgtacgcaaaatcccgttaggggacagaatcccaaggcctcccangcgttgtctaaaaatgagctttagggattttttaatgtcggcgttcaactcttcccagtcttccctgttgtcggccgggagcagaacttcttccattccatttctgattgccgcaaggagcttttcctttaaccctcctatgggaaggattcggccggtaagggtaagctctccggtcatggcgaagcccggctttgggggaacctggcagagggttgaaagaagcgaggctgccagggttatgcccgctgacgggccgtctttagggattgcgccttctggaacgtggatgtga

SEQ ID NO: 27042 - protein, 149 aa, Unknown
  Obtained from environmental sample
  misc_feature (1)..(149): Xaa is any amino acid
MLVRGKNIKYWYLLINFYFFFPDVLFEVLFLSVCFFFVRKIPLGDRIPRPPXRCLKMSFRDFLMSAFNSSQSSLLSAGSRTSSIPFLIAARSFSFNPPMGRIRPVRVSSPVMAKPGFGGTWQRVERSEAARVMPADGPSLGIAPSGTWM

SEQ ID NO: 27043 - DNA, 888 bp, Unknown
  Obtained from environmental sample
  misc_feature (1)..(888): n is a, c, g, or t
ttggaggagaatgggcttgcaaaagcaaaaatatctttcaaagacgaagcaatcctagaaataatccggcactggacaatggaatccggcgttcgcagccttgaaagggaaatagcccgatgcgtaaggcgcgtcgcgaaagcggcggtgaacaaggaatacggcaaaagcgctgaaaagcctatcgaaaattataaaaaagctatcggaaaggaagatttggaaaagcttttaggaaggcgaaaatataaaaacgacgtggtgtttaaggaagcccgcatcggagtttcctacgggcttgcttggactgaaacaggcggcaccatgctccctgtcgaaaccatccgctttgaaggcagcggggaaaacatcataaccggcaaccttggagacgtaatgaaggagagcgccagaatcgcaatttcctttttacgcagcgtccaggatcgctacaatttcctggtaaaaaacatggcaaaaaccgattttcacatccacgttccagaaggcgcaatccctaaagacggcccgtcagcgggcataaccctggcagcctcgcttctttcaaccctctgccaggttcccccaaagccgggcttcgccatgaccggagagcttacccttaccggccgaatccttcccataggagggttaaaggaaaagctccttgcggcaatcagaaatggaatggaagaagttctgctcccggccgacaacagggaagactgggaagagttgaacgccgacattaaaaaatccctaaagctcatttttagacaacgcntgggaggccttgggattctgtcccctaacgggattttgcgtacaaagaaaaagcagactgataaaaacaagacttcaaaaagcacatcaggaaaaaagaagtaa

SEQ ID NO: 27044 - protein, 295 aa, Unknown
  Obtained from environmental sample
  DOMAIN (68)...(271): Lon protease (S16) C-terminal proteolytic domain
  misc_feature (1)..(295): Xaa is any amino acid
MEENGLAKAKISFKDEAILEIIRHWTMESGVRSLEREIARCVRRVAKAAVNKEYGKSAEKPIENYKKAIGKEDLEKLLGRRKYKNDVVFKEARIGVSYGLAWTETGGTMLPVETIRFEGSGENIITGNLGDVMKESARIAISFLRSVQDRYNFLVKNMAKTDFHIHVPEGAIPKDGPSAGITLAASLLSTLCQVPPKPGFAMTGELTLTGRILPIGGLKEKLLAAIRNGMEEVLLPADNREDWEELNADIKKSLKLIFRQRXGGLGILSPNGILRTKKKQTDKNKTSKSTSGKKK

SEQ ID NO: 27045 - DNA, 708 bp, Unknown
  Obtained from environmental sample
  misc_feature (1)..(708): n is a, c, g, or t
ttggtgttcatttctgaccggaatatgcagagcaacgagattcctgcgatgagggagcttatagggcttttaaagatacagggctgcatgatagtcgccgacgcgcttaactgccagaaagaaacggctaaagcggtaattgaaggcaagggggactatttattttcggttaaggacaaccagcaggtattgaaggaagatatagaaggctatgttcaggacaagcatttacagaaaacaatggacagggccgtaacggtcgaaaaaacgagcggcagggtcgaacggaggaccgcttatacaagctgcgacataggatggctttccggaaaggaggaatgggagggcctggcttgcattggggctgtgaacactcaagtttccagcaaaaagggacagacaaacgaatggcattattacatcacaagccgcagcctgacggcacaggaactgctcaggcacgcccgtttggaatggtcagtagaaacaatgcactggctgcttgacgtacatttcgatgaggatttctgccgtgttgaggaccggaacgtccagcaaaatttgaacattgtccgcaagatcgcgttaaacacgataaaaggctacaaaaacaggacggcttctaaacgcccaatttccaaactcatgtttgattgtttacttgaacccggaaatatcctgtctgttttggctgtcaatgaaaattga

SEQ ID NO: 27046 - protein, 235 aa, Unknown
  Obtained from environmental sample
  misc_feature (1)..(235): Xaa is any amino acid
MVFISDRNMQSNEIPAMRELIGLLKIQGCMIVADALNCQKETAKAVIEGKGDYLFSVKDNQQVLKEDIEGYVQDKHLQKTMDRAVTVEKTSGRVERRTAYTSCDIGWLSGKEEWEGLACIGAVNTQVSSKKGQTNEWHYYITSRSLTAQELLRHARLEWSVETMHWLLDVHFDEDFCRVEDRNVQQNLNIVRKIALNTIKGYKNRTASKRPISKLMFDCLLEPGNILSVLAVNEN

SEQ ID NO: 27047 - DNA, 462 bp, Unknown
  Obtained from environmental sample
  misc_feature (1)..(462): n is a, c, g, or t
ttggtaatgcaccaggtggagcgcatgaaaaaaaggcaagcatacgttaccattgattcggtagccgattttcgtgagctgaccgacattaagatcgctgccaaaaccacagggttactcatggtgggtggcggtgtacccaagaactttgcgcaggataccgtagtatgcgccgagtgcttgggcgttgatgctcctatgcacaaatacgccgtacaaattaccgtagcagacgtgcgcgatggcgcatgttccagctccaccctcaaggaggcaagcagctggggcaaggtggataccgtttttgaacaaatggtgtatgccgaagccaccaccgtagtaccgctcattgccagctacgcctaccacaagggcgactggaaaaagcgcaaggctcgtgagtttgcaaaaatgtttacagtgaaaacgcctgctgcaaaagcaacagcaaagaagaagtaa

SEQ ID NO: 27048 - protein, 153 aa, Unknown
  Obtained from environmental sample
  misc_feature (1)..(153): Xaa is any amino acid
MVMHQVERMKKRQAYVTIDSVADFRELTDIKIAAKTTGLLMVGGGVPKNFAQDTVVCAECLGVDAPMHKYAVQITVADVRDGACSSSTLKEASSWGKVDTVFEQMVYAEATTVVPLIASYAYHKGDWKKRKAREFAKMFTVKTPAAKATAKKK

SEQ ID NO: 27049 - DNA, 549 bp, Unknown
  Obtained from environmental sample
  misc_feature (1)..(549): n is a, c, g, or t
gtggttaattggaacgagaggaaagtctgtgttttatttggtgatggcgccggggccgttgtggtagaaaaaaccgaggcggataacaaaggcattttacaatcaattttacatgcggacggttcgggcagtgaaagccttgttatgcgaagaggcggcacgcggaatccttttataaaaggggaatctattgacttgcctgtccatatcgagatgaacggacaggaagtgtataatttcgccgtaggggcgattgccgaaacaatagaagagcttatgaaagcgggaaatattggtattgatgatatcgcatggattgttccgcatcaggctaatgcgcggattattcaagccgcccgaagaagactgcatattccgtctgaaaaattttatttaaatattgaagaatacgccaatacttcatcagcgtcaattccaatcgcgttagacgaaatgaataggggcggtaagttaaagaaaggggatttaatccttacggttgggtttggcggcggccttacctacggcggaaatataattatttggtag

SEQ ID NO: 27050 - protein, 182 aa, Unknown
  Obtained from environmental sample
  DOMAIN (1)...(41): 3-Oxoacyl-[acyl-carrier-protein (ACP)] synthase III
  misc_feature (1)..(182): Xaa is any amino acid
MVNWNERKVCVLFGDGAGAVVVEKTEADNKGILQSILHADGSGSESLVMRRGGTRNPFIKGESIDLPVHIEMNGQEVYNFAVGAIAETIEELMKAGNIGIDDIAWIVPHQANARIIQAARRRLHIPSEKFYLNIEEYANTSSASIPIALDEMNRGGKLKKGDLILTVGFGGGLTYGGNIIIW

SEQ ID NO: 27051 - DNA, 1347 bp, Unknown
  Obtained from environmental sample
  misc_feature (1)..(1347): n is a, c, g, or t
atggcggcttacgctaacggcgttgcaaaactgcatggggttgtttcccgcgatatgtggcaggggctttggcctggagttccgataaacgaagtccccataggccatgtcaccaacggcgtacatccccgcacctgggtttccagtggtatgatcgagcttttagaccgctatttcggccctcattttgagaacaaaccgacagacctgcatatctgggatcgcatgagcagaatcagcgatgaggagctatggcgtacccatgaacgccgccgggaaaggctggttgcctttgcccgtgaccgcatacgcgaacagtacaagcgcaccggcgcggtggaacgccgcgtccagcaggcggaagacgccctttcaccttatgcccttaccctgtgctttgcccgccgctttgcaacttacaagcggggcaatttgctgttacgcgatccggaacggcttttgcgtctggttagggacaatgaccgcccaattcagcttatattcgccggcaaggcccacccccacgacatgcccggcaaagatcttatccgcgatatcgtccattttgccgaaaggtacgatgtcacgagccgtattgtgtttgttgagaattatgacatgaccgttgccaagtaccttacatcgggcggcgatatatggctcaatacgcccaggcgtccaatggaggcgtcgggtaccagcggcatgaaggccgcgatgaacggcgtccttaactgttccatcctggacggctggtgggacgaggcttacaatccggaagtgggctgggctattggccacggcgagcagtatgctgacgagagactccaggacgatgtggaaagcaaggagctgtacgatcttcttgaacgggacataatccctctcttttaccagcgcggcagggacggccttccccgcgaatggataaagaggatgaaagactgtatgcgccagatagggccatctatgtcctgtcacagaatgttaatggattattccaacaacttctatttccccgcgcttaaaaactaccgcaaactgataaaagacgactatgctgacgcaaaatcccttgcggcatattttggcaagctgcgtgattcctgggacagccttaaaatcgcaaagatcgaggcaaacaccaagccggtaatgcagcggggagattcgcttaatgttacggcccatattgagcttggcaaaatgtcacctgacgaactgctggtggaactgtattacggcgcggtatcaaaccagagcaacgaaattaccaatgcccacaaagtcgaaatgaagtgggtcggcagtaaagacggcctgaaccagtaccatgtgcggggttga

SEQ ID NO: 27052 - protein, 448 aa, Unknown
  Obtained from environmental sample
  misc_feature (1)..(448): Xaa is any amino acid
MAAYANGVAKLHGVVSRDMWQGLWPGVPINEVPIGHVTNGVHPRTWVSSGMIELLDRYFGPHFENKPTDLHIWDRMSRISDEELWRTHERRRERLVAFARDRIREQYKRTGAVERRVQQAEDALSPYALTLCFARRFATYKRGNLLLRDPERLLRLVRDNDRPIQLIFAGKAHPHDMPGKDLIRDIVHFAERYDVTSRIVFVENYDMTVAKYLTSGGDIWLNTPRRPMEASGTSGMKAAMNGVLNCSILDGWWDEAYNPEVGWAIGHGEQYADERLQDDVESKELYDLLERDIIPLFYQRGRDGLPREWIKRMKDCMRQIGPSMSCHRMLMDYSNNFYFPALKNYRKLIKDDYADAKSLAAYFGKLRDSWDSLKIAKIEANTKPVMQRGDSLNVTAHIELGKMSPDELLVELYYGAVSNQSNEITNAHKVEMKWVGSKDGLNQYHVRG

SEQ ID NO: 27053 - DNA, 1002 bp, Unknown
  Obtained from environmental sample
  misc_feature (1)..(1002): n is a, c, g, or t
atggcagataatgttaatcttgacgtgctttctacccgtgatggttttaacaccgctgttagatatataaaaaatacaattgacatagcttccggcgccgcatctgataaccttgccgatattcttttcaaattagatgatgaagatatgacaagcgcaaaaacaggcttgcttttaagaatgctgcttgttgataaacttggatacaagtccgcttcggcaaacctttgcgcgacagttaacaatctttcggcggttgcaaaagagttttcaaagtggaacggagttgatcttgtcgccgcgtaccatcatcctgagcttgggcttttaatagcgaatcctaaagttgccgaagaattagcggattttggcgaacttcgcaagaatgagttattggcaatatatgccggtttctacggacaggaaaccgatgaaaattgcgagaaggcggcatcccttgcccttaaggtatttgaaggcgctaaggtaactgttccgtccgcgcttgcaaagggtaaatataccgcaaagaaagtcagcaagcctaaaaaagcgggcgcgccgccgcctaaaccggtaaaagtaaaagccgcttcgtcaaaaacccaaaccaagcgcgccgcgcctgtggtagttcaggcggcccctgaggtaaaaccgtcgggcgggccgatgaagatgactccgcggtacgcggtaattgttcaaaacgagctttttcataacggaaatgtggaagcgtggaaacggattatcgcgagctattcggcaaaacatccggatttacaggtttatatttattatgaaaaagaaagaatattggacatcaattcgctgttcaaatggggcaaggtaaaacatggcagcgccattgaatttgccgtagccggaaataatattcaggatgtggcaaagctgcagcgttacctgacgcagggagccagccatatgtttgaagcattcctgcatgggccggtaaacaccgtgcttaaattgttttaa

SEQ ID NO: 27054 - protein, 333 aa, Unknown
  Obtained from environmental sample
  misc_feature (1)..(333): Xaa is any amino acid
MADNVNLDVLSTRDGFNTAVRYIKNTIDIASGAASDNLADILFKLDDEDMTSAKTGLLLRMLLVDKLGYKSASANLCATVNNLSAVAKEFSKWNGVDLVAAYHHPELGLLIANPKVAEELADFGELRKNELLAIYAGFYGQETDENCEKAASLALKVFEGAKVTVPSALAKGKYTAKKVSKPKKAGAPPPKPVKVKAASSKTQTKRAAPVVVQAAPEVKPSGGPMKMTPRYAVIVQNELFHNGNVEAWKRIIASYSAKHPDLQVYIYYEKERILDINSLFKWGKVKHGSAIEFAVAGNNIQDVAKLQRYLTQGASHMFEAFLHGPVNTVLKLF

SEQ ID NO: 27055 - DNA, 450 bp, Unknown
  Obtained from environmental sample
  misc_feature (1)..(450): n is a, c, g, or t
atggattcaagaatacatttttttagccaaaatatttcgatttcttcgaaagtcagttctaatttattgggtatccgcggacggcaggcgaatgaatttgccgaattggcatttcccattctgcccggaataattcttgacaccgaaatggcttcggatatagacgtcaagaaaataaagaaagatataagcgaacttttaggcaaatgcgcgaaactggtcgccaagacttacggggacccgaaaaaccccatgctcttaaaagtggttatatcttccaacctcgctattacaaattacccgaccctgcataacttcggccttgtaaaaccgactatagacggtttcgcgaaatgggtaggagaagattttgccgccagcgaagtattgttccttattaacggcatgatggcgattcaggaacgcatcaaagaacctcggccgatctga

SEQ ID NO: 27056 - protein, 149 aa, Unknown
  Obtained from environmental sample
  misc_feature (1)..(149): Xaa is any amino acid
MDSRIHFFSQNISISSKVSSNLLGIRGRQANEFAELAFPILPGIILDTEMASDIDVKKIKKDISELLGKCAKLVAKTYGDPKNPMLLKVVISSNLAITNYPTLHNFGLVKPTIDGFAKWVGEDFAASEVLFLINGMMAIQERIKEPRPI

SEQ ID NO: 27057 - DNA, 1458 bp, Unknown
  Obtained from environmental sample
  misc_feature (1)..(1458): n is a, c, g, or t
atgccgcctgataaaaaccaaaaccaaacgcactatgccatcgtaaaactggaggaggccgcgaaaacagttaagctggcaatcaatgaggtttcctcgctacggaagaagctggacaagttaaaaaacaacaagtctaaagcacaagaagcctacgccgatatgcaacagcagtttggcaagttaaaaaatgcccttgatgcttctacgctggccctattggagatggagttgccggacatagccgactgttccgcaaagcttgcctgcaccgtcaagggttttaacctgatgacccatgactgcggtaaactgtgcgcggcgttaagcgattatcttgctaaactcctcctctccgatgccaaggtaaaaaccacaaacgccgcaatcatcggaaggctgatggcaagcgtcaagatgggttattaccccacggatatggaacacttgatgttactctcacggggcattgagttccccgatggcgtgaccgctaaccttctggacccctgctgtggctgtgggattgccttgcgaacattggcttgcgaacacgaatgcaatacctacgggatcgagctagaccgtcaccgtgcagaggaagcgattgctcggctcaaccgggtaggattcggctcttacttccactcccgcatcagtcaggaatcgttccacctaatgctgctgaatcccccgtatttatcagttatgactgaaggagggagcaacgcaagaagcgaaaagcggttcttgatagattgctacagccatcttatgtacggcggcctaatcatttacatcattccatattacaggctgaccgctgatatatgccgtgtgttgtgcgataacttcgatgacctaacagtgtggaagttcatgggaggcgagttanagaagtacaggcagatagccgtaatggggctgcggtgtaaacggcgtgacggttccaaaatggttcaagagcttgcctcatcggtcatggaaccggataaactgcgggagctttcagaattgcccgaaggccgctaccggcttccggaaactgcggtaaaggtgaacacgttcaaaggggcgcagttcaacgtgtacgagatggcggagcagctcaaacgatccaccagtttctcaaagctctttgagaaaaacaaactggacagtgcctacaaacgtccgcttttgccgttgaacttagggcaagtaggtttggtaggcggttccggcatgataaacggtttagttgagtgcgatacgccacacatcatcaaagggcgcatagtcaaggagaacgctgtcagccgggaggagaatctgaatacaaagggcgaactgatttccaccacagtcattgagacgcgttctaataaaatgattttcaacctattgacgcccgagggattcatctcattatccgattacggaaatacagatacggatgacgggatgagcgccgcctaa

SEQ ID NO: 27058 - protein, 485 aa, Unknown
  Obtained from environmental sample
  misc_feature (1)..(485): Xaa is any amino acid
MPPDKNQNQTHYAIVKLEEAAKTVKLAINEVSSLRKKLDKLKNNKSKAQEAYADMQQQFGKLKNALDASTLALLEMELPDIADCSAKLACTVKGFNLMTHDCGKLCAALSDYLAKLLLSDAKVKTTNAAIIGRLMASVKMGYYPTDMEHLMLLSRGIEFPDGVTANLLDPCCGCGIALRTLACEHECNTYGIELDRHRAEEAIARLNRVGFGSYFHSRISQESFHLMLLNPPYLSVMTEGGSNARSEKRFLIDCYSHLMYGGLIIYIIPYYRLTADICRVLCDNFDDLTVWKFMGGELXKYRQIAVMGLRCKRRDGSKMVQELASSVMEPDKLRELSELPEGRYRLPETAVKVNTFKGAQFNVYEMAEQLKRSTSFSKLFEKNKLDSAYKRPLLPLNLGQVGLVGGSGMINGLVECDTPHIIKGRIVKENAVSREENLNTKGELISTTVIETRSNKMIFNLLTPEGFISLSDYGNTDTDDGMSAA

SEQ ID NO: 27059 - DNA, 498 bp, Unknown
  Obtained from environmental sample
  misc_feature (1)..(498): n is a, c, g, or t
gtgcatggggcaatactcaaaaagtatagcgttggaattcttgaaaccaagggtaaaaaagcaagcgaaattcatttcatttggttcaaagaaccaattgctgttcctaatggcgattataaagtttttgaccctaaaaaaaccggagatttgtttttgaaaaaagtctgcaatgtatgtcaaagattgctgaacactaaaactttttccaaagggctttcttgcaaagattgcgaaaaaataatagacgaagttaatgctatttcaaaaaaaagaaaggggaaaaagaaaaataaatcagaattagaaattttcagctgccccgtttgcgataaaacagcagtaccaaaattgacaggtaaaatagccttagaccacagccataaagatttgcatgttcgcggttgggtttgcgatggttgcaatgctggcattggcaagttcaaagatgaaataatattgtttgaaaatgctctaaaatttttgaaaatagattaa

SEQ ID NO: 27060 - protein, 165 aa, Unknown
  Obtained from environmental sample
  DOMAIN (90)...(164): Recombination endonuclease VII
  misc_feature (1)..(165): Xaa is any amino acid
MHGAILKKYSVGILETKGKKASEIHFIWFKEPIAVPNGDYKVFDPKKTGDLFLKKVCNVCQRLLNTKTFSKGLSCKDCEKIIDEVNAISKKRKGKKKNKSELEIFSCPVCDKTAVPKLTGKIALDHSHKDLHVRGWVCDGCNAGIGKFKDEIILFENALKFLKID

SEQ ID NO: 27061 - DNA, 483 bp, Unknown
  Obtained from environmental sample
  misc_feature (1)..(483): n is a, c, g, or t
ttgcttatagtggatccggtgctgcccctggtaaacatcataggccccgccgagaacagcgggtaccgggataaggtaaacgtgtttggttccaccatggatgactatgacatggacagcgtggaagtgagcttgcgtccgggaaacaaattcggatattcggtgcccggctttatccagggcctgtactttgacatcaacgtcctgggcggcgcgaatttttgcgccgggctggggctgaccttcctaagtgacaacgtcaaagtccagggtaacgcctcccagacgccttcggggcgttattcgggatggtctttcggcttcaaggtgctgggcaatatttggagccagaacctcggcaagtggtttggccctgactgggcgttctggaggaccagttttacaataggggcgcatttctcgtactacctcatggaagaaggcgagaatcccctgtggatgggacagttcctaggccagtga

SEQ ID NO: 27062 - protein, 160 aa, Unknown
  Obtained from environmental sample
  misc_feature (1)..(160): Xaa is any amino acid
MLIVDPVLPLVNIIGPAENSGYRDKVNVFGSTMDDYDMDSVEVSLRPGNKFGYSVPGFIQGLYFDINVLGGANFCAGLGLTFLSDNVKVQGNASQTPSGRYSGWSFGFKVLGNIWSQNLGKWFGPDWAFWRTSFTIGAHFSYYLMEEGENPLWMGQFLGQ

SEQ ID NO: 27063 - DNA, 441 bp, Unknown
  Obtained from environmental sample
  misc_feature (1)..(441): n is a, c, g, or t
atgtcagatcaatctgtaatacctatagatcaactgcttccccataaattgcctcttgtcgctctcttggggcgtcctatttttccggggatttttacgcccattataatcggcaatcccgccgatgtgcaggttgtggaagaagccaattcaggcgacgggcttatcgggcttgttatgctgttaaacgaaaccgaaactccctcaattaccgatttatacacagtagggacagccgcaaaaatagtaaagaaaattaatctgcccgacggcggagttaacatatttatttctacattaaaaaggttctctgtaaaaaagacgattaatccgtctaatcctattgtcgctgtggttgagtaccttgaggaagaagaggacaatacaaggggaagtaaaagctcttacccgcgcgcttctttcggagatgaaaacagatag

SEQ ID NO: 27064 - protein, 146 aa, Unknown
  Obtained from environmental sample
  misc_feature (1)..(146): Xaa is any amino acid
MSDQSVIPIDQLLPHKLPLVALLGRPIFPGIFTPIIIGNPADVQVVEEANSGDGLIGLVMLLNETETPSITDLYTVGTAAKIVKKINLPDGGVNIFISTLKRFSVKKTINPSNPIVAVVEYLEEEEDNTRGSKSSYPRASFGDENR

SEQ ID NO: 27065 - DNA, 561 bp, Unknown
  Obtained from environmental sample
  misc_feature (1)..(561): n is a, c, g, or t
ttgatggtacaaaatctaaccctctccatattactgttgtttattatgtcttgcgattccgataataacaccgattcacgtgacgggaaaaaatacagatctgtaaaaattggcgagcaaatatggatggcggagaatttgaattacgaggcagaagatagtgagtgttatggtaaggatcctgctaattgccaaaaatacggtcgcctttataattggaaaacggctaaaacagcctgccccagcggttggcatttgccaagcaacgatgaatggcaaatccttgtgaatttaacaggcggaaaaaatctcaaagcatttagaggttggaacggtgctggcaatagtaaggactcttacaacttttccgccctaccgggaggctacggcatttccgagggttattttctaaacgttggctacataggctactggtggacttccaccgaagacagtggcgactacgcttatgctagggatatggtgtatgatgatgagacggcttattacaatgataatgataagggtaatttgtatagcgttaggtgtgttagggattaa

SEQ ID NO: 27066 - protein, 186 aa, Unknown
  Obtained from environmental sample
  SIGNAL (1)...(20)
  misc_feature (1)..(186): Xaa is any amino acid
MMVQNLTLSILLLFIMSCDSDNNTDSRDGKKYRSVKIGEQIWMAENLNYEAEDSECYGKDPANCQKYGRLYNWKTAKTACPSGWHLPSNDEWQILVNLTGGKNLKAFRGWNGAGNSKDSYNFSALPGGYGISEGYFLNVGYIGYWWTSTEDSGDYAYARDMVYDDETAYYNDNDKGNLYSVRCVRD

SEQ ID NO: 27067 - DNA, 1287 bp, Unknown
  Obtained from environmental sample
  misc_feature (1)..(1287): n is a, c, g, or t
ttggccgagactggacaatttacaggacttcccacttccgaagcaaaagagcgcgtaacggactggctggaggaaaagaaaatcggcaagagagcggttaactacaaattaagagactggattttcagcaggcagaggtactggggcgagccgattcccgtcgtgcattgcgcgaaatgcggcattgtgacggtgccggagagcgaactgccgcttaaacttccgaatgttaaaacttacgcgcctacaggaacgggcgagtctccgcttgcgggcatagacgaatgggttaatactgtctgccccaagtgcggcggagaagcaaagcgcgagacaaataccatgccccagtgggcgggttcgtgctggtactacatacgctacctcgatccgaagaacagcgaagaatttgccgctaaagaaaaaatcaattattggctgcccgtggatttatatgtcggcggcgcggaacacgcggtgcttcacctcctgtacagccgcttctggcacaaagttctttttgatctcggtcttgtgaataccgttgagcctttccagcggctgatcaatcagggaatgatcctcggcgaagacaaccagaaaatgagcaaaagccgcggcaatgtaattaatcccgacgatgttatcaaagaatacggaacagattcgctgcgcctgtacgaaatgtttatgggaccgctggaagtcagcaagccgtggaatatgtcgggcgtttcgggagtgtcgcgttttctggagaggctttgggcgattggcgaaaaacctctgtgcgacgcggaaccgggaagtccggaggcgggcggcgctgctctgcaaaaacttttgcaccgtaccataaaaaaaattacacatgataccgaaaacctctgttttaataccgctatcagccagatgatgatctactcaagcgaacttgcaaaacttgcggaaatcccgcgttcaatgtggcagccctttgttataatggcaagcgtttacgcgccgcacataggcgaggaactttgggaaaaactcggcaataaaaacactgtttccgcctgccaatggcctgtttttgacgacgctttaacgcgcgatgacgaagtgaatattgtagtgcaggtaaacggaaaaatacgcgataaatttaccgctcctgtcggaacatcaaaagatgaattggaaaaaaccgctttttccttgtcagatgtaaagaagtggctggaagggcaaacggtaaaaaaaattatcgttgtacctgacaaattagtcaatattgtgatataa

SEQ ID NO: 27068 - protein, 428 aa, Unknown
  Obtained from environmental sample
  DOMAIN (275)...(399): Anticodon-binding domain
  misc_feature (1)..(428): Xaa is any amino acid
MAETGQFTGLPTSEAKERVTDWLEEKKIGKRAVNYKLRDWIFSRQRYWGEPIPVVHCAKCGIVTVPESELPLKLPNVKTYAPTGTGESPLAGIDEWVNTVCPKCGGEAKRETNTMPQWAGSCWYYIRYLDPKNSEEFAAKEKINYWLPVDLYVGGAEHAVLHLLYSRFWHKVLFDLGLVNTVEPFQRLINQGMILGEDNQKMSKSRGNVINPDDVIKEYGTDSLRLYEMFMGPLEVSKPWNMSGVSGVSRFLERLWAIGEKPLCDAEPGSPEAGGAALQKLLHRTIKKITHDTENLCFNTAISQMMIYSSELAKLAEIPRSMWQPFVIMASVYAPHIGEELWEKLGNKNTVSACQWPVFDDALTRDDEVNIVVQVNGKIRDKFTAPVGTSKDELEKTAFSLSDVKKWLEGQTVKKIIVVPDKLVNIVI

SEQ ID NO: 27069 - DNA, 384 bp, Unknown
  Obtained from environmental sample
  misc_feature (1)..(384): n is a, c, g, or t
atgagaattgataaatcatattctttgaatgatgaacgatatgttgttattgttgattctacaaagttttataaagcgtggacagataaagaaattgaacaatatgtaataacaaatgagttcgaacaaaaaaaatatgaagatgctttaagaggttttgcaaaaggaatatctaatcctgttcctcttgcagaagctgcatactataaaaatttttcatttattgatggaattacaagaacaaaatatcttattataaacggagcaaagtatatacctttagaatttagcaaggcatctgcaatgagaatttgtcagaatataccagatgttttatactcaaaaaaagtagagaatgttaataatttatttaaactaggataa

SEQ ID NO: 27070 - protein, 127 aa, Unknown
  Obtained from environmental sample
  misc_feature (1)..(127): Xaa is any amino acid
MRIDKSYSLNDERYVVIVDSTKFYKAWTDKEIEQYVITNEFEQKKYEDALRGFAKGISNPVPLAEAAYYKNFSFIDGITRTKYLIINGAKYIPLEFSKASAMRICQNIPDVLYSKKVENVNNLFKLG

SEQ ID NO: 27071 - DNA, 354 bp, Unknown
  Obtained from environmental sample
  misc_feature (1)..(354): n is a, c, g, or t
atgtttttgaagaaagtggacaaggcctgtgctaaaggcaaagtgcttcatattgtagcggataatctgtccgcgcataaaacaaaaactgtttatagttattttgatacggtaccgggaagatttgtactgcattttattccgacacattcatcatggttaaatttagtggaacgttggtttgcagaaataacaaacaaacagatacggaggggaagctttgaatctgttccgcaattaataaaaacaataaaggaatatatcagggtatggaataaatcaggccgttcatttgtatggacaaaaaaacctaacgaaattcttaagaaaataaataaggcccaatcattttga

SEQ ID NO: 27072 - protein, 117 aa, Unknown
  Obtained from environmental sample
  misc_feature (1)..(117): Xaa is any amino acid
MFLKKVDKACAKGKVLHIVADNLSAHKTKTVYSYFDTVPGRFVLHFIPTHSSWLNLVERWFAEITNKQIRRGSFESVPQLIKTIKEYIRVWNKSGRSFVWTKKPNEILKKINKAQSF

SEQ ID NO: 27073 - DNA, 927 bp, Unknown
  Obtained from environmental sample
  misc_feature (1)..(927): n is a, c, g, or t
atgcaggatctgttgattgaccttgagcagcttgagtttacgcttaacgggttaaagctgctcggctgcaggggcactacgggaaccggcgcaagtttcctctccctgtttgacggcgaccatgaaaaggtaaaggcccttgataaaaaaatagccgcaaaaatgggctttaacaaagtgtattccgtcagcggccagacctattccagaaaggttgacttctataccctgtccgtcctgtcgggtatagcccagagcgcgtataaattctcaaacgatatgcgcctgctctcccatcttaaagaaattgaggaaccgtttgaatcgggacaggtcggctcatcggcgatggcgtacaagcgcaacccgatgagaagcgagcgcatcgcctcactggcgcggcatattacagttaacgctcttaatcccgcgctgacggcaagcgcgcaatggctggaacgcacccttgacgattcggcgaacaggcgtatagcgatccccgaagccttcctcgccgcggacgcgatactttcgctgtatatcaatgtcgcgggcgggcttgccgtttatccgcacataataaaaaaacacctgaacgaggaactgccgtttatggcaaccgaaaatattttaatgcactgcgtaaaaaaaggcggggacaggcagcttcttcacgagaggatacgggtacattcgctggaggcggcgaanaagattaaacaggaaagcggagaaaacgatttgatcgcccgtatcctgtcggacgcgaacttcgccttaagcgaagaagaaataaacggcttgctgtccgcggaaaattttacgggcagggcaagcggtcagaccggggaatttttatcggaagtaagggcaatactcgaggccaataaagaaattctgggcgttgaagtcaggatcactgtttaa

SEQ ID NO: 27074 - protein, 308 aa, Unknown
  Obtained from environmental sample
  misc_feature (1)..(308): Xaa is any amino acid
MQDLLIDLEQLEFTLNGLKLLGCRGTTGTGASFLSLFDGDHEKVKALDKKIAAKMGFNKVYSVSGQTYSRKVDFYTLSVLSGIAQSAYKFSNDMRLLSHLKEIEEPFESGQVGSSAMAYKRNPMRSERIASLARHITVNALNPALTASAQWLERTLDDSANRRIAIPEAFLAADAILSLYINVAGGLAVYPHIIKKHLNEELPFMATENILMHCVKKGGDRQLLHERIRVHSLEAAXKIKQESGENDLIARILSDANFALSEEEINGLLSAENFTGRASGQTGEFLSEVRAILEANKEILGVEVRITV

SEQ ID NO: 27075 - DNA, 867 bp, Unknown
  Obtained from environmental sample
  misc_feature (1)..(867): n is a, c, g, or t
gtgcgggccataaagatactcaagaagggctacaagtccgacactcgggagcgttttttcacggaggccaagatactggccgacatacgccatccgaatatcgtagagatattcgacatcggctacatggagcgcggggaaccctaccttgtgctggagtacgtggagggtatctcgataaaggagttgattgggaacggcaggctacccgtcgcggccgccctctccattgcctactgtgtgtgccaggcgttgcactacgctcacttgaagagctacacgctctacggaaaggtatacaaggggctgatccaccgcgacatcaagccggagaatatactggtgtctagcggcggcggcgtcaagcttatggacttcggcatagcgcgtcccagcgaggtgagtttgcatacggtgggcgggaaggtcatggggacgctggtttacttgagtccggagcagttaaacggcgggacgctcgaccataggagcgatatcttttcgctcggcgcggtgctttacgagatggtaaccggcgccagggcgtttcctcagaagacgctttcggagcttgtgcagaagaagaccgccggtgagtacaaggcgctttcgagttacggcctgaagtttccggggcgcttggggcaggtggtgggcaggtcgatgcgcctgcatccggaggagcgttacggtagcgccgcggagatggcctacgcaatttacgcggtactgagggaggtctccgacctgccgtacagcgacgtgctggccggctatatgcgcgatcccaagtcgatatcggattggaccgagccgccgcgtccggcggcgcaggagggcgtgtcgtccgataaggatcagggttag

SEQ ID NO: 27076 - protein, 288 aa, Unknown
  Obtained from environmental sample
  DOMAIN (1)...(240): Protein tyrosine kinase
  misc_feature (1)..(288): Xaa is any amino acid
MRAIKILKKGYKSDTRERFFTEAKILADIRHPNIVEIFDIGYMERGEPYLVLEYVEGISIKELIGNGRLPVAAALSIAYCVCQALHYAHLKSYTLYGKVYKGLIHRDIKPENILVSSGGGVKLMDFGIARPSEVSLHTVGGKVMGTLVYLSPEQLNGGTLDHRSDIFSLGAVLYEMVTGARAFPQKTLSELVQKKTAGEYKALSSYGLKFPGRLGQVVGRSMRLHPEERYGSAAEMAYAIYAVLREVSDLPYSDVLAGYMRDPKSISDWTEPPRPAAQEGVSSDKDQG

SEQ ID NO: 27077 - DNA, 489 bp, Unknown
  Obtained from environmental sample
  misc_feature (1)..(489): n is a, c, g, or t
atgattggcgcctcttctgcagacattcggctttcaggcggttttaatgtccatggcgagactgtatttcccagaacaattcccgatcatatttacgcgcaaagttttgacgattattcagattgttttctacacgaaaaacggggcagtgccattcccgccgtattcaacaaatctgacggcggctggatacgttttgccgcgctggatttttccgatagccgcggattatgctccgccattgtccagggcgctactggcagccgcatagaaattcgtttggacgcgccgggcggcgcattggcgggcacgttcgttgtcccaaacaccggcgatatatccttttaccatctggtagaaataaatagtccccgccgccgtccggtttgggcatacgctgaaactcccatggaaaaaatacgcggcgttcatgatctgtacctggtgttttatgggaaaaccggtctctggcgaattgatattaagtaa

SEQ ID NO: 27078 - protein, 162 aa, Unknown
  Obtained from environmental sample
  DOMAIN (34)...(162): Carbohydrate binding module (family 6)
  misc_feature (1)..(162): Xaa is any amino acid
MIGASSADIRLSGGFNVHGETVFPRTIPDHIYAQSFDDYSDCFLHEKRGSAIPAVFNKSDGGWIRFAALDFSDSRGLCSAIVQGATGSRIEIRLDAPGGALAGTFVVPNTGDISFYHLVEINSPRRRPVWAYAETPMEKIRGVHDLYLVFYGKTGLWRIDIK

SEQ ID NO: 27079 - DNA, 936 bp, Unknown
  Obtained from environmental sample
  misc_feature (1)..(936): n is a, c, g, or t
ttgggtgataaatccgttgtctttatggcgaaggacggggatgaaacagttatcattatttacagcgaatgcggccatgccagcggtcctaccggagcggagcttggttttaagggcactgatataggagagggaaaattccgcgctccactgagccacgaaaacgcggaagccttgcgcaagttcttcccgttcaccgcgcctgtccgcggcctttcaaagccccgaagcttcgggctgggggatcgcctgggtatagccactcccggccatatcgctctttttgaaaagacggacgtgttccccgtttttgcccaacagtccatccgcgagctaaacctaaccggccgtacctacgaagacgtactggatgcggcaacgttcgcggtgtttcaggaaggctacaaaaaaggtttcggtgcggatggggatcaccttaaaaccgtaaaagacgtggagtacgccctttcgcttggcttcaccatgatcaccctggactgttcggagtatataaaaaacgacgtaacgcctgataacgcgccgccgcttccaaaacactacggagataaatacctcaataataaatttgacattgaagagggaattagccttgtatttaacgaaggagatttgcgtcaatgcgttgccatttacgctgacgcgattgcgttcgcggcggaaatatacaaacgtttttttgcgtcaggcaagtatgacgcggattttgaaatttcaatagatgaaaccgcttcggttacgacgccgcttcagcatttctttgtcgccagcgagcttctggatgccggggtttcgttcgctacaatagcgccgcgtttttgcggagaattccagaagggcatagattacaagggcgatattgcgcagtttgaagaaggaataaaaacacacgctgccattgccggcatttggatataa

SEQ ID NO: 27080 - protein, 311 aa, Unknown
  Obtained from environmental sample
  misc_feature (1)..(311): Xaa is any amino acid
MGDKSVVFMAKDGDETVIIIYSECGHASGPTGAELGFKGTDIGEGKFRAPLSHENAEALRKFFPFTAPVRGLSKPRSFGLGDRLGIATPGHIALFEKTDVFPVFAQQSIRELNLTGRTYEDVLDAATFAVFQEGYKKGFGADGDHLKTVKDVEYALSLGFTMITLDCSEYIKNDVTPDNAPPLPKHYGDKYLNNKFDIEEGISLVFNEGDLRQCVAIYADAIAFAAEIYKRFFASGKYDADFEISIDETASVTTPLQHFFVASELLDAGVSFATIAPRFCGEFQKGIDYKGDIAQFEEGIKTHAAIAGIWI

SEQ ID NO: 27081 - DNA, 1443 bp, Unknown
  Obtained from environmental sample
  misc_feature (1)..(1443): n is a, c, g, or t
atggccgagaattcagtgtttatcttcgcgccggattcggaacaggatagcctgccggatgaggcgcgaatcaaacagatgataacggaaagcgcaaaaataaaaatcgccgcgcctaagtccaaagccgtcgaaggcgggcttttgttgtctgtgcctgaacgcggctctgtagtttcggaagccattgatgtcgaaacaggggcgattatctgggaattgagcaatgggtcgagagccatactcaaatcaactaaaaataaaaatgacgaaattgttatgcacgcaatgtccctcggaggaacaagcagcgtcgcgcctgaggacgacgtatccgcgagccttgccatagaaatgacccaggtttccggtcttggcccctggtcgcgtccggagctgacaataaaactcgccggaaaacaggtatccctttcgcagtttatttacagttattaccggggtttcaggggttcctccaacacggttgatctgaaaactttttttgaaatgttacacctcagcttcacagaccagcgtattgacaacgaggccgtagaggccatgatggatcagtacaggacatccctcgccctaaagagcgaagacccgcacgcggttttttcttatgagataaacagaacgatctacagcggacatccgcattttaagccgctggagctggaagatcttcccaaggcggatattggtaccgcccttgcctttgtccgcaagggccaaaaccccgccgattataaatttatattcacggggaatcttgatttaaaaacgatgcgggaatatgtcgaaatataccttgcttcaatcccacgaaaggaaagttggaatacatggaccgatttgaaagttacgcgcccgggaaaagttgaaaatatcgttcacaaagggaaggaagaacaaagcacggtttacatggtatggttttccaaagcccctttcagcgacgagctaagcgcggcatgccaggtgttaaacgaatatctggatataaaactggatgatgagatccgtgaaaaaatgggaggcgtctattcgatttcctccggcgtgtccgtctctccggttccgcagggcgagctttccatgcaggtgtatttcagctgcgatccaaagcgggcaacggaacttcaaaccgccgttatcgcgttattgaaccaggcggcgggcggcgttattgacaatgacacatttacaaaggctatggaagccccaaagaaagagtgggaagtctcgattcagagcaacgcctacatcgcccagagctacgccaattcgtcggtactgctgaaccttccgctgtcgcggctggacaagcggccaaaattgtttgacgccgtgacccaggctgacattcagggggtatgcgcccagcttttacggagcgacggcccggcgattgtggtgctaatgccggaaaacaaatga

SEQ ID NO: 27082 - protein, 480 aa, Unknown
  Obtained from environmental sample
  DOMAIN (232)...(410): Peptidase M16 inactive domain
  misc_feature (1)..(480): Xaa is any amino acid
MAENSVFIFAPDSEQDSLPDEARIKQMITESAKIKIAAPKSKAVEGGLLLSVPERGSVVSEAIDVETGAIIWELSNGSRAILKSTKNKNDEIVMHAMSLGGTSSVAPEDDVSASLAIEMTQVSGLGPWSRPELTIKLAGKQVSLSQFIYSYYRGFRGSSNTVDLKTFFEMLHLSFTDQRIDNEAVEAMMDQYRTSLALKSEDPHAVFSYEINRTIYSGHPHFKPLELEDLPKADIGTALAFVRKGQNPADYKFIFTGNLDLKTMREYVEIYLASIPRKESWNTWTDLKVTRPGKVENIVHKGKEEQSTVYMVWFSKAPFSDELSAACQVLNEYLDIKLDDEIREKMGGVYSISSGVSVSPVPQGELSMQVYFSCDPKRATELQTAVIALLNQAAGGVIDNDTFTKAMEAPKKEWEVSIQSNAYIAQSYANSSVLLNLPLSRLDKRPKLFDAVTQADIQGVCAQLLRSDGPAIVVLMPENK

SEQ ID NO: 27083 - DNA, 537 bp, Unknown
  Obtained from environmental sample
  misc_feature (1)..(537): n is a, c, g, or t
ttgcgaattttagcaggtatacccgaccccgacgattttctgttttttgagagcgctgccgttatcaagcgagcgaaagaacttgagttacgcccaataaacgttcacggaacggacacgcttttggatattcaccgttatntgttccaagatgtgtataattgggcggggcagaagaggactgtggagataagcaagcaaggcaaaccgttttttctaacatcgtactttgacaatggttttacctatattgatactcttatagcggagtaccggaaaattgctaaaacggataaagtcaaattggcagaacacttggcggtgttgcttgataatatcaattaccttcacccgtttagggaaggtaacggaagaactcaaagggagtttattcgtctccttgccctagaaaatggttacatacttaatttgaatccatctgataatcttgacgtatatgagcgctatatgtcaggaactattgatggagatgtgggtcgattggcggctatgatattggaattattgaagaattga

SEQ ID NO: 27084 - protein, 178 aa, Unknown
  Obtained from environmental sample
  DOMAIN (41)...(166): Fic protein family
  misc_feature (1)..(178): Xaa is any amino acid
MRILAGIPDPDDFLFFESAAVIKRAKELELRPINVHGTDTLLDIHRYXFQDVYNWAGQKRTVEISKQGKPFFLTSYFDNGFTYIDTLIAEYRKIAKTDKVKLAEHLAVLLDNINYLHPFREGNGRTQREFIRLLALENGYILNLNPSDNLDVYERYMSGTIDGDVGRLAAMILELLKN

SEQ ID NO: 27085 - DNA, 609 bp, Unknown
  Obtained from environmental sample
  misc_feature (1)..(609): n is a, c, g, or t
atgttgtcgcggataaaagcaaaaggaataaaaatatgcgtatggatcaatccgtacattgcgcagcgttcaaaactttttgaagaagaaaaaaagagcggttgttttttaagcctttcaggttttggtttttggagtcatgacatcggcggatttgaagggatacccaatgccgctttgtttaaacgctggcttgcgttcggattgttatcatcacattcaaggcttcacggcagccattcttaccgcgtcccatggagcgtagacgaagaatccgccgaagtctgccggttctttaccgaattgaaatcgcgccttatgccgcatatccttaaagcggcgaaagaagcccacgaaaaaggcatccccgttctccgcgccatgatgctggaattccccgatgatcctgcgtgcgcgtaccttgaccgtcagtatatgcttggaagcgatatacttgtcgtgcctgttttcagcgaagacaacacagttacctattatctccccgaaggaaactggaagcaatatctgacgggtgaaacaataaaaggcggacgctggataacggaaaaacacggatttttgagtatgcctgttttattaaaacaataa

SEQ ID NO: 27086 - protein, 202 aa, Unknown
  Obtained from environmental sample
  DOMAIN (1)...(202): Glycosyl hydrolases family 31
  misc_feature (1)..(202): Xaa is any amino acid
MLSRIKAKGIKICVWINPYIAQRSKLFEEEKKSGCFLSLSGFGFWSHDIGGFEGIPNAALFKRWLAFGLLSSHSRLHGSHSYRVPWSVDEESAEVCRFFTELKSRLMPHILKAAKEAHEKGIPVLRAMMLEFPDDPACAYLDRQYMLGSDILVVPVFSEDNTVTYYLPEGNWKQYLTGETIKGGRWITEKHGFLSMPVLLKQ

SEQ ID NO: 27087 - DNA, 639 bp, Unknown
  Obtained from environmental sample
  misc_feature (1)..(639): n is a, c, g, or t
ttgggagcagcttgggtttacactgtcaaatatatgcaggaaatcgggcgtaaatatccaaattgcggttttggcggcatgttcagaaagtggatgtttagcgatgatcccgagccgtacaacagttttggaaatggcgcggcaatgcgcgtttcgccttgcggttttatagccggaactgaggaagaggcaatactgctttcaagaaaagtaaccgaagttacgcataaccaccccgaaggattaaaaggcgcggaagctgtttcagttgccatttttatggcgagaaatggagccgtgaagaacgaaataaaagagcgaatagaaaaagattactacgatcttaactttacccttgacagtatccgtggggattatcaattcaatgagacatgccagagaacggtccctcaggctattgtggcttttcttgaatctgcttcgtttgaagacgctattcgcggtgcggtaagccttggcggcgacagcgataccttggccgctatcaccggaagcatcgcggaagctttttacggcgttccttctgatttgaaaagtatggcgttgacttaccttgatcgcgaattgcttgatatttacgaagaatgggaaaacaaaacaagaaaaataacaaaataa

SEQ ID NO: 27088 - protein, 212 aa, Unknown
  Obtained from environmental sample
  DOMAIN (2)...(202): ADP-ribosylglycohydrolase
  misc_feature (1)..(212): Xaa is any amino acid
MGAAWVYTVKYMQEIGRKYPNCGFGGMFRKWMFSDDPEPYNSFGNGAAMRVSPCGFIAGTEEEAILLSRKVTEVTHNHPEGLKGAEAVSVAIFMARNGAVKNEIKERIEKDYYDLNFTLDSIRGDYQFNETCQRTVPQAIVAFLESASFEDAIRGAVSLGGDSDTLAAITGSIAEAFYGVPSDLKSMALTYLDRELLDIYEEWENKTRKITK

SEQ ID NO: 27089 - DNA, 336 bp, Unknown
  Obtained from environmental sample
  misc_feature (1)..(336): n is a, c, g, or t
ttgtttttcattatgggctataaagacaggttcatttctggcattttggaaaatgttgttatgcacgaaatggaaaggcgagggtataaggtttttgtgggcaaattgaatggcacggaaatagactttgttggggagaagcaaaacaaaaaaatttacgtgcaggtatgttatcaattaaattcacaagataccataagtagggaattttcaccgttggggcttataaaagacaatcatccaaaatttgttgtttctatggattcgttttttaaggataacataaacggtattgagcatcggttcgctggggaatttttgttggagaagtggtaa

SEQ ID NO: 27090 - protein, 111 aa, Unknown
  Obtained from environmental sample
  misc_feature (1)..(111): Xaa is any amino acid
MFFIMGYKDRFISGILENVVMHEMERRGYKVFVGKLNGTEIDFVGEKQNKKIYVQVCYQLNSQDTISREFSPLGLIKDNHPKFVVSMDSFFKDNINGIEHRFAGEFLLEKW

SEQ ID NO: 27091 - DNA, 1068 bp, Unknown
  Obtained from environmental sample
  misc_feature (1)..(1068): n is a, c, g, or t
ttgagattttgcaagaatgaccctaaattgtttttgcaaacatatccgccgcctattatcatagatgaagtgcagtatgcgccggaactatttacttatataaaaatttatgtggacgagcatccaaaggaaagaggggctttttggctttccggttcacagcagtttagattaatgaaagggattagagaatctttggcagggcgcattgccataatggatttgatggggctttcccaaacggaaattatgcggaaatctggcaaaagcactccttttttgccttcttttgatatgcttaaagaaaataaagcaaaaacatcttttagcgcaaaacaggtatttaacactattttaagaggctctttccctgcgctttacgcttttccaagcacaaggacggatattttctacagaagttatctgcaaacatatatagaaagagatgcgagggacgatttagggttaaaaaacgagttaaaatattacgattttattcgggcaacggcggcgagaactggaaacttgctgaattatgcgaatctcgcaagtgatgtggatataaatgtaaaaactgcaaaaatttggcttgattctctggtgcgtgctggtattgtgatgctggtagaaccatacagcgcaaatataaataggagaattgtgaacacccctaaaatttattttatggatactggactagcaagctatctaacaaaatggaattctgcggaaactttgatgaacggagctatgagcggcgcaatgctggaaacttatgttttatgtgagataatcaaaagttataggcataattgcagggaagagaatataagtttttatagggatagcaatggggtggagatagattttatcatagagcaagacggggttttgcatcccatagaagtaagaaaaactgctatgccaagcaaggattcttgcaaaaatttttctgtattgaaaagtttggggaagaaaacgggaacaggtgctgtattgtgtttctacgagtcacctattcctatctgcgaagatgtcatttctattcccgtatggaaattaccttaa

SEQ ID NO: 27092 - protein, 355 aa, Unknown
  Obtained from environmental sample
  misc_feature (1)..(355): Xaa is any amino acid
MRFCKNDPKLFLQTYPPPIIIDEVQYAPELFTYIKIYVDEHPKERGAFWLSGSQQFRLMKGIRESLAGRIAIMDLMGLSQTEIMRKSGKSTPFLPSFDMLKENKAKTSFSAKQVFNTILRGSFPALYAFPSTRTDIFYRSYLQTYIERDARDDLGLKNELKYYDFIRATAARTGNLLNYANLASDVDINVKTAKIWLDSLVRAGIVMLVEPYSANINRRIVNTPKIYFMDTGLASYLTKWNSAETLMNGAMSGAMLETYVLCEIIKSYRHNCREENISFYRDSNGVEIDFIIEQDGVLHPIEVRKTAMPSKDSCKNFSVLKSLGKKTGTGAVLCFYESPIPICEDVISIPVWKLP

SEQ ID NO: 27093 - DNA, 696 bp, Unknown
  Obtained from environmental sample
  misc_feature (1)..(696): n is a, c, g, or t
ttgccggtatacagaattatcggcgcgacaaacctcagcatgggcatcggcctgacgcggactgtcgccctgcagaacgggagttatacgccatttttcccgacttatgacggtgataccgactggaaccactccaacctgttttcatttgatgtcccgttcaggtaccgctttaaaagctcgaacactataagcggaaaatacggcagtttttcctggtctctcccttattattccgatccgtttgtggacagcgattttctcaagcgcgctgaagagatggactggatcaacatgattcaacagggcgccgcttctatggaggcccaggattcttcagagagccagcagagtcacgagccctggcagtttagcgggcagctaaaccccaaattccccaatatgtcgccgtatataaacagtatttccattggttctatttccagcaccatcgcgtttaaaacagtggacacaaggagtattaataaaattgcatctaatgatattaaatactattcgccttcaagctggtttttcgctccggatacgtccaccctgtatcaggtgagcgcttcggtatcgggcattcccctaagccttggggaaacggcctcccgcgcttccgccgccaatacggataagaatgaaaccgaggatccgttaaaaggcatcnggcgttccgcgttcgccgtttga

SEQ ID NO: 27094 - protein, 231 aa, Unknown
  Obtained from environmental sample
  misc_feature (1)..(231): Xaa is any amino acid
MPVYRIIGATNLSMGIGLTRTVALQNGSYTPFFPTYDGDTDWNHSNLFSFDVPFRYRFKSSNTISGKYGSFSWSLPYYSDPFVDSDFLKRAEEMDWINMIQQGAASMEAQDSSESQQSHEPWQFSGQLNPKFPNMSPYINSISIGSISSTIAFKTVDTRSINKIASNDIKYYSPSSWFFAPDTSTLYQVSASVSGIPLSLGETASRASAANTDKNETEDPLKGIXRSAFAV

SEQ ID NO: 27095 - DNA, 444 bp, Unknown
  Obtained from environmental sample
  misc_feature (1)..(444): n is a, c, g, or t
ttgcgggcatcacagtccgctacataccgtcatggaaaagcggcagccctttttcccatctgcaagaaaggcggtctgccgaaatgtccgcaggtcttttcgctttcaggaccgcatcgggaccgctatcaatttacacataacggcgaagattttacgataaaagcctccacagggcaaaggcgtcttttagccctattactgcggacagctcaagccctccgctattcccaagaaacccgccttaaccccatactattactggacgatgttcttttagaaatggacggcgaaaaaagacgcaagttcctatcggcgctcccttcgtatgatcaagctttttacacattcctccccgaagaaccttatcagcgttataaaaaagaggatacgctaatttacaatgtgaaagaaggcggattattttctctgaatattttatag

SEQ ID NO: 27096 - protein, 147 aa, Unknown
  Obtained from environmental sample
  misc_feature (1)..(147): Xaa is any amino acid
MRASQSATYRHGKAAALFPICKKGGLPKCPQVFSLSGPHRDRYQFTHNGEDFTIKASTGQRRLLALLLRTAQALRYSQETRLNPILLLDDVLLEMDGEKRRKFLSALPSYDQAFYTFLPEEPYQRYKKEDTLIYNVKEGGLFSLNIL

SEQ ID NO: 27097 - DNA, 837 bp, Unknown
  Obtained from environmental sample
  misc_feature (1)..(837): n is a, c, g, or t
gtgccccacaacggtaacgtaacaaacgcccttgagattcgccaggacttaaagtgccatggcttacgtttcggcgctaccagcgacagcgaggttatttcatcgctcatggcataccatatgatgaatgaaaataatccgttgtcaggcattatagaagccgcagatatgctgcggggcgcgttttcgcttgcgatagtctgcaacgatgacaagctgattgccatacgcgacccaaacggttttcgccccctatgcatcgggaaaaacgaactcggattcgccgtagtttctgaaagctgcgcccttgatgcctgcgattttaaatttgtaagggatgtgctgcccggcgaggttgttgttatcgagaacggggaaataaaaagcgagggtataaagctaaaaaacaaggaagaggatcggggactttgtatttttgaatacgtttatttcgcgaggccggattcggtaatcgacgggctttctgtatatttaacccggcaaaacatggggcaaatacttgcggaagaacacccggtagacgccgacctggtctgcggagttccggattctggcctggacgctgcgggcggatacagcgaaaaaagcgggatacccttggccgcaggctttgttaaaaatagatacatcggccgcagctttatctatccaacgcaaacccagcgggataacgccgtcaagctcaagctcaaccccctggcggctggtatccacggaaaaaaaatcgtgcttgtggacgattccatcgttcgcggtactacaagcgaaaaaattgtcaggagcctaaaaactcaggggcgaaagaggtacacatga

SEQ ID NO: 27098 - protein, 278 aa, Unknown
  Obtained from environmental sample
  misc_feature (1)..(278): Xaa is any amino acid
MPHNGNVTNALEIRQDLKCHGLRFGATSDSEVISSLMAYHMMNENNPLSGIIEAADMLRGAFSLAIVCNDDKLIAIRDPNGFRPLCIGKNELGFAVVSESCALDACDFKFVRDVLPGEVVVIENGEIKSEGIKLKNKEEDRGLCIFEYVYFARPDSVIDGLSVYLTRQNMGQILAEEHPVDADLVCGVPDSGLDAAGGYSEKSGIPLAAGFVKNRYIGRSFIYPTQTQRDNAVKLKLNPLAAGIHGKKIVLVDDSIVRGTTSEKIVRSLKTQGRKRYT

SEQ ID NO: 27099 - DNA, 765 bp, Unknown
  Obtained from environmental sample
  misc_feature (1)..(765): n is a, c, g, or t
ttgcccgcgccattgaatatgaaagggaacgtcagattgaaatactggaagacggcgggcagattgttcaggaaacgaggcgctgggatgatgaaaaacttgagtcctatggaatgcgttcaaaggaaaacgcgcaggactaccgctattttcccgagcctgatcttctgcccatggagattgatgacgcgtggcttgacagcgtcagaaacaatctgccggaactggcgtatcaaaaacagggaacgctactaccgcgattttaagatacccgaatccgaggcccttgtcctgaccgttcacaaaaatatatgcgatttatttgagaccatcgcgcagaaaagcggacagcccgtagaagcggcgcatcttttaaccggtgaaatcatgcgcntgatgaacaatgccaatgttttgccggaagacctttctatagacgctgataaactttccactctcattacccttattacaaacgggaaaatcaaccgaagcgcgtataaagaaacagttgaagcggtattcacgaacaatgttgatcctgaaaaatacatcaccgaaaagggattgcttatgatcaacgatgacaacgccgttatcgaagcggtaaaagccgtcataactgagaatcaaagctcggttactgaataccgcaccggtaaggaaaaagtgtttgggtttttaatgggtcaggttatgaaaaaacttggcggaaaagggaatcccgacatggcgaagaaaatgctggaagacgcgttgagatag

SEQ ID NO: 27100 - protein, 254 aa, Unknown
  Obtained from environmental sample
  DOMAIN (106)...(253): GatB/Yqey domain
  misc_feature (1)..(254): Xaa is any amino acid
MPAPLNMKGNVRLKYWKTAGRLFRKRGAGMMKNLSPMECVQRKTRRTTAIFPSLIFCPWRLMTRGLTASETICRNWRIKNRERYYRDFKIPESEALVLTVHKNICDLFETIAQKSGQPVEAAHLLTGEIMRXMNNANVLPEDLSIDADKLSTLITLITNGKINRSAYKETVEAVFTNNVDPEKYITEKGLLMINDDNAVIEAVKAVITENQSSVTEYRTGKEKVFGFLMGQVMKKLGGKGNPDMAKKMLEDALR

SEQ ID NO: 27101 - DNA, 789 bp, Unknown
  Obtained from environmental sample
  misc_feature (1)..(789): n is a, c, g, or t
gtgttgccgaagctgaaccgctcggttgtggagtacgccctgaagctcggaatagcccttgactgttccattaccagacactgcaagtttgaccgtaaaaattatttttatcccgatctgcccaaagcttatcaggtatcgcagttgtatatgccgatctgccgggacggtcatcttgatattgaggttgacggacagaaaaaaacaatcagcatacgcgagatacacatggaagaagacgcgggaaaattggtacatgacgcgaaaggcgcggacaccttcatggactttaaccgctgcggcgtgccgctgctggaaattgtttcgcagcccgacttccgtaacgccgccgaggtgatagcctaccttgaaaaattgcgcgagacgctgctgtaccttgacgtgtgcgactgcaagatgcaggaaggctcaatccgcgccgacatcaatctttccctgcgtccttttggcggggagcttggggtgcgcaccgagacaaagaacatgaactcttttaaggcgattgcccgcgccattgaatatgaaagggaacgtcagattgaaatactggaagacggcgggcagattgttcaggaaacgaggcgctgggatgatgaaaaacttgagtcctatggaatgcgttcaaaggaaaacgcgcaggactaccgctattttcccgagcctgatcttctgcccatggagattgatgacgcgtggcttgacagcgtcagaaacaatctgccggaactggcgtatcaaaaacagggaacgctactaccgcgattttaa

SEQ ID NO: 27102 - protein, 262 aa, Unknown
  Obtained from environmental sample
  DOMAIN (210)...(262): PET112 family, C terminal region
  misc_feature (1)..(262): Xaa is any amino acid
MLPKLNRSVVEYALKLGIALDCSITRHCKFDRKNYFYPDLPKAYQVSQLYMPICRDGHLDIEVDGQKKTISIREIHMEEDAGKLVHDAKGADTFMDFNRCGVPLLEIVSQPDFRNAAEVIAYLEKLRETLLYLDVCDCKMQEGSIRADINLSLRPFGGELGVRTETKNMNSFKAIARAIEYERERQIEILEDGGQIVQETRRWDDEKLESYGMRSKENAQDYRYFPEPDLLPMEIDDAWLDSVRNNLPELAYQKQGTLLPRF

SEQ ID NO: 27103 - DNA, 492 bp, Unknown
  Obtained from environmental sample
  misc_feature (1)..(492): n is a, c, g, or t
ttgacgttccgaatcaaaacgaaagtgtttcaaaatgaaacgtttttcttgccaaaatctacggatcatggccttttcggcctcaaaaacgccaaaaaaaagatttggcacgattattgcggtaatcaaggctgtagagttgtatccccgtgcgtaaataaacaaattaactataaacaaaaaactcttttaaggagggctggtagcatgaacgtcaagccaatggaagatcgtgtgattctcaagtccatggaggccgaggctaagaccgccggcggcatcatcatcccggacaacgccaaggagaaaccgcagaagggcgagatcgtggcggtcgggccgggcaagatgaacgacaaggggacgcgcaacgagatgaccgtcaaggtcggcgacaaggtgctctacggcaagtacgccggcaccgaggtcaccatagacggcaatgagtacctcatcgtgcgcgagagcgacatcctggcggtggtgtaa

SEQ ID NO: 27104 - protein, 163 aa, Unknown
  Obtained from environmental sample
  DOMAIN (71)...(163): Chaperonin 10 Kd subunit
  misc_feature (1)..(163): Xaa is any amino acid
MTFRIKTKVFQNETFFLPKSTDHGLFGLKNAKKKIWHDYCGNQGCRVVSPCVNKQINYKQKTLLRRAGSMNVKPMEDRVILKSMEAEAKTAGGIIIPDNAKEKPQKGEIVAVGPGKMNDKGTRNEMTVKVGDKVLYGKYAGTEVTIDGNEYLIVRESDILAVV

SEQ ID NO: 27105 - DNA, 324 bp, Unknown
  Obtained from environmental sample
  misc_feature (1)..(324): n is a, c, g, or t
atggccatggtcaagaccatattacaccaccgccaggatgtcgctctcgcgcacgatgaggtactcattgccgtctatggtgacctcggtgccggcgtacttgccgtagagcaccttgtcgccgaccttgacggtcatctcgttgcgcgtccccttgtcgttcatcttgcccggcccgaccgccacgatctcgcccttctgcggtttctccttggcgttgtccgggatgatgatgccgccggcggtcttagcctcggcctccatggacttgagaatcacacgatcttccattggcttgacgttcatgctaccagccctccttaa

SEQ ID NO: 27106 - protein, 107 aa, Unknown
  Obtained from environmental sample
  misc_feature (1)..(107): Xaa is any amino acid
MAMVKTILHHRQDVALAHDEVLIAVYGDLGAGVLAVEHLVADLDGHLVARPLVVHLARPDRHDLALLRFLLGVVRDDDAAGGLSLGLHGLENHTIFHWLDVHATSPP

SEQ ID NO: 27107 - DNA, 675 bp, Unknown
  Obtained from environmental sample
  misc_feature (1)..(675): n is a, c, g, or t
gtgaaaagccgctttcagcttaactccaaagcgataaaagagcttgaagaagagcaacagcagatgatccgcggcgtcgtggaactgtccgacaccaccgtcaaggaagtaatggttcccagaaccgacaccgtctttattcccgccgacgcctcaaaagaagaactttttgaatgtttaaacgagaacgaacattcccgttatccggtgtatcaggataccgtggatcaggttataggcgtccttcatgtaaaggacgtattaaaagcgcttgtaaacgacaggcccattaacatacgcgagcttgccaggaagcccttttttgtccctgtttccaaacacattgacgatcttttgcgcgaattaaagcggaaaaaagtgcacattgccatagtggttgacgaatacggaggggtgtccgggatcgtttccatggaagacataatagaggaaataatcggcgacattcaggatgaatttgatcaggaaaccgaagatgtgatagaattgggcaagggcgtatggctgtgcgacgccagagtcaacctagaggctttagcggaagaaacaaatctggatcttcccgttgatgattttgacactctgggcggttttgtttttgatcttttcgggaaaatcccggtaaaaaataaaagattgatacaaagaatatga

SEQ ID NO: 27108 - protein, 224 aa, Unknown
  Obtained from environmental sample
  DOMAIN (168)...(219): Transporter associated domain
  misc_feature (1)..(224): Xaa is any amino acid
MKSRFQLNSKAIKELEEEQQQMIRGVVELSDTTVKEVMVPRTDTVFIPADASKEELFECLNENEHSRYPVYQDTVDQVIGVLHVKDVLKALVNDRPINIRELARKPFFVPVSKHIDDLLRELKRKKVHIAIVVDEYGGVSGIVSMEDIIEEIIGDIQDEFDQETEDVIELGKGVWLCDARVNLEALAEETNLDLPVDDFDTLGGFVFDLFGKIPVKNKRLIQRI

SEQ ID NO: 27109 - DNA, 327 bp, Unknown
  Obtained from environmental sample
  misc_feature (1)..(327): n is a, c, g, or t
ttgttaaagtgcttgccggttactatcattccagaatcgagtacccgaaacaaaaagaggaaaaggatgaataaagtaaccgtcaacgctgaagaagttcccctgccttcatggagcgaagatatgtgctgttttgctctgaaagttttggaagaaatcaagcgcggaaactgggaactttccatcctcctgtgcggcgataagaaaataaccgagttaaacgcccaataccgcagcaagaatgaaccgaccgatatactttcgttttttcttggttctgaaatacaaaacggaggggaaacggtctattttccaggtgatatttaa

SEQ ID NO: 27110 - protein, 108 aa, Unknown
  Obtained from environmental sample
  misc_feature (1)..(108): Xaa is any amino acid
MLKCLPVTIIPESSTRNKKRKRMNKVTVNAEEVPLPSWSEDMCCFALKVLEEIKRGNWELSILLCGDKKITELNAQYRSKNEPTDILSFFLGSEIQNGGETVYFPGDI

SEQ ID NO: 27111 - DNA, 525 bp, Unknown
  Obtained from environmental sample
  misc_feature (1)..(525): n is a, c, g, or t
atggaaaaccctggctattttgtggaaaaccagtctgatcataacaaacacgacgaaatagcccctcgcctttcggcgacaataatccgcagccatgtaaaactcggcgtggaaaaagcgcacagtctcggactgccgaaagacgttatcaatattatctcggaacatcacggcaattcgcttatatcgtggttttataacaaagcggcggaaaacgaaacgtctgtgaattacgaggactttacatatccgggcaaccctccgcgttcaaaagaatctgcggttgtcatgttagccgatattacggaagccgcggtcagaacattaaataaacctacggcggggaaaatagataaatttatccagcaattatttgaagataagattgatcacggacagctttcagattcggagctttccttccgcgatctggaaataattaaaaaagcttttgttaaagtgcttgccggttactatcattccagaatcgagtacccgaaacaaaaagaggaaaaggatgaataa

SEQ ID NO: 27112 - protein, 174 aa, Unknown
  Obtained from environmental sample
  misc_feature (1)..(174): Xaa is any amino acid
MENPGYFVENQSDHNKHDEIAPRLSATIIRSHVKLGVEKAHSLGLPKDVINIISEHHGNSLISWFYNKAAENETSVNYEDFTYPGNPPRSKESAVVMLADITEAAVRTLNKPTAGKIDKFIQQLFEDKIDHGQLSDSELSFRDLEIIKKAFVKVLAGYYHSRIEYPKQKEEKDE

SEQ ID NO: 27113 - DNA, 333 bp, Unknown
  Obtained from environmental sample
  misc_feature (1)..(333): n is a, c, g, or t
atgcagtgcgccaattgctcctattcgttgctcgccttggtttgctgggtaacgtggttggttattgcatctacgctctggtttattttcactattatatcggaaacatcgtgtataacagtaactgctttgcccgtgccagtttggatgccttctatgcgccttgctatatcgtctgcgctctgcgcgctctggtttgcaagttcttttatttcacctgccacaacagcaaagcctttgcctgcttcgcctgctgaggctgcctctatggtagcgttcaaagccaaaaggtttgttttgtctgctatcttttttataacatcggtaacctga

SEQ ID NO: 27114 - protein, 110 aa, Unknown
  Obtained from environmental sample
  misc_feature (1)..(110): Xaa is any amino acid
MQCANCSYSLLALVCWVTWLVIASTLWFIFTIISETSCITVTALPVPVWMPSMRLAISSALCALWFASSFISPATTAKPLPASPAEAASMVAFKAKRFVLSAIFFITSVT

SEQ ID NO: 27115 - DNA, 1419 bp, Unknown
  Obtained from environmental sample
  misc_feature (1)..(1419): n is a, c, g, or t
atggggatatattccataaaaaacttgagaacagtctcagacgcaacagacgtcatgtacgaaaaaggagcagttccactaggtatttttgtgagtacctcagaccaaattcaggagcttcgggttaaggctcgtgattggcgtcttgccactacacaagcaaaacgcgaccagattttaaaagatttggacgctatcaacaatgaaataaataagaccatagcagagcagatgaaaacggtacttactgaggctgggaaagttaatttgcaaaaagtgatggatttgacggatgtatatattgctgaaatacgtaaatttgcaaaaaacaccaaaggttatagcgttgagggccttagcacagaagaatttccagacgctttgaataatgccgcaaattcaatgacaaaggctatggaagcagccaaagaatctagagtaagcggagtaagcaaactttcagacgatgcttccgcacaggctgcccagagcataagcacggcaattgtcgttttaatagtggtgattcttctatccgtggctcttggcatattcttaacattctccataacaacacctttgaaagtggttgttgacactctttccaagattgagaaaggggatgtgaccgtccgttccaatttggaccgcggagacgaactaggcattctctccaaagcactggacagcgtagctgcaaggctgcaaaccatattcagaaacctccgccaaaacgcagatacccttgctagttcggcagaggaactctccagtgtgggcaaacaaatatctaacacggcagaagagaacgttagccagagcacctctgttgccagctccacagaacaaacctccgtgaacataaacgccatggcaagcggcgcagaagaagcctccgtgaatgccaacgaggtagcaggcgcagcagagcagatgtccacaaacatgaacaccatagctgcagccatagaagagatgagtgcaagcataagccaaatatctatcaatgctggcgaggcaagcaaggttgcaaaccaagccactgtaaaatctggcgatgccaccaatgttatgaacgaacttggtgctgctgctaaagaaataggtcaggttaccgatgttataaaaaagatagcagacaaaacaaaccttttggctttgaacgctaccatagaggcagcctcagcaggcgaagcaggcaaaggctttgctgttgtggcaggtgaaataaaagaacttgcaaaccagagcgcgcagagcgcagacgatatagcaaggcgcatagaaggcatccaaactggcacgggcaaagcagttactgttatacacgatgtttccgatataatagtgaaaataaaccagagcgtagatgcaataaccaaccacgttacccagcaaaccaaggcgagcaacgaatag

SEQ ID NO: 27116 - protein, 472 aa, Unknown
  Obtained from environmental sample
  DOMAIN (296)...(472): Methyl-accepting chemotaxis protein (MCP) signaling domain
  misc_feature (1)..(472): Xaa is any amino acid
MGIYSIKNLRTVSDATDVMYEKGAVPLGIFVSTSDQIQELRVKARDWRLATTQAKRDQILKDLDAINNEINKTIAEQMKTVLTEAGKVNLQKVMDLTDVYIAEIRKFAKNTKGYSVEGLSTEEFPDALNNAANSMTKAMEAAKESRVSGVSKLSDDASAQAAQSISTAIVVLIVVILLSVALGIFLTFSITTPLKVVVDTLSKIEKGDVTVRSNLDRGDELGILSKALDSVAARLQTIFRNLRQNADTLASSAEELSSVGKQISNTAEENVSQSTSVASSTEQTSVNINAMASGAEEASVNANEVAGAAEQMSTNMNTIAAAIEEMSASISQISINAGEASKVANQATVKSGDATNVMNELGAAAKEIGQVTDVIKKIADKTNLLALNATIEAASAGEAGKGFAVVAGEIKELANQSAQSADDIARRIEGIQTGTGKAVTVIHDVSDIIVKINQSVDAITNHVTQQTKASNE

SEQ ID NO: 27117 - DNA, 873 bp, Unknown
  Obtained from environmental sample
  misc_feature (1)..(873): n is a, c, g, or t
atgccccaaacggcgaatttggaagtcagaggcgaagtgtatatggaacaccgcgcatttgaaaaattaaacgaagaaatgatttcgcttggcaaaacaccttacgcaaacccaagaaacacagcggcaggcagcttaaaactaaaagacccaaaagaaaccgaaaaaagagaacttaggtttttcgcataccaaattccaagcaattttggttctcaactccacagccaaaacttggatttgctaaaaaatttagggttcagggtttttgaatattttgtaaaagattcagtgcagggaatttttgaagctagggattattttgataatttgagaaaaaatttgccctttgatatagacggaatggttgttaaagtgaatagcattttccagcaacaagaggcgggcagaaatacaaaagcacctcgctgggcaatagcgtataaattcaaagcggagcgggtttattcggaacttttgagcattgatgttcaagttgggcgcaccggaaaaattaccccagttgcaaatcttaaaccagttcaacttggcggcactacggtaaaaagagcaacccttcacaactttgacgaaataaaaaggctggatttgcgaataggagattttgcaggcattgaaaaaggtggagaaattatcccgaaaatagtggaggttcaaacagaaaaaagacctccaaatgcagaacctgtgaaagaaccggaattttgccccgtttgcggagaaaaattgcaaaaagaagatgtggatttgcgttgtgaaaatttgcaatgcaaagcacaactgctcggatttttggaatactttgtttctcgcaaggttatggaaattgaaaatctaggcgaagccttttag

SEQ ID NO: 27118 - protein, 290 aa, Unknown
  Obtained from environmental sample
  DOMAIN (241)...(266): NAD-dependent DNA ligase C4 zinc finger domain
  misc_feature (1)..(290): Xaa is any amino acid
MPQTANLEVRGEVYMEHRAFEKLNEEMISLGKTPYANPRNTAAGSLKLKDPKETEKRELRFFAYQIPSNFGSQLHSQNLDLLKNLGFRVFEYFVKDSVQGIFEARDYFDNLRKNLPFDIDGMVVKVNSIFQQQEAGRNTKAPRWAIAYKFKAERVYSELLSIDVQVGRTGKITPVANLKPVQLGGTTVKRATLHNFDEIKRLDLRIGDFAGIEKGGEIIPKIVEVQTEKRPPNAEPVKEPEFCPVCGEKLQKEDVDLRCENLQCKAQLLGFLEYFVSRKVMEIENLGEAF

SEQ ID NO: 27119 - DNA, 720 bp, Unknown
  Obtained from environmental sample
  misc_feature (1)..(720): n is a, c, g, or t
ttgaatgacggctggttcaatactggcgcgaatatccggggcccccagggagaacaaggggagccgggcgaaaagggcgatgacggtgaaccgggcacgccgttcaggataattgccggggttgctgatgaggacgagcttgaggacttggacttatccccggtgctgggggatcacgtccttgtagacgggcaattatacgcctggtcgcctgacgatgatgcctggatagatacgggaatcaatctccgggggcctcagggcgtccaaggattgcagggccttcaaggagagccaggacagcgcggttcgagattctatgtaacatctactggagtgaatcctctgcctgatagttggatgccgggggacttcatactgtacacgggggacgatgacgcgtacttccccaactctgacggtgacgactttgcgaaggggagcattatagaggtgctgagggcgtctgatatggctgatacgcccccggatagaggggaagtcgcctggagggggaacctagctggtcgcaacgggcagaatggggcggacggctctcggatttccggggtgtcctccgaagctgagaacacacacagcctgcctccaacctcacggcgtgtaggcgactggctattggtacgagtgatgaccccattcaggggggggacaggcctgacgtgcccagaggtacgttgctcaggatttcaacatttttga

SEQ ID NO: 27120 - protein, 239 aa, Unknown
  Obtained from environmental sample
  misc_feature (1)..(239): Xaa is any amino acid
MNDGWFNTGANIRGPQGEQGEPGEKGDDGEPGTPFRIIAGVADEDELEDLDLSPVLGDHVLVDGQLYAWSPDDDAWIDTGINLRGPQGVQGLQGLQGEPGQRGSRFYVTSTGVNPLPDSWMPGDFILYTGDDDAYFPNSDGDDFAKGSIIEVLRASDMADTPPDRGEVAWRGNLAGRNGQNGADGSRISGVSSEAENTHSLPPTSRRVGDWLLVRVMTPFRGGTGLTCPEVRCSGFQHF

SEQ ID NO: 27121 - DNA, 522 bp, Unknown
  Obtained from environmental sample
  misc_feature (1)..(522): n is a, c, g, or t
ttgcatggtttttttggcttggttgttttggttcctcttgtgcagagagcgtttaatttgcccgttggcgaaaccgcattcaccggtagcttggtacttgccattatggcactcccaacaatcataacggttgcagaagatgccatgcgcagcacgccgagcgcgatgcgcgaggcaagcctcgctttgggtgcaactcattggcaaactatatacaaagtgattatcccttatgcttcatcgggcatttctgctgcggttattttgggaattggcagggcagttggcgaaactatggcagtgcttatggttacgggaaatgctgctgtgatgccaacgtccttgtttgcgccaattcgcaccattccggcagccatagccgccgaactcggcgaagcacccgcgggcggggcgcactatcaggctttgtttatgctgggttgcattttgtttatgataacccttgtgatgagtatttcgtctgaacttgtttccaagcggcatccggggaagggggtgtaa

SEQ ID NO: 27122 - protein, 173 aa, Unknown
  Obtained from environmental sample
  misc_feature (1)..(173): Xaa is any amino acid
MHGFFGLVVLVPLVQRAFNLPVGETAFTGSLVLAIMALPTIITVAEDAMRSTPSAMREASLALGATHWQTIYKVIIPYASSGISAAVILGIGRAVGETMAVLMVTGNAAVMPTSLFAPIRTIPAAIAAELGEAPAGGAHYQALFMLGCILFMITLVMSISSELVSKRHPGKGV

SEQ ID NO: 27123 - DNA, 696 bp, Unknown
  Obtained from environmental sample
  misc_feature (1)..(696): n is a, c, g, or t
atgaaattgagcaaaatgaaattgagcaaaaaactttctcaaaacatagcattttggattttccgagttctcggagtattggtggttggaattttgttttggattctaggctttataatttacaacggcattggtgcaattaactttgaatttcttttttctgagcccaaagaaggcatgaccaagggcggtatttttcccgccattgttggaacgtgctgccttatagcgggtagtatgctggtggcttttcccattggcgttatgtctgccatatatttgaacgaatacaccgtaaatggaaaaatcgcaaaaatcatacgcacaatgacaaataatttgggcggagttccttctgttatttttggatattcggatggctctgtttgtaaatgcaatgaaatggggagattccattatcgcaggttcatttacgctggggcttttggtgctccctttggtgattcgaaccacagaagaagctttgaaaatggtaccagattcattccgcacggggagctatgctttgggtgcaaacaaattgcaaaccatcaggcgagttgtgctgccaacggcattcccgaatattttaacaggtttaatactagcagttggaagagtttcgggcgaaacagcacccattttattcacggtagctgcttatttcttgccaaaactcccaacgagtatttttga

SEQ ID NO: 27124 - protein, 231 aa, Unknown
  Obtained from environmental sample
  misc_feature (1)..(231): Xaa is any amino acid
MKLSKMKLSKKLSQNIAFWIFRVLGVLVVGILFWILGFIIYNGIGAINFEFLFSEPKEGMTKGGIFPAIVGTCCLIAGSMLVAFPIGVMSAIYLNEYTVNGKIAKIIRTMTNNLGGVPSVIFGYSDGSVCKCNEMGRFHYRRFIYAGAFGAPFGDSNHRRSFENGTRFIPHGELCFGCKQIANHQASCAANGIPEYFNRFNTSSWKSFGRNSTHFIHGSCLFLAKTPNEYF

SEQ ID NO: 27125 - DNA, 498 bp, Unknown
  Obtained from environmental sample
  misc_feature (1)..(498): n is a, c, g, or t
ttggatattcggatggctctgtttgtaaatgcaatgaaatggggagattccattatcgcaggttcatttacgctggggcttttggtgctccctttggtgattcgaaccacagaagaagctttgaaaatggtaccagattcattccgcacggggagctatgctttgggtgcaaacaaattgcaaaccatcaggcgagttgtgctgccaacggcattcccgaatattttaacaggtttaatactagcagttggaagagtttcgggcgaaacagcacccattttattcacggtagctgcttatttcttgccaaaactcccaacgagtatttttgaccaagttatggcacttccatatcatctttatgttatatcaactagtggtacaaatttagaagcaacgcgcccaatggcttatggcacggcacttgtgcttatcactttggttttgtgcataaatttgctggctgcttatttgaggcggcgttttgggaagatgtag

SEQ ID NO: 27126 - protein, 165 aa, Unknown
  Obtained from environmental sample
  misc_feature (1)..(165): Xaa is any amino acid
MDIRMALFVNAMKWGDSIIAGSFTLGLLVLPLVIRTTEEALKMVPDSFRTGSYALGANKLQTIRRVVLPTAFPNILTGLILAVGRVSGETAPILFTVAAYFLPKLPTSIFDQVMALPYHLYVISTSGTNLEATRPMAYGTALVLITLVLCINLLAAYLRRRFGKM

SEQ ID NO: 27127 - DNA, 432 bp, Unknown
  Obtained from environmental sample
  misc_feature (1)..(432): n is a, c, g, or t
ttgaatagaattgaccaaattgctttttctatatttatccaagctatgaccactagccctaaaattctaggcttcatttgcattgccgtcattttggtttacggtcaggaaggatgtcatattttcattgagggtaaggagtatgtgattacgatagcccctattactcctacgaaatctatttctggttcggcaactcctacagtttcagtccttaaagattccagggacaacaagacatacaaaactataaaaatcggcacacagacttggatggcggaaaaccttagctacaatgcgggcggcagcagatgctatgacaatctaggaaacaactgcaaaaaatatggtcgcctttataattggtcaatggctaaatcggcttgccccaaaggctggcatttaccaagcaaagttgagtgggccacatga

SEQ ID NO: 27128 - protein, 143 aa, Unknown
  Obtained from environmental sample
  misc_feature (1)..(143): Xaa is any amino acid
MNRIDQIAFSIFIQAMTTSPKILGFICIAVILVYGQEGCHIFIEGKEYVITIAPITPTKSISGSATPTVSVLKDSRDNKTYKTIKIGTQTWMAENLSYNAGGSRCYDNLGNNCKKYGRLYNWSMAKSACPKGWHLPSKVEWAT

SEQ ID NO: 27129 - DNA, 600 bp, Unknown
  Obtained from environmental sample
  misc_feature (1)..(600): n is a, c, g, or t
atgcctaaaatagcacagataaaacaaaacgctgaatatacctttaaatataataaggacatcggtcgtcatggatggctgcgattgaccccagcctattcagtccgtcttgtggataaaatattgggagaatataataacaacgaattaaatgttttcgatcctttttctggaacaggcacgactggtattgttgctgctaaaaagggacacgtaagcgttctgaatgaaataaatccatttttggtatgggttacgaatcaaaaaacaaaaaattatactgatacggacagaaaaaaaataaaaaaagcttttgcaaatatcgtaaagggaatagatgtgtatatcaataaagacaattggcatcctaatattttcaatattgatagatggtggaataaagagacattgaaaatacttgccgctattcgtacatccattgttaattgtattggtgaaccagaattgtctaatgggtacggtttaatatgggttgctttttgtaggattattattgaaacttcgtcagcggcatttaatcatgtgtcaatgtccttcaacttgaaaaccagcaaatatgaaaaaccaggaattaattga

SEQ ID NO: 27130 - protein, 199 aa, Unknown
  Obtained from environmental sample
  misc_feature (1)..(199): Xaa is any amino acid
MPKIAQIKQNAEYTFKYNKDIGRHGWLRLTPAYSVRLVDKILGEYNNNELNVFDPFSGTGTTGIVAAKKGHVSVLNEINPFLVWVTNQKTKNYTDTDRKKIKKAFANIVKGIDVYINKDNWHPNIFNIDRWWNKETLKILAAIRTSIVNCIGEPELSNGYGLIWVAFCRIIIETSSAAFNHVSMSFNLKTSKYEKPGIN

SEQ ID NO: 27131 - DNA, 891 bp, Unknown
  Obtained from environmental sample
  misc_feature (1)..(891): n is a, c, g, or t
ttggaggtatttatgaaaaatatttgtttattctgtttattatgtatatttataagcaatagttacagccaaaatttatcatttttacccggtaaatatgttgacatgaatgatncatatgcttttgacagcggaaagcggcaatatcattttttccgtttctcggacaatttcagggttgagggatataaaaacgggaataaaaacggcggacattataaaggctcatataccataactgaagatcagggaataaattttttagaaataacatgggatgataaaaccacagataaatatttagtgataggttatgtgggagaaagcggaattagaaaagggaaatttatattctatccctatttttataacgcagacggcgcaccattcttttcaggcggtacaattcccagtgaagactatattacatattttcctcatgaaatagaaacgaaaatactatcctcttcttccgcgttaagggagggaaatattgtttattctgttaataatttaaattccagaattggagtttgctgggcggaaggggtaagcggccagggaataggcgaaaaaataatatttagcgctaaagaagatggaccttatgtaagtttcagcgagctttacatttcaacaggatttgtttcatatcaaaaaccatacctgtacagagaaaattcaaggcccaaaaagataagggtatcacttgaaaatgaaaacccaagaataatagaactggctgacactcctaatttacagtatatcggtatacattggtcaaacaggtacgacaaaaaagatttatggatagaaattcttgaggtttatccgggtacaaaatataccgatacttgtataaatttttttcagaccaaacagacgaactga

SEQ ID NO: 27132 - protein, 296 aa, Unknown
  Obtained from environmental sample
  SIGNAL (1)...(23)
  misc_feature (1)..(296): Xaa is any amino acid
MEVFMKNICLFCLLCIFISNSYSQNLSFLPGKYVDMNDXYAFDSGKRQYHFFRFSDNFRVEGYKNGNKNGGHYKGSYTITEDQGINFLEITWDDKTTDKYLVIGYVGESGIRKGKFIFYPYFYNADGAPFFSGGTIPSEDYITYFPHEIETKILSSSSALREGNIVYSVNNLNSRIGVCWAEGVSGQGIGEKIIFSAKEDGPYVSFSELYISTGFVSYQKPYLYRENSRPKKIRVSLENENPRIIELADTPNLQYIGIHWSNRYDKKDLWIEILEVYPGTKYTDTCINFFQTKQTN

SEQ ID NO: 27133 - DNA, 591 bp, Unknown
  Obtained from environmental sample
  misc_feature (1)..(591): n is a, c, g, or t
atgaggatgctctttcactgttgctgcggcccctgcgcgacggcctgcgttgaaagcctttccgctgaaggtataacgccgacgctgttctggtacaatcccaacattcatccgttaaccgaataccacaaacgccgtgacgctttgtctgcgcttgccgccgccggaaatcacgcgctggaaatgattgacgagtacggactggaatcgtttttaagtggcatgggcggcaaaacggaagctccggaacgctgttcagtatgctatagtatgcgcctggaacgaaccgcggcttacgcggcggaaaaaggttttgacgctttcagcgccagtctgctgatcagcccctggcaacagcacgatgtaattcgcagtctgggcgaagaactggcggcgcgttacggcgtggaatttgtctaccgggactttcggcccctgtttcagcgcagccggatattggcccgcgccttcggtttgtatacgcaaaaatattgcggttgtatgttcagcgaanaaggcagtccccggaaagcggaaaatcaagcgggattggaaaggtggagccgctgtttcagcggcttgccctgctga

SEQ ID NO: 27134 - protein, 196 aa, Unknown
  Obtained from environmental sample
  SIGNAL (1)...(21)
  DOMAIN (3)...(196): Uncharacterized BCR, COG1636
  misc_feature (1)..(196): Xaa is any amino acid
MRMLFHCCCGPCATACVESLSAEGITPTLFWYNPNIHPLTEYHKRRDALSALAAAGNHALEMIDEYGLESFLSGMGGKTEAPERCSVCYSMRLERTAAYAAEKGFDAFSASLLISPWQQHDVIRSLGEELAARYGVEFVYRDFRPLFQRSRILARAFGLYTQKYCGCMFSEXGSPRKAENQAGLERWSRCFSGLPC

SEQ ID NO: 27135 - DNA, 645 bp, Unknown
  Obtained from environmental sample
  misc_feature (1)..(645): n is a, c, g, or t
ttgggtctcccggaaccgggagcaccggaaattgtcgacaacctgataatctttaccgcctcatccagcctgcgccgcgtaggcgtcgcttttgccgatgaaggctttgccaaagtccactggttcaggcagttgctggtagcccgtgacccgcaggatattcccctgaaagcaaaaccttctgagcgggtcaaagattcgggcattattttttatgttcatcagattcccgaaggagcggccgaaattgagtaccggctgattatcaatggcctatggacgaccgatcctgccaatcctaacagccgccgcgacaacgtcgggctttcccgctcggttatttccctaccgcagaaggaaattgttcccagtcccctcaaggggccgcccggcagcctgaattttgtctttaagggacctcccggcgaaacggtgtcggtcgcgggtaattttaacggctgggacccatttatgtatcaactcaaggaaggtccggccggaaattactcgatcaatattcctctcccgccgggaagataccagtatgttttctttcaccggggccaacgctatcttgacccctacaatgccaatcgtatttacgcaaaagacggaaaagccgcttctgaaatcgtgattcaatga

SEQ ID NO: 27136 - protein, 214 aa, Unknown
  Obtained from environmental sample
  misc_feature (1)..(214): Xaa is any amino acid
MGLPEPGAPEIVDNLIIFTASSSLRRVGVAFADEGFAKVHWFRQLLVARDPQDIPLKAKPSERVKDSGIIFYVHQIPEGAAEIEYRLIINGLWTTDPANPNSRRDNVGLSRSVISLPQKEIVPSPLKGPPGSLNFVFKGPPGETVSVAGNFNGWDPFMYQLKEGPAGNYSINIPLPPGRYQYVFFHRGQRYLDPYNANRIYAKDGKAASEIVIQ

SEQ ID NO: 27137 - DNA, 828 bp, Unknown
  Obtained from environmental sample
  misc_feature (1)..(828): n is a, c, g, or t
ttgcgtaaccgttaccgccccggccggaatggcgctggcaagcctcgtgttacgcgacattgtgggccaaaacccgatggagaaacgatgagccagaggtttatgcgaaaggcaagccctgtcgccgtaatacagaaattaacgataaaagcggtgatggaacgaaaactgatctgcgatggcgacaggatactcatagcggtatccggcggcaaggattcaaccgtgcttgcatgggcgctttcctcaatacggcccgcagttaaggcaaattacgaaatttccgctattcacatatccaccgatttttgctcctgctgtaaaaagtcggtactctcacagcggcttgaagaatggggcatacctttcaatgatctctttgtacctgtcatcggcagattgaaagaaggcgaaaaaatgaactgctactggtgttccacccagcgccgcgccgaactgctaaagtacgccgtggaaaacggttttaacaaaattgctctggggcatcaccttgatgacattattgaaacatttttcatgaacctctgcgccaaagccgaaatcagcgccatgcccattctgctcaagtaccgcanattccccgtcagccttatccgcccgcttgcatacatcgaggaaaggcagatcatcgaatacgccaacgagtgtaacatcctcaaagccgcctgtacctgcccctacggaatcaactccaaacgccgcgacatgcgccagcgcataacggccttaaccaacgactcaggcgcggttaaacggcgtatactcaaggcattggcttcaggggaacgggatttgctgacagagtaa

SEQ ID NO: 27138 - protein, 275 aa, Unknown
  Obtained from environmental sample
  DOMAIN (63)...(268): PP-loop family
  misc_feature (1)..(275): Xaa is any amino acid
MRNRYRPGRNGAGKPRVTRHCGPKPDGETMSQRFMRKASPVAVIQKLTIKAVMERKLICDGDRILIAVSGGKDSTVLAWALSSIRPAVKANYEISAIHISTDFCSCCKKSVLSQRLEEWGIPFNDLFVPVIGRLKEGEKMNCYWCSTQRRAELLKYAVENGFNKIALGHHLDDIIETFFMNLCAKAEISAMPILLKYRXFPVSLIRPLAYIEERQIIEYANECNILKAACTCPYGINSKRRDMRQRITALTNDSGAVKRRILKALASGERDLLTE

SEQ ID NO: 27139 - DNA, 786 bp, Unknown
  Obtained from environmental sample
  misc_feature (1)..(786): n is a, c, g, or t
atgatggataatcttatcacagcggttaatgaaggcgaacagccgtctgctgaatatatccgcgctctcgcggatgatttgccgttttccgaaactgaggaaaaaggcggcagcgttttccgcgactcaatgattcaaatcccccacggctttaaccgcgtttatccgcgcacaagaaatcaggcttcctatattcagggtatgagggaaaatgagatatgtttctgcataggtccggcgggtacaggcaaaacctatcttgcgatagcccacgccctgcaaatgcttctttccaaaaaaataagaaaacttgtccttacccgtccggtagtggaagccggcgaaaaccttggatttcttcccggcgatcttgcccaaaaaatagacccgtatttaaaacctttatacgatgctatggaatcgcttgtcccctacgacgtgataaacaaaatggaagaaatacgctcaatagaaatcgccccgcttgcgtacatgagggggcgaagccttaacgactgcatggtaattttagacgaagctcagaacactaccaaagaacagatgaaaatgtttttaacaagaatcggctcgggaacgcgggcggtaatcacgggagacaacacgcaaatcgacctgccccgtaaatcagattcagggcttttgcacgctctggaaatattaaggaacgttgagggattaagtttttctttcttgcatacttgcgacgtggcgagaaatcccttaataaaaaaaataatacaggcatacaatgaaagtgaaaaatga

SEQ ID NO: 27140 - protein, 261 aa, Unknown
  Obtained from environmental sample
  DOMAIN (53)...(257): PhoH-like protein
  misc_feature (1)..(261): Xaa is any amino acid
MMDNLITAVNEGEQPSAEYIRALADDLPFSETEEKGGSVFRDSMIQIPHGFNRVYPRTRNQASYIQGMRENEICFCIGPAGTGKTYLAIAHALQMLLSKKIRKLVLTRPVVEAGENLGFLPGDLAQKIDPYLKPLYDAMESLVPYDVINKMEEIRSIEIAPLAYMRGRSLNDCMVILDEAQNTTKEQMKMFLTRIGSGTRAVITGDNTQIDLPRKSDSGLLHALEILRNVEGLSFSFLHTCDVARNPLIKKIIQAYNESEK

SEQ ID NO: 27141 - DNA, 918 bp, Unknown
  Obtained from environmental sample
  misc_feature (1)..(918): n is a, c, g, or t
gtgaaagaggccgccatggagcttgccgcggcgcagcttaggcgcgagcagcggatagacgacgcggcgctcaacgcggtctacgagctgatacatgcctgcgtaaggccgaccgtgcgcgtcaacaacagggtcacttccgacaggcggcgcgcggcggcggatcaggtgcacgaggtcagcggcaaggtcataaaggacacggagatcgtacgcaaacaccaagaggtaaccccggagatagcccaaaggctgcaatcgctccacgtggctatggagcgtctggagggcggcgccgaaaaacggcaggcgttcggcgcatacgccggacgggtcatactgctgctgataacgctttgcttcctcgccttctacatgagaaagtacaacgaggccatagtgttgaacccgaagagcctcctcgcgctctgcatagtcgtcgtcctgcaaatattggttgtgaggctgggtacgcagtacctgccgctgctcttaaagggcgacggcgtgtccgccgtgatgccggagtaccttatcccggtaactatgggcgcgctcctttgcacgatactcttcggtatgcgggttagcgtgattgtcagcctcttcgtcggcatatacttcgcggtggctgtcggcttcaaccattacttctttctgtacgcgttcctgaattcggtggtggccatattcttcaactacaaaatccgctatcgctggcacttcttcagggccataccgcccatgacgctngtgagcgtggtcatcataaccgtctggcagatgatggcttggcgtttcggcgtcacctatttgatcaacatcacctgcgcgttcgccgggatcgtggcctcggtattcatggcgatggtgctgtcgcccttcttcgagagggtctttgacattacacagatatga

SEQ ID NO: 27142 - protein, 305 aa, Unknown
  Obtained from environmental sample
  DOMAIN (105)...(304): 7TM receptor with intracellular HD hydrolase
  misc_feature (1)..(305): Xaa is any amino acid
MKEAAMELAAAQLRREQRIDDAALNAVYELIHACVRPTVRVNNRVTSDRRRAAADQVHEVSGKVIKDTEIVRKHQEVTPEIAQRLQSLHVAMERLEGGAEKRQAFGAYAGRVILLLITLCFLAFYMRKYNEAIVLNPKSLLALCIVVVLQILVVRLGTQYLPLLLKGDGVSAVMPEYLIPVTMGALLCTILFGMRVSVIVSLFVGIYFAVAVGFNHYFFLYAFLNSVVAIFFNYKIRYRWHFFRAIPPMTLVSVVIITVWQMMAWRFGVTYLINITCAFAGIVASVFMAMVLSPFFERVFDITQI

SEQ ID NO: 27143 - DNA, 333 bp, Unknown
  Obtained from environmental sample
  misc_feature (1)..(333): n is a, c, g, or t
gtggtaaaatccgcgttgacaaaggggaaaaaactagccgacggggtacgcggcatagttagccccgcgaccccggcaatattccgccaagccttagatgagggtttattaacaatcttcatggacgccggttactgcatagccaacccgacgtgcggggcgtgtttgggcatgtctacgggagtgctggctgaaggcgaggtatgcgtatcaacgaccaacagaaatttcaacggcaggatgggaaaaggcggcatggtacacttagcttccccggctaccgccgccgcgagtggaatagcggggaaattggttgatccaagagaagattaa

SEQ ID NO: 27144 - protein, 110 aa, Unknown
  Obtained from environmental sample
  misc_feature (1)..(110): Xaa is any amino acid
MVKSALTKGKKLADGVRGIVSPATPAIFRQALDEGLLTIFMDAGYCIANPTCGACLGMSTGVLAEGEVCVSTTNRNFNGRMGKGGMVHLASPATAAASGIAGKLVDPRED

SEQ ID NO: 27145 - DNA, 543 bp, Unknown
  Obtained from environmental sample
  misc_feature (1)..(543): n is a, c, g, or t
gtggcagatgaacgcaagattgtttttgttgttgatgataataagggaggcctgatcgcgtgcaagaatatattgcagccgtattatgatatttaccctgcccaatcggcggaaaagatgtttgagctgctggaacatatcaagccggatttgatccttctggatgtggaaatgccggatgtaagcggatatgacgcggtgaaaaagctcaaaagcagcgatgagcataaaaatatcccgataatttttctaagcgcaagaaacgactcggcaagcgaactggaaggaataaatcttggcgctttggattatattcacaagccgtttttaagccagttgcttcttagacgtattgaaacgcatctttctcttatagcgtatcggaaaatactgagcgagataaaaaatccgataaatacattcaataaaatgctggacgaagccgcaggagttgatgatccagcgaaattgccggctcatattgcgaatttgaataattctgcgaaacagctgctcggtacaattgacaaatctcggccataa

SEQ ID NO: 27146 - protein, 180 aa, Unknown
  Obtained from environmental sample
  DOMAIN (6)...(119): Response regulator receiver domain
  misc_feature (1)..(180): Xaa is any amino acid
MADERKIVFVVDDNKGGLIACKNILQPYYDIYPAQSAEKMFELLEHIKPDLILLDVEMPDVSGYDAVKKLKSSDEHKNIPIIFLSARNDSASELEGINLGALDYIHKPFLSQLLLRRIETHLSLIAYRKILSEIKNPINTFNKMLDEAAGVDDPAKLPAHIANLNNSAKQLLGTIDKSRP

SEQ ID NO: 27147 - DNA, 1353 bp, Unknown
  Obtained from environmental sample
  misc_feature (1)..(1353): n is a, c, g, or t
gtgggctatgtggttgtgcaagcaccggagcacgttatagaaaacagattaagagaagcgaagttcagcaaaacagggcgtaaatttcagaaagcaagcccgccagatggctttgtcagttgggacaaaacaaactttgaaaggctcataaacggtgaaccggaaaaattgatttcgagattttctatagacgccaatataattttgcagagcatttcccagtccgcaggggatagaaaaagctgccgagttctgcacaatttaattatgaactgccacgattcaaaggaacagaaaaaagtacatataaaaagagctgtccaaatttaccgctctctcatcacgcagggaataattgtgaacggaaaacccgctgtgaatttgagcgaccgctttgccatgcaccaacctctttccctttggcttttagagagcatcgaaaaaatcgcggatttaaacgccataaccctgctaactgttatagaggcaattttggaagaagcggaaatggtacgccgcaagcagctttcaaaactgaaaaacgaagccatcaccgaaatgaaagcacagggagtggagtttgaggagaggcaagcgaggctggaagaaatgcgcccgccggagccggaaaatgcggagtggctggaagcgagttttaacgagtttgcgaaaaagcatccgtgggtgtgcggtgagcggcttcatcctcagatagttgttttggaaatgttcgcggagtgtttttccttttcgggttatataaagcaatacggcttggagcgggtagagggcttgttgcttcgccacataaacagcgtgtacaaagttttggcacacaccgtccccgaaaaatacaagaacgaagaaattttggaaatgcaggattacctgcgtgaaatgctgcaaagggttgactcctcgcttttggacgagtggaaacgtatgcaaaacccggaatttattttgccagaagaaaaagaagaacccctgccgccctttgccgttagcgagcgaatggttaaagcccttgtgctgcaatttttggttgcttggggcaaaggagatttttctgccgccgtcgattgccttgaaccgagcgaggagttcaacgagaaaaaacttgccgctctgcacaagcagtatatagaaacgcacaaggaattacgtttggatgcagagggacgttccaacaaacatacctccatagaaaagaaaggcgatgtttgggaagttaccagaatgttgcaagactatgacgagcaaaatgactggcaaatgatatttgcggtggacttgtcagagtccaagaaaagcgagaggttggttatgaggttttaccaagtccatttttga

SEQ ID NO: 27148 - protein, 450 aa, Unknown
  Obtained from environmental sample
  misc_feature (1)..(450): Xaa is any amino acid
MGYVVVQAPEHVIENRLREAKFSKTGRKFQKASPPDGFVSWDKTNFERLINGEPEKLISRFSIDANIILQSISQSAGDRKSCRVLHNLIMNCHDSKEQKKVHIKRAVQIYRSLITQGIIVNGKPAVNLSDRFAMHQPLSLWLLESIEKIADLNAITLLTVIEAILEEAEMVRRKQLSKLKNEAITEMKAQGVEFEERQARLEEMRPPEPENAEWLEASFNEFAKKHPWVCGERLHPQIVVLEMFAECFSFSGYIKQYGLERVEGLLLRHINSVYKVLAHTVPEKYKNEEILEMQDYLREMLQRVDSSLLDEWKRMQNPEFILPEEKEEPLPPFAVSERMVKALVLQFLVAWGKGDFSAAVDCLEPSEEFNEKKLAALHKQYIETHKELRLDAEGRSNKHTSIEKKGDVWEVTRMLQDYDEQNDWQMIFAVDLSESKKSERLVMRFYQVHF

SEQ ID NO: 27149 - DNA, 384 bp, Unknown
  Obtained from environmental sample
  misc_feature (1)..(384): n is a, c, g, or t
ttgagtcttaacgacttgagaaaattaagagaagaaaaaaaagccgaatttaaaaagcgcggcgctgacggcaaagaaattcagattgttatcggtatgggaacatgcggtatagcggccggggcaaaacaagcttgggacgcgttcaatgacggaattaaagaaaacaaacttacaaattgcatcttaaagcaaacaggctgtatgggattgtgccattccgaacctaccgtagaagttatagttcccggtatgaagcctgtaatttacggcatggtagatgcggaagtaacaaaatctattattcaaaagcatataatcggcaaggaattgttaaacgattatattttggaacgtcctgctgctgatattttggcttcataa

SEQ ID NO: 27150 - protein, 127 aa, Unknown
  Obtained from environmental sample
  misc_feature (1)..(127): Xaa is any amino acid
MSLNDLRKLREEKKAEFKKRGADGKEIQIVIGMGTCGIAAGAKQAWDAFNDGIKENKLTNCILKQTGCMGLCHSEPTVEVIVPGMKPVIYGMVDAEVTKSIIQKHIIGKELLNDYILERPAADILAS

SEQ ID NO: 27151 - DNA, 660 bp, Unknown
  Obtained from environmental sample
  misc_feature (1)..(660): n is a, c, g, or t
ttgcaccgccttaaacattttcccgcccgggatcccgccgcctatgtcaaatatcacctcgcgcagagtcgtccccatcgggacctcgaccagcccggtattgatcaccttgccggccagagcgaataccttggttcccttgctcttctcgctccccaagcgggcgaaccactcggcgccgttcagaaatatcacagggacattcgcccaggtttccacattgttgatcgttgtcggacagccccaaagcccgctcgccgccggaaacggcggacggatgcgcggctgtccgcgccgtccctcaatagagtgcatcagcgcggtttcctcaccgcagacaaaagcgcccgcgccgaggcgaatctccagatcaaagctgaaatcggagcccaaaatatttttgcccaaaaagccccgggcgcgcgccatgtcgatggccttttccacacgcttgatggcgagcggatactcggcgcgaatgtagcagtacccctgaccggcgcctgtggcgtacgcgccgatgatcatgccctcgactatggagaagggatcgccctcaagggtggaacgatccatgaacgcgcccggatcgccctcgtcggcattgcatataacatatttttcatcgccggccgctttgcgcgccaagtcccattttag

SEQ ID NO: 27152 - protein, 219 aa, Unknown
  Obtained from environmental sample
  misc_feature (1)..(219): Xaa is any amino acid
MHRLKHFPARDPAAYVKYHLAQSRPHRDLDQPGIDHLAGQSEYLGSLALLAPQAGEPLGAVQKYHRDIRPGFHIVDRCRTAPKPARRRKRRTDARLSAPSLNRVHQRGFLTADKSARAEANLQIKAEIGAQNIFAQKAPGARHVDGLFHTLDGERILGANVAVPLTGACGVRADDHALDYGEGIALKGGTIHERARIALVGIAYNIFFIAGRFARQVPF

SEQ ID NO: 27153 - DNA, 1101 bp, Unknown
  Obtained from environmental sample
  misc_feature (1)..(1101): n is a, c, g, or t
gtgttaacttttttgcgggaggtgtggccggggtcggagttccccggggcccattcccgggatatacgcctgtggaaatacccgataaatttatggaccgtatcacctccgggcatcccgttttggtggaggtcaagaggagccgactatggggcgttgggggtggagattaaggcggaatgggcggtcgcgggcaagttcaaactcaaggaaataatagatattaaagaggggcattgggccggcttgaaccgctcgctgtcaaagctgtacgaatggatagcgcggtactaccaatccccggtggggagggtcttcaggcctgtcgcggggaaggccatcatcaataaaaaggccaagacgggtacggtttacaggtgtatcgatacgcagacggcttcggcttcgctcagccgccttgatggcgctcgtcccgttctaaaagacagtcagcgcgtcgctctcgaaaaaataagaagccaccccgaaccgctgagcgccgcccagctcggaacccgcttcggcatcgccgcgccgaccctcgcctcgctgtgcaaaaagggctatctgtccaaagagataaagactgtgttccgcgacgccggcgaattctcccgctcttccgccgacgaagaaaagatcaccctttccgccggacagcgcgactgcgtggagcgcgtggcggcctccttctccgcgcccgataaaccgtttctgctctacggcatcacggggagcggcaagacgcacgtgtatgccgaactggccaagcgcgtcttgtccgccggacgcggggtgataatcctcgtgccggagatcagtctcacgccgcagacgatctcgcgcttccgcgccgccatcggcgacgccgtcacggtgatccacagccgcatgtccgacggcgagcggcgcgacagccttcaggagatcgtaaccggccgcccgcgcgccgtggtcggcgtccgcagcgccctgctgtgccccatggacaacttggggctgatcgtatgggaacgagaagcacaaacgttcgtaaaaaccgagcgaccccgaccccagggacaacgcccgcaaatcggcggtgaatgcgggaacccttga

SEQ ID NO: 27154 - protein, 366 aa, Unknown
  Obtained from environmental sample
  DOMAIN (217)...(358): DEAD/DEAH box helicase
  misc_feature (1)..(366): Xaa is any amino acid
MLTFLREVWPGSEFPGAHSRDIRLWKYPINLWTVSPPGIPFWWRSRGADYGALGVEIKAEWAVAGKFKLKEIIDIKEGHWAGLNRSLSKLYEWIARYYQSPVGRVFRPVAGKAIINKKAKTGTVYRCIDTQTASASLSRLDGARPVLKDSQRVALEKIRSHPEPLSAAQLGTRFGIAAPTLASLCKKGYLSKEIKTVFRDAGEFSRSSADEEKITLSAGQRDCVERVAASFSAPDKPFLLYGITGSGKTHVYAELAKRVLSAGRGVIILVPEISLTPQTISRFRAAIGDAVTVIHSRMSDGERRDSLQEIVTGRPRAVVGVRSALLCPMDNLGLIVWEREAQTFVKTERPRPQGQRPQIGGECGNP

SEQ ID NO: 27155 - DNA, 693 bp, Unknown
  Obtained from environmental sample
  misc_feature (1)..(693): n is a, c, g, or t
atgctcgtatgcgatatcaaaaggaatttgggtggattttcccttgacgtaaaccttaccgtgaacccgggcgtaaccgctcttatgggggcgtccggcagcggcaagagcatgacgctgcggtgcatagcgggaatatccaagccggacagcgggcgcatagagctgaacggcgtcacgttgttcgattccgaaaagagaataaacctgccgccgcaggcgcggaacacgggctttatgtttcaggactccgcgctctttcccaacatgacggtgcggcaaaatatcatggccggcgcaaagaggaaaccgcgcaaagagcgcatggcggcggcggcggcgttggctgaaacttttcacatatcgccgcatcttgacaaatacccgcacgaactttccggcggcgagaagcagcgttgcgctttggcgcgaatcatggccggttctcccgatattctcatgctcgacgaaccgttcgccgcgctcgacagccacctgcggtgggagctggagttggagctcgcggcggcgtttcagcgttttcaaaaacccgtcatctacgtatcgcataaccgtgacgaggtgtataggctgtgcggcgacatcgcgattatagaccgcggcaagaatgaggcggcgcgcggcaaatgggaagtgttcgagaacccgaaaaccgtcaggggcgcgcgctga

SEQ ID NO: 27156 - protein, 230 aa, Unknown
  Obtained from environmental sample
  DOMAIN (23)...(208): ABC transporter
  misc_feature (1)..(230): Xaa is any amino acid
MLVCDIKRNLGGFSLDVNLTVNPGVTALMGASGSGKSMTLRCIAGISKPDSGRIELNGVTLFDSEKRINLPPQARNTGFMFQDSALFPNMTVRQNIMAGAKRKPRKERMAAAAALAETFHISPHLDKYPHELSGGEKQRCALARIMAGSPDILMLDEPFAALDSHLRWELELELAAAFQRFQKPVIYVSHNRDEVYRLCGDIAIIDRGKNEAARGKWEVFENPKTVRGAR

SEQ ID NO: 27157 - DNA, 1167 bp, Unknown
  Obtained from environmental sample
  misc_feature (1)..(1167): n is a, c, g, or t
atgtttcgtattcagacattaaacaaaatctccccgctcgggctggatctttttccgcgggacaagtatgaggtagccagcgacattccaaaccccgacgcgattttggttcgcagcgcggaaatgaacaacatggaaattcccgcttccgtgcaggcgatagcgagagcgggagcggggtataataacattcccgtagccaaatgcagcgagagcggggtagtggtttttaatacgccgggcgcaaacgccaacgcggttaaagagcttaccattgcgtccatgcttatttcctcacgcgacattgtgggcgggattaactggatttcttcggtagcgggcaagagcgatattgcggagcttgtagaaaaagaaaaatccaaatacacgggtcctgaaataaaaggcaaggtattgggcgtagtcgggcttggcgcaatcggcgtaatggtcgcgaacaacgcgattgcccttggtatggaagttatcggttatgatccgtacatttccgtagacgcggcatggaatctttccagcgaagttgtccgcgccgatactcttgagggattgcttgcaaaagccgattatatcactctgcatattccgcagagcgaaactaccaaaggccttatagacgcggaaaaattacgcatgatgaaaaaagaagcgcgtattgtcaatttttcccgcgccgggcttgtaaaggataaggatattatcgaagcgctggaatcaggaaaaataagcgcctatgttacggactttcccacgccggatttgtccaactgcaaaaaggttatcagtatcccgcaccttggagcgtcaacgcccgaggcggaagacaactgcgcggttatggcggtaaagcagatcatggattttctggaatgcggcgcaatccgtaattcggttaattttccgcgctgtaaacttgatcagcgtactccgttcagactgcttgtaataaataaaaatattcccaatatgattgggcagattactacaattcttgctggcgcgaatatcaatattctggacttaatcaaccaccatcgtgatgattatggctataacatcattgatatcgaacagcaattatcagagtctatactcgagaagattagcaaagtagatggaattatcagaagtagaacaatcgcaaagtaa

SEQ ID NO: 27158 - protein, 388 aa, Unknown
  Obtained from environmental sample
  DOMAIN (4)...(305): D-isomer specific 2-hydroxyacid dehydrogenase, catalytic domain
  misc_feature (1)..(388): Xaa is any amino acid
MFRIQTLNKISPLGLDLFPRDKYEVASDIPNPDAILVRSAEMNNMEIPASVQAIARAGAGYNNIPVAKCSESGVVVFNTPGANANAVKELTIASMLISSRDIVGGINWISSVAGKSDIAELVEKEKSKYTGPEIKGKVLGVVGLGAIGVMVANNAIALGMEVIGYDPYISVDAAWNLSSEVVRADTLEGLLAKADYITLHIPQSETTKGLIDAEKLRMMKKEARIVNFSRAGLVKDKDIIEALESGKISAYVTDFPTPDLSNCKKVISIPHLGASTPEAEDNCAVMAVKQIMDFLECGAIRNSVNFPRCKLDQRTPFRLLVINKNIPNMIGQITTILAGANINILDLINHHRDDYGYNIIDIEQQLSESILEKISKVDGIIRSRTIAK

SEQ ID NO: 27159 - DNA, 1026 bp, Unknown
  Obtained from environmental sample
  misc_feature (1)..(1026): n is a, c, g, or t
ttgataatatacgctattttatttgcgtttatcacaaagtatgataccatatataatggaaaagggggagttatgcccgttgaatatttaatggcggtagacgcgggaacaagcagcgtccgcgttgttatttttgattttaacggcagtcagattgactgtgttcaaaaagaatggaaacacctggaagactcccggtatcccggcagtatggattttgactggagaacaaactggtaccttaccagttcctgcataagggaagtcatggcggaaaccggcattaaacccgaacaaatcgcggcgctttccagtacctgtatgagggaaggaattgtgctntacgacgcggcgggatcggaaatatgggcatgcgccaatgtagacgcgcgcgcgggagacgaagtcgcccagttaaaaatgatagacccgaatcttgaacgtgaattatatatggaatccggccagactttcgcgcttggagccttgccccgtcttctgtgggtaaagaacaaaatgcctgatatttacagcagaattgcccgtataggaatgtttaatgactggatcctatataaactttcaggcgtactggctgtagagccaagcaacggttcaaccaccgggcttttcgatctaaaaacaagaaaatgggataaaagcatagcccaacgctgcgacttgcgcgacgatatttttccggacgtaatagagtgcggaaatgttttggcgaaagtatccaaaaccggttcggcgcaaaccggcctgcttgaaggcactcctcttgtcgtaggcggcggagactgccagcttggcacaataggagtgggaatcgccaaccctaacgaagccgttgttttcggcggcagtttctggcagtacgaatacaacaccgacaaagcgaactgtcctcaaaaatgcgacgtacggataaactgccacgccgtagaaaaccctgtggcaatacgaggcgctcgccttaatccgggaataataatgcgctgtacagagacgctttcgcgataa

SEQ ID NO: 27160 - protein, 341 aa, Unknown
  Obtained from environmental sample
  DOMAIN (29)...(275): FGGY family of carbohydrate kinases, N-terminal domain
  misc_feature (1)..(341): Xaa is any amino acid
MIIYAILFAFITKYDTIYNGKGGVMPVEYLMAVDAGTSSVRVVIFDFNGSQIDCVQKEWKHLEDSRYPGSMDFDWRTNWYLTSSCIREVMAETGIKPEQIAALSSTCMREGIVLYDAAGSEIWACANVDARAGDEVAQLKMIDPNLERELYMESGQTFALGALPRLLWVKNKMPDIYSRIARIGMFNDWILYKLSGVLAVEPSNGSTTGLFDLKTRKWDKSIAQRCDLRDDIFPDVIECGNVLAKVSKTGSAQTGLLEGTPLVVGGGDCQLGTIGVGIANPNEAVVFGGSFWQYEYNTDKANCPQKCDVRINCHAVENPVAIRGARLNPGIIMRCTETLSR

SEQ ID NO: 27161 - DNA, 582 bp, Unknown
  Obtained from environmental sample
  misc_feature (1)..(582): n is a, c, g, or t
ttggaggcaattatggcggatatggaaggaacaaaagtagagaaaaactaccatattgacgtaccttttaagacaagcggaaattttcatgtaaaaggcgcggcaaatcttgattggggcatgaaaaaacatttaactaatatttttaaccccagaagcggcaatactgttatgttcgcttttgatcacggctatttcatgggttcagtctcaggtcttgaacggctggacatacttatcccccaattaatcgaccatattgacgtgcttatggcgacccgcggcgcgctcagaacctgcgtaaagccgagtttcaggaaaggtatcgccctacgcgtgtccgccggctcgtcaatgataaacgacgacctaagccatgagcttgtctctgttgatattgaggacgctatccgcatgaacgcggactgcctcgcggttcaaaccttcataggcgcggacggccagctttcaagcatagacaatctatccaaagcgataaacgctggcttgccgtacagcatacccactttaggcgttatagccgtgggaaaaaaacatggagcgcacagaccagtactttaa

SEQ ID NO: 27162 - protein, 193 aa, Unknown
  Obtained from environmental sample
  misc_feature (1)..(193): Xaa is any amino acid
MEAIMADMEGTKVEKNYHIDVPFKTSGNFHVKGAANLDWGMKKHLTNIFNPRSGNTVMFAFDHGYFMGSVSGLERLDILIPQLIDHIDVLMATRGALRTCVKPSFRKGIALRVSAGSSMINDDLSHELVSVDIEDAIRMNADCLAVQTFIGADGQLSSIDNLSKAINAGLPYSIPTLGVIAVGKKHGAHRPVL

SEQ ID NO: 27163 - DNA, 882 bp, Unknown
  Obtained from environmental sample
  misc_feature (1)..(882): n is a, c, g, or t
atgtcttgggctttaaaaggaatgaaaatcctttacattgccgaaattgtcggaaaaacaggaatttacgccctaaagaaatgcctgcccgagcttaaaaacacaaaaaaaccagatttcatcattgcctgtgccgacagtgccactggcggaagcggtttgggaagaaaccacgccgcttacatccggaaacttggagtacaggtaataacaaccggggaatgttgcttttataaaaaggatttgaccgaaaattttgcgaaaattccctatgttttaaggcctgacaacctaaaccccgaagccccagggcttggctcgcgaatttatacgacaacaaaggaaaaccctgcctccaaaaaagcggcggtagcagtccttttgggccagagcagtttcggcaggcttcacagcaacaaccctttttcgtccctccccgcccttctggaaagactccgccaggaaactccctttgttattcttgatttccattcccaggcaaccgcagaaaagcagatgttttttgccatggccgacggcctctgctctgcagttatcggctcgcatactcgtgttcaaactgccgacgagcggatcctcccaggtggaaccgcagttatcaccgacgctggccgtaccggcagcatcgagtcggtcgggggaaacgacagggacagccggataaacgagtacctttccggcattcccgactggacaaaagacgcctgggaaaagccggaactacagggagtttttattgaaatagccgagaacggaaaggccctttcgattgagcgcattcgcgccagcgcaccgcctgttgctgaaagcggaaacgacatacccgaagatgacgccaatgcggggaacatccatgactga

SEQ ID NO: 27164 - protein, 293 aa, Unknown
  Obtained from environmental sample
  misc_feature (1)..(293): Xaa is any amino acid
MSWALKGMKILYIAEIVGKTGIYALKKCLPELKNTKKPDFIIACADSATGGSGLGRNHAAYIRKLGVQVITTGECCFYKKDLTENFAKIPYVLRPDNLNPEAPGLGSRIYTTTKENPASKKAAVAVLLGQSSFGRLHSNNPFSSLPALLERLRQETPFVILDFHSQATAEKQMFFAMADGLCSAVIGSHTRVQTADERILPGGTAVITDAGRTGSIESVGGNDRDSRINEYLSGIPDWTKDAWEKPELQGVFIEIAENGKALSIERIRASAPPVAESGNDIPEDDANAGNIHD

SEQ ID NO: 27165 - DNA, 420 bp, Unknown
  Obtained from environmental sample
  misc_feature (1)..(420): n is a, c, g, or t
ttgggggagagggggggggaaaaacacaaaaaaatatttttattttgggggggggggggccaaaaggaggttttttttttttttttttttttaaaaaaaaaaaaaaaaaacaaccttttttttttggggccccccccaaaaaaaaaaattttttttttaataacccccccccctgggggggggggggggtttttttttttttttaaaaaaaaaaggggaaaaaccccgccgggggtttttttttttttttccccaccaaaaaatttttttgtgggggcccccccccccctcttttttttaaagggggtgttttttttctctttttccaaaaattttttatgggccttttttttttttttttttagagacccccttccccggaaatttttagatttttcaggggggggggccggattttga

SEQ ID NO: 27166 - protein, 139 aa, Unknown
  Obtained from environmental sample
  misc_feature (1)..(139): Xaa is any amino acid
MGERGGEKHKKIFLFWGGGGQKEVFFFFFFLKKKKKNNLFFLGPPPKKKIFFLITPPPGGGGGFFFFFKKKRGKTPPGVFFFFSPPKNFFVGAPPPLFFLKGVFFFSFSKNFLWAFFFFFFRDPLPRKFLDFSGGGAGF

SEQ ID NO: 27167 - DNA, 882 bp, Unknown
  Obtained from environmental sample
  misc_feature (1)..(882): n is a, c, g, or t
atgaaaaaaggacattccgtttatttaatgcctccggggggttcccgcttgcgggcgttgcgggtgccgctgtggctcttggtggtcgctttggtgctggctgtcgtcggcgccgtgggcttcttcgttccgcttgacaggatgatgctgaccgatcaggagctggcgcagggcaacacgcttcgcaagcagaacgaccgcttgtcgagcaacatcggctttactctgaagcatctgagcgccctcaaggagcggatagggcgtatacagggcgccaaggagcagcactttgagtccatagggcttttggacaagccgcggcctgtgaagccgccgcagaagacgccggccgtggggctgtcgccggcggcggtgctccgccacgtcagcgagtacgagaaggttttggccggtttcgccctctctgttggcgacgataagcgcaacctcttcgacacgattccggtttgccacccggtccagccgtcgcgttccgtgataacaaggcggttcgggatgaccactgacccgttcaccagcaagcccaagatgcactacgggattgacatagcggcggaggtgggcgcccccattgtggccaccgcggtcggcgtgataacccaggtggacgccgacctcgtttggggcaagcgcgtgaccataacccacggccggggcttcaggacggtctacgcccacatgggcacggtgaaggcggtcaagggcaagcctgtggcgcgcggcgatgagattgggacggtgggcacgtccggcctcaccaccgggccgcacctccactacgagctttggaacaacgacaaacaacagaacccggaggagtatttctttccggaggagatcgctgtaagcggcgccccatga

SEQ ID NO: 27168 - protein, 293 aa, Unknown
  Obtained from environmental sample
  DOMAIN (183)...(278): Peptidase family M23
  misc_feature (1)..(293): Xaa is any amino acid
MKKGHSVYLMPPGGSRLRALRVPLWLLVVALVLAVVGAVGFFVPLDRMMLTDQELAQGNTLRKQNDRLSSNIGFTLKHLSALKERIGRIQGAKEQHFESIGLLDKPRPVKPPQKTPAVGLSPAAVLRHVSEYEKVLAGFALSVGDDKRNLFDTIPVCHPVQPSRSVITRRFGMTTDPFTSKPKMHYGIDIAAEVGAPIVATAVGVITQVDADLVWGKRVTITHGRGFRTVYAHMGTVKAVKGKPVARGDEIGTVGTSGLTTGPHLHYELWNNDKQQNPEEYFFPEEIAVSGAP

SEQ ID NO: 27169 - DNA, 783 bp, Unknown
  Obtained from environmental sample
  misc_feature (1)..(783): n is a, c, g, or t
ttgttttttttgtatctcccngcttttgcgcaggaacgtattattgataacgccggccttttaagctatggggaaaaaactaaactaaatgaaataatttctaccgtcgcttcaaaatttaattntgatctggtaattgttacggaaaatagtattggcgaaaccaatcctatggtgtacgcggatgatttttttgattataaaggttacggtcttggaccgaataaggacggctgtctttttttattggtaaccggaagccgggactactggttcagtaccgcgggcagtggcataggaatttataactctcccaggttaaatatatcgaaaggcagtttaaataaattgagcgacgatgtcgtgaaattgcttaagaaagacaactattacggagcattcagggcatttctgcttgattggaaagaattccttacccttgacgcaaagggcaggagttacaatttcttttaccaatggaatcttgttttggtattaatcgtctggggcacggcgtttgcaataggttttattgttgtgcaagtctggaaaacaggaatgaatacggctcttttgcaaactcaggccgctgcctatgtggttcccggaagcctcgcgtttaaagagaaaaacgatattttcctttacagtacggttactaaatcagaacggcagaccgaaactactacttcaagcggcggcggcagaagcggcggcggagggggaggttctcacacaggttcttccggcagttctcacggcggcggtggcggcaaatattaa

SEQ ID NO: 27170 - protein, 260 aa, Unknown
  Obtained from environmental sample
  misc_feature (1)..(260): Xaa is any amino acid
MFFLYLPAFAQERIIDNAGLLSYGEKTKLNEIISTVASKFNXDLVIVTENSIGETNPMVYADDFFDYKGYGLGPNKDGCLFLLVTGSRDYWFSTAGSGIGIYNSPRLNISKGSLNKLSDDVVKLLKKDNYYGAFRAFLLDWKEFLTLDAKGRSYNFFYQWNLVLVLIVWGTAFAIGFIVVQVWKTGMNTALLQTQAAAYVVPGSLAFKEKNDIFLYSTVTKSERQTETTTSSGGGRSGGGGGGSHTGSSGSSHGGGGGKY

SEQ ID NO: 27171 - DNA, 501 bp, Unknown
  Obtained from environmental sample
  misc_feature (1)..(501): n is a, c, g, or t
gtggtgcgcgatggcagcatgcagtttgaaaaaattcctgtggatggctccgaaagaatggatgacagctacatggacgctatagaacctttcgattatacccagttaaaagatttccagaccgcttttctttcgggttatctgacggaaaaatacgatgtggacgcggagaaaagcaaggaaagggcggtacagagaatcaagtcaacggtggagaccgagtttgcaaaatccgttacaggatatggatcggtcagtgccgaaagctccgcgataggcgtggaaaacggcaaggtgagttacagccttttcccggtgtggatactcaataccaaatataataaagaaaattacctgtttttaatgaacggacagtcaggccgccttgtcggaaggctgcctgccgattccggcaagtcctggaaataccggcttttgtttaccggtattttgggcgcggtctttacgattgtcattcaggctttgcggatattcctgtag

SEQ ID NO: 27172 - protein, 166 aa, Unknown
  Obtained from environmental sample
  misc_feature (1)..(166): Xaa is any amino acid
MVRDGSMQFEKIPVDGSERMDDSYMDAIEPFDYTQLKDFQTAFLSGYLTEKYDVDAEKSKERAVQRIKSTVETEFAKSVTGYGSVSAESSAIGVENGKVSYSLFPVWILNTKYNKENYLFLMNGQSGRLVGRLPADSGKSWKYRLLFTGILGAVFTIVIQALRIFL

SEQ ID NO: 27173 - DNA, 444 bp, Unknown
  Obtained from environmental sample
  misc_feature (1)..(444): n is a, c, g, or t
ttggacttgggctattcaaggcagagtcgcgctccacacacacaaagtttaacccagggaaaaattatgaaaacactccgcatcactttggaaggcaaaacatacgatgttgccgttgaagttcttggcgaaaatgccagcgcacccgcaccagttgcatctgcccccgcgcaagcggcggctcctgttgcagcaccaccacaagcacctgctgctccggcacccgcaggcgcaggttccgtgcttagcccaatggctgggcaggttatgaaaataaaggtggctgttggcgctactgttagccaaaatcaagaagtaatagttttggaagccatgaaaatggaaactccaatatatgctcctgccgcaggcacggttaaagctataagcgttaaagaaggcgaagctgttgcagaagggcaggctttgctcacaataggttaa

SEQ ID NO: 27174 - protein, 147 aa, Unknown
  Obtained from environmental sample
  DOMAIN (79)...(146): Biotin-requiring enzyme
  misc_feature (1)..(147): Xaa is any amino acid
MDLGYSRQSRAPHTQSLTQGKIMKTLRITLEGKTYDVAVEVLGENASAPAPVASAPAQAAAPVAAPPQAPAAPAPAGAGSVLSPMAGQVMKIKVAVGATVSQNQEVIVLEAMKMETPIYAPAAGTVKAISVKEGEAVAEGQALLTIG

SEQ ID NO: 27175 - DNA, 774 bp, Unknown
  Obtained from environmental sample
  misc_feature (1)..(774): n is a, c, g, or t
atgctccaaatctcaaacaaaacattcagctcgcggcttttcttgggaagcggcaagtttgcctcaccgcaagaaatggttgttgctttgcaagaatcgcaaagcgaaatgctaactgttgctttaaagcgaattggaaaaaatcaaaaagaagattccattttgagtgcgttaaaagatttcaaaggacagattttgccaaatacctctggtgcgcgaaccgcaaaagaagccgtgtttgcggcgcaaatggcaagggaagcacttggtacaaattgggtgaaattagaaattcatcccgaccaaaaatatttgctcccagacccaattgaaacattgaacgctgccgcagagcttgcaaaagatggctttgtggttttgccatatattcaggcagatcctgttttgtgcaagaggctggaagactgtggctctgcggctgttatgccacttggttcgccaataggttcaaacagaggtttgcaaacagaggcaatgctaaaaataataattgctcaaagcaaggttccagttgtgatagacgcgggcataggtgcgccatctcacgcttgcctcgctatggaaatgggtgcagatgccgttttggtgaacaccgccattgccattgcacccaaccctgcggttatggcaaaatgctttaaactagcggtagaaagcggaagaatggcttacgaaagcggtttgcctttgcaggcagaaaatgcagttgccagcagcccgctcacggacttcctaaaccagtccacgcaatag

SEQ ID NO: 27176 - protein, 257 aa, Unknown
  Obtained from environmental sample
  DOMAIN (1)...(253): Thiazole biosynthesis protein ThiG
  misc_feature (1)..(257): Xaa is any amino acid
MLQISNKTFSSRLFLGSGKFASPQEMVVALQESQSEMLTVALKRIGKNQKEDSILSALKDFKGQILPNTSGARTAKEAVFAAQMAREALGTNWVKLEIHPDQKYLLPDPIETLNAAAELAKDGFVVLPYIQADPVLCKRLEDCGSAAVMPLGSPIGSNRGLQTEAMLKIIIAQSKVPVVIDAGIGAPSHACLAMEMGADAVLVNTAIAIAPNPAVMAKCFKLAVESGRMAYESGLPLQAENAVASSPLTDFLNQSTQ

SEQ ID NO: 27177 - DNA, 510 bp, Unknown
  Obtained from environmental sample
  misc_feature (1)..(510): n is a, c, g, or t
atgttttgtttgagatttggagcattttggggtaatgtagaaattactaaattcattaatatgtacgatattctagttataggcgcaggcattgcgggcttaactgttgctttgaaggcggcagagagcggcaagagcgttttgcttttaacaaagggtgctagtccagacggttcaacaaactatgcgcaagggggcattgcctctgtaacatcgccagaagattcttttgagagccatattgcagatactttggaagctggagatggattgtgcaaaaaaaggcaggtggaaattttaacaaaaaatgcgccaaaagccatagagcagttgctcaaatggggagttaatttcacaacatcaaaaaataatgaaaatgcttttgatttgcatttggaaggtgggcacagttttaggcgaattttgcacaccgcagacttaacaggcaaagaaataatgagggctttgctcgcagagttagacatcgctcgcaggaatagactttattga

SEQ ID NO: 27178 - protein, 169 aa, Unknown
  Obtained from environmental sample
  misc_feature (1)..(169): Xaa is any amino acid
MFCLRFGAFWGNVEITKFINMYDILVIGAGIAGLTVALKAAESGKSVLLLTKGASPDGSTNYAQGGIASVTSPEDSFESHIADTLEAGDGLCKKRQVEILTKNAPKAIEQLLKWGVNFTTSKNNENAFDLHLEGGHSFRRILHTADLTGKEIMRALLAELDIARRNRLY

SEQ ID NO: 27179 - DNA, 1044 bp, Unknown
  Obtained from environmental sample
  misc_feature (1)..(1044): n is a, c, g, or t
ttggagcgagggagggcgtanccctccccttatatgaatttgattttgactttaacgcttttaaagatcggaataaatacaataatgatatccgtatacgatagagaatacgacctattagttataggcgagagcatggttgagttcgcattcgacggggacatcgtgaactccggctcgttcaagatggacgtcggcggggcggacatcgtcgtcgccgccaccgcggcgcggttgggctcaaaggtgcggctgatatccgccatagcgcacgaccagtttcacggcttcatacgcgaacggcttacggcgcagaaaatcgacatcagcttggtgaccacctgccagcaatcctacaacggaatctacttcacgagcacaaagtacccggaataccgcgaatacctgatccaccaccccggcacggcaagcaggcacattataccgaccctcgcaaacccggagtatgtggagaacgcgagaatagtctacgcgtcaagcgaattgcagtcggtctcgccccaaacgcggcgcaccgtcttcaacgccttcctattcgcgcacaccaacaaaataatggtcgcctacgactgcaacctgcggccgcaacgctgggcctggtcgttcgacgacgcccgcgaaggcttgtggagcgtgctgtcgcttgtagacgtcttcttcgtatcgtgcccggaggagtccaaggcgctgttcggctacgagcgtccgatagacgtgataggcttcctgctgaacagaggcgtgggcacagtggtggtcaagatgggcgccgacgggtgcatggtcggccacgacaaaagcgtaaaaaccttcccgcaaccgttagaaaacgacggaaccggttcgttcaaaactccggccctggtgggcagcgccttcaacggcgccttcctcaacagcatagccaacggctacgatcccttcgcggcggcggaactggcaaactctgtggcgctgttcaaaggaataaaggggtggggtattgattcgctgcctaccgtggacgattttcgtaaggagtag

SEQ ID NO: 27180 - protein, 347 aa, Unknown
  Obtained from environmental sample
  DOMAIN (36)...(341): pfkB family carbohydrate kinase
  misc_feature (1)..(347): Xaa is any amino acid
MERGRAXPSPYMNLILTLTLLKIGINTIMISVYDREYDLLVIGESMVEFAFDGDIVNSGSFKMDVGGADIVVAATAARLGSKVRLISAIAHDQFHGFIRERLTAQKIDISLVTTCQQSYNGIYFTSTKYPEYREYLIHHPGTASRHIIPTLANPEYVENARIVYASSELQSVSPQTRRTVFNAFLFAHTNKIMVAYDCNLRPQRWAWSFDDAREGLWSVLSLVDVFFVSCPEESKALFGYERPIDVIGFLLNRGVGTVVVKMGADGCMVGHDKSVKTFPQPLENDGTGSFKTPALVGSAFNGAFLNSIANGYDPFAAAELANSVALFKGIKGWGIDSLPTVDDFRKE

SEQ ID NO: 27181 - DNA, 486 bp, Unknown
  Obtained from environmental sample
  misc_feature (1)..(486): n is a, c, g, or t
gtgataatgaccgggcttgaaaacggcattttccccagagaggataaaaaggacgaggaacttgaagaagaacgcaggcttttttatgtgggcgtgacgcgggcaatggacgaactctacctgacttcctgtatgatgaggcgcatgtacggtaaaatttcgcctatgcagccctcgctttttctgcacgagattgacgcaggctgtcttaaaataaacagcatcgcaagcggatttgaaaccgggaagcctatggcaagacagacttttaatccgtattattttgataaagagctagaagatcgcgccggctggaaacgcggacagcggctgttccacgaaaattacggttatggggcggttatggaagtacaggacagtgaagacggccctgtagtgcgcgtccgcttcgacaacggaaaagaaacccgctttttaagcgaataccagggacgcgcctttgaaaaaatgggagctgattattaa

SEQ ID NO: 27182 - protein, 161 aa, Unknown
  Obtained from environmental sample
  misc_feature (1)..(161): Xaa is any amino acid
MIMTGLENGIFPREDKKDEELEEERRLFYVGVTRAMDELYLTSCMMRRMYGKISPMQPSLFLHEIDAGCLKINSIASGFETGKPMARQTFNPYYFDKELEDRAGWKRGQRLFHENYGYGAVMEVQDSEDGPVVRVRFDNGKETRFLSEYQGRAFEKMGADY

SEQ ID NO: 27183 - DNA, 393 bp, Unknown
  Obtained from environmental sample
  misc_feature (1)..(393): n is a, c, g, or t
gtgaaatttgcccgtaaagtgatgatacgaaaaagaagtaaaaaccaagtagttagtgtttatgattttgacatgaatacagctgagtccatgctgaatattctgcggttcccggctcctgacagattatggcttgattttgttcatcaaaacagacggagtatatataacggcgcaattccggatttagttattgggtctgttgccaatgatgatgtttttgcaacattgattgtatatgaacaaggtattttaaacgtagaacaaactcttgaagcgttaaaaatcaaggaattatataatcaatttgtatttaaaactgataaagctttatctttgttaaaatatgttagttcttttgaaccaatagcggggcagatttatgactcctga

SEQ ID NO: 27184 - protein, 130 aa, Unknown
  Obtained from environmental sample
  misc_feature (1)..(130): Xaa is any amino acid
MKFARKVMIRKRSKNQVVSVYDFDMNTAESMLNILRFPAPDRLWLDFVHQNRRSIYNGAIPDLVIGSVANDDVFATLIVYEQGILNVEQTLEALKIKELYNQFVFKTDKALSLLKYVSSFEPIAGQIYDS

SEQ ID NO: 27185 - DNA, 399 bp, Unknown
  Obtained from environmental sample
  misc_feature (1)..(399): n is a, c, g, or t
gtgttctgtccgaggcctttgttcccatctctatatctgcgacttcactggttaaaacggttttcccgcctacgggagtttgacgtttttaaggaagctttttttgcgcgggaaccgtattcatttaaagaaatactttttgcagacataaatgaatatttaacaaaccggcctctgttagacgaaaggatcatcgcttttataaacgagataaacgataaagatataaactcgcttttaaaatacgccgattctgaagggaatacctatgaacgaaatttcggtggccttattatgcacagctttaaccacgacacccatcaccggggcatgatctcgttatgtctggaaatgcttggccgggaaaacgattttgcttctttcaacgctgtaatctaa

SEQ ID NO: 27186 - protein, 132 aa, Unknown
  Obtained from environmental sample
  misc_feature (1)..(132): Xaa is any amino acid
MFCPRPLFPSLYLRLHWLKRFSRLREFDVFKEAFFAREPYSFKEILFADINEYLTNRPLLDERIIAFINEINDKDINSLLKYADSEGNTYERNFGGLIMHSFNHDTHHRGMISLCLEMLGRENDFASFNAVI

SEQ ID NO: 27187 - DNA, 879 bp, Unknown
  Obtained from environmental sample
  misc_feature (1)..(879): n is a, c, g, or t
atgccaaaggagtgttttatgataattaatcacaacttgagcgcaatgttcgccgacagatcccttaaagtcactaatgttagtcttgacaaaaatatggagaaactgtccagcggcttgcgaatcaaccgcgcaggtgatgatgcttcagggctcgctgtttctgagaagatgcggagccaaatccgcggcttgaatcaggcgtcaacaaacgcccagaacggtatttcattcattcaggtaacggaaggctatctccaggaatccgaggatattattcagcgcctgcgtgagttggcagtgcaagccgccaacggtatctataccgacgaggatcgcacgtacatccagatcgaagtctcggccctggtcgccgaagtagacaggattgcgtcgcacgcccagtttaacgggatgaatctgttaaccggacgcttcggccggcctgtgggtgaaaatatagtcaccgcctctatgtggttccatatcggcgccaacatggaccatcggacgcaggtgtatatcggcactatgacggcgaaggggcttggcatccgcaacgtcggcgatgatacgtttatttcgttgtccgggccggacagcgccaaccgcgccattggaacccttgatgtagcgctaaaaagaataaacaaacaacgggccgatctcggagcctaccagaaccgccttgagcacgcagtccgcggtattaacatcggcgccgaaaacctgcaagcctcggaatcccgcatcagggacgccgacatggccaatgagacagtcacctacaccaagaacatgatcctcacccagtccggcacagccatgctggcccaggcaaatcagaaaggccaaacggtacttcagctcctgcagtaa

SEQ ID NO: 27188 - protein, 292 aa, Unknown
  Obtained from environmental sample
  DOMAIN (199)...(270): Bacterial flagellin C-terminus
  misc_feature (1)..(292): Xaa is any amino acid
MPKECFMIINHNLSAMFADRSLKVTNVSLDKNMEKLSSGLRINRAGDDASGLAVSEKMRSQIRGLNQASTNAQNGISFIQVTEGYLQESEDIIQRLRELAVQAANGIYTDEDRTYIQIEVSALVAEVDRIASHAQFNGMNLLTGRFGRPVGENIVTASMWFHIGANMDHRTQVYIGTMTAKGLGIRNVGDDTFISLSGPDSANRAIGTLDVALKRINKQRADLGAYQNRLEHAVRGINIGAENLQASESRIRDADMANETVTYTKNMILTQSGTAMLAQANQKGQTVLQLLQ

SEQ ID NO: 27189 - DNA, 849 bp, Unknown
  Obtained from environmental sample
  misc_feature (1)..(849): n is a, c, g, or t
gtgaatggcattatcggttacggctgtcatgttttttacggttccaaggcggtgcgctttgtcatgggccgcaactgcaatctgaaatacggagcgcggcttatccattcagtgttaggcgataattcaacggtgtcctgctgtgagattcttaataacctgatctttcccgtgcatgaacagcatcacaataattcgttcctcatcgccggcatgattcaaggaatgtccaacatggcggctgctgccactatcggcagcaaccacaacagccgggcaaatgacggcgagatacgggcaaagcggggtttttggccgagccttgccgtatcattaaaacattcatgctgtttcgcgtcctttaccattattgccaaaggggaatatccctcggaactgaatatccctttgcctttttccctgattaacaacaatgttcataaaaaccggcttgagatagtgcccgcttatttctggattcacaacctgtacgcccttgaacggaattcatggaaagccctcgaccgcgaccgccgcacggttaaagtccagcacattgaaacggattatcttgcccctgatacggcggaagaaataatcaccgccctttacctgctggaaggctggctgggcgaggcgggttattcaccgggggacatgaccagcgcggacgatgtccatgatgtgcatcttatcccttgccgccatgtagaacggagcaaacggaatcatgtgaatatcaagccgcttgccgccatcggcgcctaccgccagatgctgggctggtacgcggcaaaaaccgattgccagcttatttggatatacctgcggccacgaagcgtggattag

SEQ ID NO: 27190 - protein, 282 aa, Unknown
  Obtained from environmental sample
  misc_feature (1)..(282): Xaa is any amino acid
MNGIIGYGCHVFYGSKAVRFVMGRNCNLKYGARLIHSVLGDNSTVSCCEILNNLIFPVHEQHHNNSFLIAGMIQGMSNMAAAATIGSNHNSRANDGEIRAKRGFWPSLAVSLKHSCCFASFTIIAKGEYPSELNIPLPFSLINNNVHKNRLEIVPAYFWIHNLYALERNSWKALDRDRRTVKVQHIETDYLAPDTAEEIITALYLLEGWLGEAGYSPGDMTSADDVHDVHLIPCRHVERSKRNHVNIKPLAAIGAYRQMLGWYAAKTDCQLIWIYLRPRSVD

SEQ ID NO: 27191 - DNA, 408 bp, Unknown
  Obtained from environmental sample
  misc_feature (1)..(408): n is a, c, g, or t
gtggatcaactgcggcaggagacaggcgccgggaaataccgtaactgggacgagattcaccgggtctacgacctctggcacgaggcataccccctggacaaagcccgccatgcctgggcggcgcttgtcctgctgggcggcagtaccacggacagcttctctgacagtcccgcttttctcaagcaggaaattgccgcttccattgaaacccgccgccggataagcgctcagatttaccagagcagggcaaaggattaccacgattccttcagaaaagcgacgttccgcaataccgccgaaatggaacaggtgctgggtaaacctgagggaaacgcttttgcacgccttgccgccgaagaaggccggcaatatgaagagttggcgtcaagggttatgttacggctataa

SEQ ID NO: 27192 - protein, 135 aa, Unknown
  Obtained from environmental sample
  misc_feature (1)..(135): Xaa is any amino acid
MDQLRQETGAGKYRNWDEIHRVYDLWHEAYPLDKARHAWAALVLLGGSTTDSFSDSPAFLKQEIAASIETRRRISAQIYQSRAKDYHDSFRKATFRNTAEMEQVLGKPEGNAFARLAAEEGRQYEELASRVMLRL

SEQ ID NO: 27193 - DNA, 780 bp, Unknown
  Obtained from environmental sample
  misc_feature (1)..(780): n is a, c, g, or t
gtggagttatatacccaatttgcgaaactaaagcctgattacattattcacggagacgactggaaaagcggacctttaaaaaaggaacgcgatgaagtttttgctgtaatgaaagaactcggcggcgaagttattgagattccctataccgcgggaattaattcatcttcaattaatgaggctatacgctctgttggaacaacgccggatattcgccttaaaactttacgaagactgcttgaaacaaagcagattgtaagaattatggaagctcattcaggtttatccggtttaataatagagaatcttgaaattgaaaaagaagacggcttgcacagttttgacggaatgtggtcgtcaagtttaaccgattccgcaagcaagggaaagcccgatattgaagcggttgatcttacaacgcgtctgcacgatttaacaaatattctggaatgcacaacgaagccaattatttttgacggcgacacaggcggtcaccatttgtcttttaccgttaaaacgcttgaacgaaacggaatatcagcggtcattatagaagacaaaaccggccttaaaagaaattcactttttggaactgatgtgaatcaggaattatgccccattcatgacttctgcgagaaaatcaaagccggtaaaaaagcgcaggtaacaaaagaatttatgattatcgcgcgccttgaaagtttaattgcgggtttccccgtctcacacgcgcttaaagagcgcgcgcttttgtggaggccggcgcggacggcgttatga

SEQ ID NO: 27194 - protein, 259 aa, Unknown
  Obtained from environmental sample
  misc_feature (1)..(259): Xaa is any amino acid
MELYTQFAKLKPDYIIHGDDWKSGPLKKERDEVFAVMKELGGEVIEIPYTAGINSSSINEAIRSVGTTPDIRLKTLRRLLETKQIVRIMEAHSGLSGLIIENLEIEKEDGLHSFDGMWSSSLTDSASKGKPDIEAVDLTTRLHDLTNILECTTKPIIFDGDTGGHHLSFTVKTLERNGISAVIIEDKTGLKRNSLFGTDVNQELCPIHDFCEKIKAGKKAQVTKEFMIIARLESLIAGFPVSHALKERALLWRPARTAL

SEQ ID NO: 27195 - DNA, 684 bp, Unknown
  Obtained from environmental sample
  misc_feature (1)..(684): n is a, c, g, or t
gtgatggccgaggcatacagattaatagcaaaaaatgcaaaaaagatagcgactgtttcatatttcactaaaaatcaaattgttaaatattgtaaagcaaaaccggagaatatatctgtgatttacagtagttggtttcattttaaaaatataacggcggacaattctatttttaatgattttcccgtacttttagaatctttttatttttctcttggaagtctttcaaagagaaaaaatataaagtggataatcgaatatgcgcgaagacatcccgatgttaattttgccatctccggcgttagtctgcctactgtaaaagtggatgagttggatgattcaattcctaaaaatataatcctgttgggctaccttgatgattccagagttaaagcccttatgacacaatgtaaagcgtttattctgccttcttattatgaaggcttcgggcttaccccgcttgaggcattatcctgcggtgcgcagataattatcgcaatggcggcgagccttcctgaaatctacggaaatacggcgcattatatcgatccgttcaacaccaatgtagatcttgacgagctgcttcgtgaaccggttgataagccggataagattcttgcaaaatattcctatgacatttccgctgaaaaagtatataatttaataaaggaatttatgaagtga

SEQ ID NO: 27196 - protein, 227 aa, Unknown
  Obtained from environmental sample
  DOMAIN (53)...(213): Glycosyl transferases group 1
  misc_feature (1)..(227): Xaa is any amino acid
MMAEAYRLIAKNAKKIATVSYFTKNQIVKYCKAKPENISVIYSSWFHFKNITADNSIFNDFPVLLESFYFSLGSLSKRKNIKWIIEYARRHPDVNFAISGVSLPTVKVDELDDSIPKNIILLGYLDDSRVKALMTQCKAFILPSYYEGFGLTPLEALSCGAQIIIAMAASLPEIYGNTAHYIDPFNTNVDLDELLREPVDKPDKILAKYSYDISAEKVYNLIKEFMK

SEQ ID NO: 27197 - DNA, 840 bp, Unknown
  Obtained from environmental sample
  misc_feature (1)..(840): n is a, c, g, or t
ttgccggattcaatctgcgatctttcctcacttggagaattttttgttgactgcgaaaaactcactgccttgcctgaaaatatcgggaatcttaaaaatcttacggaattaggcatagaatcacagtctcttgtgaccctgcccgattcagttggcaatcttgacaaacttgaaacactgcggattgaagggatgtcattttccgttcttcctgaatcggccgggaatttatcatcattaaccaggctgtatctgtaccaaacaaaaattaaaaccctgcccgacgcaataggcggcttgtcaaacctgaaaaagatccgcctgttgcgctgcgtcgaactggaatccctgcctgagagcatcggaaacctgcgctcccttgaaaccctgtacatccggggcggcaaacttacggcattgcctgaaagtatcgggaacatcaactcacttaaagggcttaatttacagtatacacaaattgcgaggcttcctgattccattggcaatttaactaaccttgtgtccctgcttgttcacagttctccaaatgatatgtggtatggcggccctgacgaccctcccaattactacgaggatgagaaaaccgaaaagagaagcccctttaccatgctgccggattctgcggtaaaacttgtgtcgcttaaacacttgattttaaacaactcggaactaacaagcctgcccgattatttaggcagtcttcccaaacttgaaagaattgagattgcagactgtaatattaaaacaattccgtcttcaatacagcggctggcggactcaggtgagcttacccctcttaaaaaccgagcgcgaatttaa

SEQ ID NO: 27198 - protein, 279 aa, Unknown
  Obtained from environmental sample
  misc_feature (1)..(279): Xaa is any amino acid
MPDSICDLSSLGEFFVDCEKLTALPENIGNLKNLTELGIESQSLVTLPDSVGNLDKLETLRIEGMSFSVLPESAGNLSSLTRLYLYQTKIKTLPDAIGGLSNLKKIRLLRCVELESLPESIGNLRSLETLYIRGGKLTALPESIGNINSLKGLNLQYTQIARLPDSIGNLTNLVSLLVHSSPNDMWYGGPDDPPNYYEDEKTEKRSPFTMLPDSAVKLVSLKHLILNNSELTSLPDYLGSLPKLERIEIADCNIKTIPSSIQRLADSGELTPLKNRARI

SEQ ID NO: 27199 - DNA, 855 bp, Unknown
  Obtained from environmental sample
  misc_feature (1)..(855): n is a, c, g, or t
gtgggttatgcgctatccggtggcagggctgttgtggaattgatgtactgcgacttcatgggacgcgccggtgatgaaatcttcaatcaggcttcaaagtggcagtcaatgtcagcgggtcttttaaaaatgccgctcgtggtacgggtttcggtcggtaataaatacggcgcacagcacagccaagactggacggccatgaccgcccacattcccggactgaagtcctattttcccgccacgccttacgatgcaaaaggaatgttaaatcttgccctgcgcggcaccgatcctgtaatcttttttgaaagccagcttctgtacgatatgagtgaacaatttgaaaaggacggcgttcctgaaggttactacgaagttcaggaaggcgaacctgttatccgcaaacagggcaatgacctaaccatcgctaccatcggggcgactctctacacggcgatgaacgcggcgaaaaaacttgagagccaattcggcctttcaacggaagtgattgatctccgcttcatcaacccgctgaattacgaaaaaataattgaatcggtaaagaaaaccggaaagctcctgttggcaagcgacgcctccgagcgtggttcattccttcatacggttgcgagcaacgttcatactctcgcctttgattatctggacgcgccggtagcggtaacaggaagcagaaactggatcaccccggctgctgaaatggaacatctgttcttccctcaggttgactggatcattgacacgattcacgagcgtattctgccactgccgggttacaaccccgttacggtgcaaactacaggtgatgtgctgcggagaaaccggctgggtttttag

SEQ ID NO: 27200 - protein, 284 aa, Unknown
  Obtained from environmental sample
  DOMAIN (1)...(111): Transketolase, pyridine binding domain
  misc_feature (1)..(284): Xaa is any amino acid
MGYALSGGRAVVELMYCDFMGRAGDEIFNQASKWQSMSAGLLKMPLVVRVSVGNKYGAQHSQDWTAMTAHIPGLKSYFPATPYDAKGMLNLALRGTDPVIFFESQLLYDMSEQFEKDGVPEGYYEVQEGEPVIRKQGNDLTIATIGATLYTAMNAAKKLESQFGLSTEVIDLRFINPLNYEKIIESVKKTGKLLLASDASERGSFLHTVASNVHTLAFDYLDAPVAVTGSRNWITPAAEMEHLFFPQVDWIIDTIHERILPLPGYNPVTVQTTGDVLRRNRLGF

SEQ ID NO: 27201 - DNA, 1137 bp, Unknown
  Obtained from environmental sample
  misc_feature (1)..(1137): n is a, c, g, or t
atgtatattaaatccatgttgaatattaaaagaaatattttgctaaatccagggcccgctacaacaacagatacagtgaaaatggctcagatagtgcccgatatttgccctagagaggccgaatttggcaatattttagctcaaatgcagggtgatttggtgaaaatagctcacggcgacaccaaagaatatacggccgttcttttttgcggttctggaacaatcaacatggatatttgcctgaattcgcttttgccagaagggaaaaaaatacttattgtgaataatggagcttatagtgctagggcagctgagatatgcgagtactataatttaccgcatataaatatgaaaattccagttgatgaaattcctaagctagaagcaatagaagacattttgcaaaaaaatcccgatatacatcttgtttacacaacgcataacgaaacaggaactggtttgctgaatccaatacgcaaaataggtgctttggcacacaaatataactgcatttttaccgtagacacaacatccacttacgcaatgctacctattgatatggaaaaagacaatattgatttttgcatggcttctgcacaaaaaggtttaatgtcaatgacggggttatcatttgtaatagggaaaattaaacttattgaagaatctgagcattatccaaaacgctcttattattgcaacttgtatttgcaatataaatattttctccaaacagggcaaatgcattttactccaccagtgcaaactgtatatgccactaaacaagccattgaggaatattttaaagaaggagaaaatgaaaaattttcaaggcataaaagagtgaatgaggctatatgcaagggtttaaaaaaactcggttttaaagaattcataaaaaaagagctacaatcgggtcttgttgcatctgcaatttatccagatgataaaaattggaattttgataaaattcacgattattgctatgaacgtggatttacaatttatcctggtaaaattttcgatacaaatacattcagattatgctcacttggtgctattgatgtttctgacattgaaaatttttttgaggtatttgaaaaagccattggagcattgcggtgtagctgtgccagttaa

SEQ ID NO: 27202 - protein, 378 aa, Unknown
  Obtained from environmental sample
  DOMAIN (29)...(361): Aminotransferase class-V
  misc_feature (1)..(378): Xaa is any amino acid
MYIKSMLNIKRNILLNPGPATTTDTVKMAQIVPDICPREAEFGNILAQMQGDLVKIAHGDTKEYTAVLFCGSGTINMDICLNSLLPEGKKILIVNNGAYSARAAEICEYYNLPHINMKIPVDEIPKLEAIEDILQKNPDIHLVYTTHNETGTGLLNPIRKIGALAHKYNCIFTVDTTSTYAMLPIDMEKDNIDFCMASAQKGLMSMTGLSFVIGKIKLIEESEHYPKRSYYCNLYLQYKYFLQTGQMHFTPPVQTVYATKQAIEEYFKEGENEKFSRHKRVNEAICKGLKKLGFKEFIKKELQSGLVASAIYPDDKNWNFDKIHDYCYERGFTIYPGKIFDTNTFRLCSLGAIDVSDIENFFEVFEKAIGALRCSCAS

SEQ ID NO: 27203 - DNA, 540 bp, Unknown
  Obtained from environmental sample
  misc_feature (1)..(540): n is a, c, g, or t
gtggcttttggtgaacagaaagttcaaagaacaacaaaggcttatgccatgcagtttaagcacttggtacctgaacttgaaaaagaccaaaaacaaaaatcgggcgagaaaaaccatccctgggaaagcccaaagggagttttggttcctcgctatctatgcgaatttgaagcagaagacatatccgcatggcctgttggcaaaacttacaatgcctctatattcaaagtgctagaccacataaaagtctctggcatttccaaggggcacggattttccggcggcataaagagacacggatttagcagacgcccgtccagtcacggtgttcacgatactcgcgggcctggttcgttgagtgcgcacacatatccgggcagggttttccccggcaaaagaatgcctggtcaatttggcaataaaaacgtcacgataaagaatattcaaatagagaaaattgattccgagcgcaatttaatatttgtgcgcggttcggtgcctggtcctaaaaacggcataatcgtagtgaggaaaggctaa

SEQ ID NO: 27204 - protein, 179 aa, Unknown
  Obtained from environmental sample
  DOMAIN (3)...(177): Ribosomal protein L3
  misc_feature (1)..(179): Xaa is any amino acid
MAFGEQKVQRTTKAYAMQFKHLVPELEKDQKQKSGEKNHPWESPKGVLVPRYLCEFEAEDISAWPVGKTYNASIFKVLDHIKVSGISKGHGFSGGIKRHGFSRRPSSHGVHDTRGPGSLSAHTYPGRVFPGKRMPGQFGNKNVTIKNIQIEKIDSERNLIFVRGSVPGPKNGIIVVRKG

SEQ ID NO: 27205 - DNA, 450 bp, Unknown
  Obtained from environmental sample
  misc_feature (1)..(450): n is a, c, g, or t
gtggtggtcgcaaaccttggaagcaaaagggaacaggtcaggctcgcgcaggtcaaaacacatctccatttgggttcgcggaaacaaagcgcacggtccaaaaaagcacaaatatttgaaaaggtgaataaaaaagttaaaaggctcgctttccgctccgctctttccagccgcgcaaaagataattgcattgggctttttgaaaagttcaactttgcctcgccaaaaacaaaagagtttttatccatagcaaacaaagctggttttgaacaaaaaaatgttttgttccttgcaacgccagaagaaagaaatttcatcaaatcactttccaatgtggcttgggcgcgttgggcttggattaaagatgtgaacacctacgatataatacgcgctcgccatatagttatgtctcaagatgcgcttaaattgctaaccggaggttcaagatga

SEQ ID NO: 27206 - protein, 149 aa, Unknown
  Obtained from environmental sample
  DOMAIN (3)...(147): Ribosomal protein L4/L1 family
  misc_feature (1)..(149): Xaa is any amino acid
MVVANLGSKREQVRLAQVKTHLHLGSRKQSARSKKAQIFEKVNKKVKRLAFRSALSSRAKDNCIGLFEKFNFASPKTKEFLSIANKAGFEQKNVLFLATPEERNFIKSLSNVAWARWAWIKDVNTYDIIRARHIVMSQDALKLLTGGSR

SEQ ID NO: 27207 - DNA, 315 bp, Unknown
  Obtained from environmental sample
  misc_feature (1)..(315): n is a, c, g, or t
atgaaagaagcctatcaggttttgattgcgccgcacatcacagacaaaacggtaaaaaataattttgaccgcaacaatgatgcttatacttatgtgttccgcgtggctttgaaagccaacaaatttgaaataaaaaaagcgattgagagttattttggagttcaagtgggttccgtaaataccttgattatgcgcggcaaaattaagcgcgctcagcttaaaacaaaatttacttcgggcaaattgccaaattggaaaaaagcctacgttaaattgaaacccggtcaaaaaatatccgagtttgagggaatataa

SEQ ID NO: 27208 - protein, 104 aa, Unknown
  Obtained from environmental sample
  DOMAIN (5)...(104): Ribosomal protein L23
  misc_feature (1)..(104): Xaa is any amino acid
MKEAYQVLIAPHITDKTVKNNFDRNNDAYTYVFRVALKANKFEIKKAIESYFGVQVGSVNTLIMRGKIKRAQLKTKFTSGKLPNWKKAYVKLKPGQKISEFEGI

SEQ ID NO: 27209 - DNA, 642 bp, Unknown
  Obtained from environmental sample
  misc_feature (1)..(642): n is a, c, g, or t
atggccgcaaaaatcaagctgatccttggatcacacgcgcatgtgccatacggctcgaataacgccgaatttgaaaatgtttacatgaacctgatgcggccttttgtcaccagcctgtacagatacccatgtctacaggcggttctccattattcgggcgtgctgctgcattgggttgagcgatcccatcctgagctgttcatgctgattaatgatatgatcgcccgcagacaggctgaaatactcggaggcgggttttacgagcccatgctgccggttataccattgcaggataaaatagggcagattgagctgctaaccacttacatccgcaaacagttcggaaagcggccccagggatgctggatacccggttatgcctgggagcaggggctggtaagccctctcgcgagctgcggcatgggctttacttttcttggcaagcgccaatttgacctggcgggaggcaatgacgccccctgcatctgcgaggaccaggggaagctcattaccgttttcccggtgtcccagccgcttgaagaagacctgggcaaaaagaatattcagcctatattaaaaaatcttaacagtattaacaatgacggcggtgagcggattatttcaatatttcccggcaggtga

SEQ ID NO: 27210 - protein, 213 aa, Unknown
  Obtained from environmental sample
  DOMAIN (8)...(210): Glycosyl hydrolase family 57
  misc_feature (1)..(213): Xaa is any amino acid
MAAKIKLILGSHAHVPYGSNNAEFENVYMNLMRPFVTSLYRYPCLQAVLHYSGVLLHWVERSHPELFMLINDMIARRQAEILGGGFYEPMLPVIPLQDKIGQIELLTTYIRKQFGKRPQGCWIPGYAWEQGLVSPLASCGMGFTFLGKRQFDLAGGNDAPCICEDQGKLITVFPVSQPLEEDLGKKNIQPILKNLNSINNDGGERIISIFPGR

SEQ ID NO: 27211 - DNA, 645 bp, Unknown
  Obtained from environmental sample
  misc_feature (1)..(645): n is a, c, g, or t
ttgcggcgcatcanctggtttacgcatcagggaaatttaaatatcggctatttactcggcacagggatgttgacatggttcgtctgcgaatatctgacatttgaaagagttcatctgtacacctacgactttatcgccgagcgcgttggattcaaacttggattcggctgcctctccttctatccctatttttacgccgtatcgctctgggctacggttgatcttcccgctccccagcatccgctctggctttccgcgcttttcggcgttatttttttcgccggctggatattcgcacgcggggcaaatatgcaaaaattttattttaagattgctccagaaaaaaagtttttatgttttaaaccgcaggcgatcagcgacggaaaactcagcctgcttgcgagcggtttctggggcaagagccgccacataaactacttaggcgaaattctccaggcatgcggcgtcgctttaagcgcaggttatccggcggttctttttgtgtggctgtaccctctgtattacacgggtcttttaaccagccgccagttcgatgatgataaaatatgcaaggcaaaatacggcacgctttgggatgaatacgtcaagaaagtaaagtaccgtattattccgtacattttttaa

SEQ ID NO: 27212 - protein, 214 aa, Unknown
  Obtained from environmental sample
  DOMAIN (1)...(214): Ergosterol biosynthesis ERG4/ERG24 family
  misc_feature (1)..(214): Xaa is any amino acid
MRRIXWFTHQGNLNIGYLLGTGMLTWFVCEYLTFERVHLYTYDFIAERVGFKLGFGCLSFYPYFYAVSLWATVDLPAPQHPLWLSALFGVIFFAGWIFARGANMQKFYFKIAPEKKFLCFKPQAISDGKLSLLASGFWGKSRHINYLGEILQACGVALSAGYPAVLFVWLYPLYYTGLLTSRQFDDDKICKAKYGTLWDEYVKKVKYRIIPYIF

SEQ ID NO: 27213 - DNA, 855 bp, Unknown
  Obtained from environmental sample
  misc_feature (1)..(855): n is a, c, g, or t
ttgaaagcggcggtaaaaagcggacctgtgctgcggatggacgagacggtggtacaggtaataggggaagaagggcgggaagacgcgcaaaaaagctatatgtggcttgccctcggcgggccgcctgacaaaaaagcggcgtggtatgagtaccatccgacgcgcgccgcgtataacgcccgggaatttcttcaagggtattcgggttacctgcaaacggacgggtatgaggggtatgactgcgcggtgaaggacctgccggggataattcacgcgggctgtttcgcacatgcgaggaggaagttctttgaggcggccaagataaacaagaaaccgcagtccgccgaggaagggataaaatatatacgcaggctctaccagcttgaggatgcgctgcgggataaatggaaagacgatcttgaaaagttccaggaagaacggaaaaaagaagcggttcccctattagatgaatttaaggcgtggcttataaaacgggtggatgaagtaccgccgaaggcgctattgggagaagcgataagctataccctgaaccaatgggacaaattgatacggtatattgaaagcccgtatttgacgcctgacaacaatgcttgtgaaaacgcgatacggccttttgtcattggccggaaaaactggctgttctgtcagagcgtgggcggggctaaaagttcatgcggcatgtataccctcatagagacggccaaacaaaacagtcttgttccgtctaaatatctgcttgctctttttgaaaaggcaccgctggcttcttccctccagactggggaaaactactcccctggaatatcttcaccgcttaatttgatggatacataa

SEQ ID NO: 27214 - protein, 284 aa, Unknown
  Obtained from environmental sample
  misc_feature (1)..(284): Xaa is any amino acid
MKAAVKSGPVLRMDETVVQVIGEEGREDAQKSYMWLALGGPPDKKAAWYEYHPTRAAYNAREFLQGYSGYLQTDGYEGYDCAVKDLPGIIHAGCFAHARRKFFEAAKINKKPQSAEEGIKYIRRLYQLEDALRDKWKDDLEKFQEERKKEAVPLLDEFKAWLIKRVDEVPPKALLGEAISYTLNQWDKLIRYIESPYLTPDNNACENAIRPFVIGRKNWLFCQSVGGAKSSCGMYTLIETAKQNSLVPSKYLLALFEKAPLASSLQTGENYSPGISSPLNLMDT

SEQ ID NO: 27215 - DNA, 897 bp, Unknown
  Obtained from environmental sample
  misc_feature (1)..(897): n is a, c, g, or t
ttgcaatttccggaggaaaaaaaggtggtgcactgcaatactcctagttatgtaggctcgcacatcaatggctacttcaatatgatgatgggctttatgaactacttaacaggaaaaacaggaatgccaaccggcaaaactgcaattttcccaggttgggtaaaccccggcgatattcgcgaacttaaacgcattgccaaagccatgaaggtgaatactgttttctttccagatcataccggtgtgctagacgcacctatgaatggcaaatacgagatgtatccagaaggtggcaccccaatagaagaaatcagaaaccttggcgatagcaacgggcttattgcgcttggcgagattacctgcgtagaacctgccgagttgctagagaaaaagtggaaagtgcctttcacactgcttcccttaccagttggtgtggcatacacagatcaatacgttatggcattgcaagaagagtccaagcacgaagttcctgaggaattagaagcggaacgtggtcgtcttgttgaccttctgctggattccgctcaatacacaatcggtaagaaagttgccatattcggagaccctgatgtggttattggtcttacatcgcttgcattggaaatgggtatggtgccaaaatacgttatcacaggaacgccaaaagaagaatttacccgcaagatagaagccttgttcagtcaatatgcaacaactggttgcactgtcaaagcaaatgccgatctttttgaactccaccaatggatcaaaaacgagcgtgtggacttgcttatcnngttcacctacggcaagcaaatcgcaaaagcagaagacataccttttgttcgcgctggtttccctgtgatagacagatacgtggtcccatgcaagccatag

SEQ ID NO: 27216 - protein, 298 aa, Unknown
  Obtained from environmental sample
  DOMAIN (1)...(297): Nitrogenase component 1 type Oxidoreductase
  misc_feature (1)..(298): Xaa is any amino acid
MQFPEEKKVVHCNTPSYVGSHINGYFNMMMGFMNYLTGKTGMPTGKTAIFPGWVNPGDIRELKRIAKAMKVNTVFFPDHTGVLDAPMNGKYEMYPEGGTPIEEIRNLGDSNGLIALGEITCVEPAELLEKKWKVPFTLLPLPVGVAYTDQYVMALQEESKHEVPEELEAERGRLVDLLLDSAQYTIGKKVAIFGDPDVVIGLTSLALEMGMVPKYVITGTPKEEFTRKIEALFSQYATTGCTVKANADLFELHQWIKNERVDLLIXFTYGKQIAKAEDIPFVRAGFPVIDRYVVPCKP

SEQ ID NO: 27217 - DNA, 867 bp, Unknown
  Obtained from environmental sample
  misc_feature (1)..(867): n is a, c, g, or t
atgggcggtatgcgattcataaaggttgagggtctcggaaacgacttcgtcatgttggattgcgctgacgcggcgcagtctgacgctgtcggttcacgcgccgccgcgttgtgcgacaggcggcggggggtcggggcggacggggttatatgcgtgcttccggctaccgcggggggcggggctgattttcggatgcggatttttaacgctgatggcggcgaggcggagatgtgcggcaacggggtgcggtgtttcggggagtatctgcgcctgaccgggcggcaggctaagcggtttgtcattgagacgctcgcggggcctatagaggtcgagtgcttggacggcgacggaacgcacggcgggaactaccgcgtgaacatgggggcgccgcgcctcttgccggacgagattccggtcgttccggcggagattaccgacaaggacttcataatgcaggagatcgcggcgctcggcaagacctttcgggtgacggcggtgtcgatgggtaacccgcacgcggtggtgtacgcggaggatctgagcgacgaacttgtactggaggcggggccggcgatacagcggcacccgttcttccccaagggcgtgaacgtggagtttgtgcatatcatatctcgggacgaggtacgcatgcgcgtctacgagcggggctgcggggagacccaggcctgcgggaccggggcgtgcgcgacggtggtcgccggggtgataagcggtcttggcggaaacgacgtgacggtgcgcttgtcgggcggggacttgcaaatatcgtgggacggggacagggagcatcccgtgtttatgagcggaccggccagggcagtgtttcatggtgagctaatgggttga

SEQ ID NO: 27218 - protein, 288 aa, Unknown
  Obtained from environmental sample
  DOMAIN (6)...(133): Diaminopimelate epimerase
  misc_feature (1)..(288): Xaa is any amino acid
MGGMRFIKVEGLGNDFVMLDCADAAQSDAVGSRAAALCDRRRGVGADGVICVLPATAGGGADFRMRIFNADGGEAEMCGNGVRCFGEYLRLTGRQAKRFVIETLAGPIEVECLDGDGTHGGNYRVNMGAPRLLPDEIPVVPAEITDKDFIMQEIAALGKTFRVTAVSMGNPHAVVYAEDLSDELVLEAGPAIQRHPFFPKGVNVEFVHIISRDEVRMRVYERGCGETQACGTGACATVVAGVISGLGGNDVTVRLSGGDLQISWDGDREHPVFMSGPARAVFHGELMG

SEQ ID NO: 27219 - DNA, 741 bp, Unknown
  Obtained from environmental sample
  misc_feature (1)..(741): n is a, c, g, or t
gtggcagtagccattgtagtaacggcggctatcgtgtactttgtcctccacagcacgacaaaaccaatcgtaaaggtggctgaaaacctcaaagacatatccgaaggcgaaggcgacctgacgcgtagcattgccatcagttccaaagacgaggtaggcgacctggccttgtacttcaataggacattggaaaaaattaaaagcctgattattatcattaaaaatgaggcggtaagcctcagtagcatcggcaacgatcttgccagcaatatgaccgagaccgctgctgcggtgaacgagattacctctaacatccagagtatcaaaggcagggttattaaccagagtgccagcgtcagcgaaacccacgcgaccatggaacagcttgtcgcgaacatcaacaacctcaacggcaatgtagaagatcaggctactacaatatcgaaacgctctgcctttattcagacgatggtagacaacattcattcggtaaatgagaccctgatgaagaacatggaaaatgttaaaaccttgaaagatgcatccgaagtaggccgcacgggtctatccgaggttgcggcggatattcaggaaatcgcccgcgaatccgaggggcttttggaaattaactcagtcatggaaaacatcgcgagtcagaccaacctgctttcgatgaacgcggcgattgaagccgccccatgcgggcgaagcgggcaagggctttgccgttgtagccgatga

SEQ ID NO: 27220 - protein, 246 aa, Unknown
  Obtained from environmental sample
  DOMAIN (1)...(68): HAMP domain
  misc_feature (1)..(246): Xaa is any amino acid
MAVAIVVTAAIVYFVLHSTTKPIVKVAENLKDISEGEGDLTRSIAISSKDEVGDLALYFNRTLEKIKSLIIIIKNEAVSLSSIGNDLASNMTETAAAVNEITSNIQSIKGRVINQSASVSETHATMEQLVANINNLNGNVEDQATTISKRSAFIQTMVDNIHSVNETLMKNMENVKTLKDASEVGRTGLSEVAADIQEIARESEGLLEINSVMENIASQTNLLSMNAAIEAAPCGRSGQGLCRCSR

SEQ ID NO: 27221 - DNA, 786 bp, Unknown
  Obtained from environmental sample
  misc_feature (1)..(786): n is a, c, g, or t
atgggtagccaaccacgggggatttcggcgagcaggggggcggcggttttggggctgtcggagtacatgacgccgcttgaagtgtggcagttgatatgcgaggagcgggagccggggtttaacgcgaaacgcggctacgttttgcctgaaaagcctgacagcgcggcgatgcgtttcggcacggctttcgagagcgcgatcatcgagcttgcggagcgggagcggggaaaaaagatactcgacagggaaacggaatttttttattcggaaaaagggtgcaagccgaattttgttttcctgatggctccggcagatgattgttacatcacttgccatatagacggcgcgtatgacgatgacttacttgaccatagaaccggcccttacatactccacgaaggcaagaccacgtcggcgtttgttttccgcgagaaatggggggaggcggggacggatcacattccgcaaagctaccaggtgcaggtgcagcaccagatgttgtgtacgggggcgcaggaggcggtggtgtccgtgcttgtttggccagaaacgcctgatacgtgggaaaagatggggtgggaagccgcacaaactggaaaagacacttatgcgctaatgaaaaacggcgctatttattatacgccatatgattgggcggatacgttacacgctatgggctacttccaccagtaccccgtgaaggcaaatccggcggcacaaaaggttatgcttgaaaagtacagcgagttttggcataaccacgttcttaccggaaattcctcctga

SEQ ID NO: 27222 - protein, 261 aa, Unknown
  Obtained from environmental sample
  misc_feature (1)..(261): Xaa is any amino acid
MGSQPRGISASRGAAVLGLSEYMTPLEVWQLICEEREPGFNAKRGYVLPEKPDSAAMRFGTAFESAIIELAERERGKKILDRETEFFYSEKGCKPNFVFLMAPADDCYITCHIDGAYDDDLLDHRTGPYILHEGKTTSAFVFREKWGEAGTDHIPQSYQVQVQHQMLCTGAQEAVVSVLVWPETPDTWEKMGWEAAQTGKDTYALMKNGAIYYTPYDWADTLHAMGYFHQYPVKANPAAQKVMLEKYSEFWHNHVLTGNSS

SEQ ID NO: 27223 - DNA, 534 bp, Unknown
  Obtained from environmental sample
  misc_feature (1)..(534): n is a, c, g, or t
atgcgtttgtcaatgtgccatttaagacctccgcatcttaaaggcaagcaagaaaagtccaggttggcgcccgaaagcctagcgcccgaaagcctagcgcccgaaagcctagcgcccgaaaggtcggcgtccgaaaggtcggcgtccgaaaggtcggcgtccgaaaggtcggcgcccgaaaggtcggcgcccgaaagcctagcgcccgaaagcctagcgcccgaaagcctagcgcccgaaaggttggcgcccgaaaggtcggcgcccgaaagcctagcgcccgaaaggtcggcgcccgaaaacctagcgcccgaaaacctagcgcccgaaaggtcggcgtccgaaaggtcggcgtccgaaaggttggcgcccgaaaggtcggcgcccgaaagcctagcgcccgaaaggttggcgcccgaaaggtcggcgcccgaaagcctagcgcccgaaaggtcggcgcccgaaaacctagcgcccgaaaacctagcgcccgaaaggtcggcgtccgaaaggtcggcgcccgaaaggtcataa

SEQ ID NO: 27224 - protein, 177 aa, Unknown
  Obtained from environmental sample
  misc_feature (1)..(177): Xaa is any amino acid
MRLSMCHLRPPHLKGKQEKSRLAPESLAPESLAPESLAPERSASERSASERSASERSAPERSAPESLAPESLAPESLAPERLAPERSAPESLAPERSAPENLAPENLAPERSASERSASERLAPERSAPESLAPERLAPERSAPESLAPERSAPENLAPENLAPERSASERSAPERS

SEQ ID NO: 27225 - DNA, 495 bp, Unknown
  Obtained from environmental sample
  misc_feature (1)..(495): n is a, c, g, or t
atgacctttcgggcgccgacctttcggacgccgacctttcgggcgctaggttttcgggcgctaggttttcgggcgccgacctttcgggcgctaggctttcgggcgccgacctttcgggcgccaacctttcgggcgctaggctttcgggcgccgacctttcgggcgccaacctttcggacgccgacctttcggacgccgacctttcgggcgctaggttttcgggcgctaggttttcgggcgccgacctttcgggcgctaggctttcgggcgccgacctttcgggcgccaacctttcgggcgctaggctttcgggcgctaggctttcgggcgctaggctttcgggcgccgacctttcgggcgccgacctttcggacgccgacctttcggacgccgacctttcggacgccgacctttcgggcgctaggctttcgggcgctaggctttcgggcgctaggctttcgggcgccaacctggacttttcttgcttgcctttaa

SEQ ID NO: 27226 - protein, 164 aa, Unknown
  Obtained from environmental sample
  misc_feature (1)..(164): Xaa is any amino acid
MTFRAPTFRTPTFRALGFRALGFRAPTFRALGFRAPTFRAPTFRALGFRAPTFRAPTFRTPTFRTPTFRALGFRALGFRAPTFRALGFRAPTFRAPTFRALGFRALGFRALGFRAPTFRAPTFRTPTFRTPTFRTPTFRALGFRALGFRALGFRAPTWTFLACL

SEQ ID NO: 27227 - DNA, 1467 bp, Unknown
  Obtained from environmental sample
  misc_feature (1)..(1467): n is a, c, g, or t
gtggcggcggcaactttgtccagccgttacatcacaagccgctttctgcccgacaaggcgattgatcttgttgacgaggcggcaagccgcctgaaaatggaattggacagccgccccacggagcttgataaacttgagcggaaacttcttcagctttcgattgaaaggcaggctctttcgcgcgaggaagacccgtcatctaaagaccgcctttcaaaactggaaaaagaaatcgcgggtatcacggaagaacgtgacgcgatgaaagcccggtgggaaaatgaaaaaattgatattcaaaaaattcgaaaactcaaacagcagattgaagaactcaaaattgaggagaaccgttatataagagaaggcaatctttcaaaagcggcggaagtaaaacacggaagaattcccgaagctgaaaaacagcttgccgcgttaacatcccagatggaaaacaagcgcgacagcgccgcattgttacgcgaagaagtaagcgaggaagacatcgccggagttgtttccgcgtggacagggatacccgtatcaaaaatgctttccggcgaactgcaaaagtacctcgacttggagaaagttcttgaaaagcgcgttgtcggtcagagcgaagcccttgccgccgtcgccgatgcaatccgtcgtaacaaggcaggtctttccgacgcggcgcgcccgctgggttcgttcctgtttttgggaccgacaggcgtcggaaaaaccgagcttgcaaaaacgctcgcggactttttgttcaatgacgaaaaagcccttacccgcatcgacatgagcgagtacggggaaaaacactcggtaagccgcttaatcggcgcgcctcccggatatgtcggttatgagcagggaggccagttaacggaagcggtacgccggcggccttacagcgtaatcctctttgacgaaatagaaaaagcccatcaggaagtgttcaatgttttcttacagatactcgacgacggccgcctgacagacggacagggacgtgttgtcgattttaagaatgttatcatcattatgacaagcaacctcggttcggacttgatactcggcgcgaaaaacccggaaactctgcggaactcgcttttggaattactgaaacaaagcttcaggccggagtttttaaaccggatagacgaaacggtaattttcaacaggctggagaaaaacgaaatcaacaaaatcgtggacattcagctaacgcgcctttcgcaaagactctcggagcgaaaaatcacgctgaaggtaacagacgcggcaaaatccctgcttgccgaaaggggctatgatcccatgttcggggcgcggccgctgaagcgcacaattcagtccgatcttgaaaacccgctggcaaagcaggttatcgccggcgctatcaaagacggggaaacggtgacggctgatgtgtcgggcggcgggatagtgtttaagaaacgatga

SEQ ID NO: 27228 - protein, 488 aa, Unknown
  Obtained from environmental sample
  DOMAIN (233)...(434): ATPase family associated with various cellular activities (AAA)
  misc_feature (1)..(488): Xaa is any amino acid
MAAATLSSRYITSRFLPDKAIDLVDEAASRLKMELDSRPTELDKLERKLLQLSIERQALSREEDPSSKDRLSKLEKEIAGITEERDAMKARWENEKIDIQKIRKLKQQIEELKIEENRYIREGNLSKAAEVKHGRIPEAEKQLAALTSQMENKRDSAALLREEVSEEDIAGVVSAWTGIPVSKMLSGELQKYLDLEKVLEKRVVGQSEALAAVADAIRRNKAGLSDAARPLGSFLFLGPTGVGKTELAKTLADFLFNDEKALTRIDMSEYGEKHSVSRLIGAPPGYVGYEQGGQLTEAVRRRPYSVILFDEIEKAHQEVFNVFLQILDDGRLTDGQGRVVDFKNVIIIMTSNLGSDLILGAKNPETLRNSLLELLKQSFRPEFLNRIDETVIFNRLEKNEINKIVDIQLTRLSQRLSERKITLKVTDAAKSLLAERGYDPMFGARPLKRTIQSDLENPLAKQVIAGAIKDGETVTADVSGGGIVFKKR

SEQ ID NO: 27229 - DNA, 600 bp, Unknown
  Obtained from environmental sample
  misc_feature (1)..(600): n is a, c, g, or t
ttgcttgacgtgggggcaaatgttgactgcaaggcagagcacatcgccaagttcgcactgatgggggccgtgtatgccgaggtggttctgggcgtggacaagccaaagataggcgtactgagcgttggcgaagaagacggcaaaggctctgaaaccacaaagcaggcatcaggctttttgcgcgacctagacatcaattttggggggaacgccgaaggccgcgacatatggaatggcgatttcgatgttgttgcctgcgatggattcgttggcaatgtggttctaaaatcatcggaagcgctggcagagggcatccgctacggactaaaggaaagcctagagtgcaaccttttgggccgcatggggggcctgctcgtccgcccctcgatgagaaaattttacaaaaaattggactacgcagaatatggcggggcaccgctgttgggcgtgaatggcatctccatcatcggccacgggcgtagccacggcaaggcagtggcaagcgccatacgcgccgccgctagaggggacaggaaccacatcaacgatcggattcaagagcgaatgcgccgcctgctggacgtggggcaaggcaaatga

SEQ ID NO: 27230 - protein, 199 aa, Unknown
  Obtained from environmental sample
  DOMAIN (1)...(184): Fatty acid synthesis protein
  misc_feature (1)..(199): Xaa is any amino acid
MLDVGANVDCKAEHIAKFALMGAVYAEVVLGVDKPKIGVLSVGEEDGKGSETTKQASGFLRDLDINFGGNAEGRDIWNGDFDVVACDGFVGNVVLKSSEALAEGIRYGLKESLECNLLGRMGGLLVRPSMRKFYKKLDYAEYGGAPLLGVNGISIIGHGRSHGKAVASAIRAAARGDRNHINDRIQERMRRLLDVGQGK

SEQ ID NO: 27231 - DNA, 837 bp, Unknown
  Obtained from environmental sample
  misc_feature (1)..(837): n is a, c, g, or t
gtgacagtttttgcacttgacgaatttaatgaaataaatgcgaaagcatattttgattatcaacgtcaacatatatttntgcgaaccgagcgaaaagtatataaagcagtttctaataatcaacaatctgcaaaacaatacaaccaaattgataaaagaataaacttatttcccgatgaatgtgaattttgtaaaagtaaagatatatcaaatgttagaagaagaaaaaaaaagcagatcgatttagtttttatgaaatcaggaataaagaaacaggttatcgaatatgaaggaggggcatatagatgtaagaaatgcaaaaaatttgttatggtaaaaaatatgaaagttctacctatatatggtcataatttaatgttatggtcggtaaaccaaaagatacaatacaaactcagcacagagaacattatcaatttattgaaggattcttttaaaatagatgtttccagaactcaaatgacacgttttaaggaaatcatcgcattccaatactttgaaacatacacagaaataataagaaaaatgtgcaaatctaaacttatacatattgacgaaacaattgcaaaaattatggatattgacggatatgtttgggtatttgccaattatgacagtgtttattatcaattcagagaaacaagggagactggttttttgaaagagttattacaggattttgaaggagttcttgtttctgatttttacacgggatatgattcaatagaatgtaagcagcaaaaatgtttagtgcatctgattagagatttaaatgaagattttatgaaaaatcaactagacgacgaattaaacaaataa

SEQ ID NO: 27232 - protein, 278 aa, Unknown
  Obtained from environmental sample
  misc_feature (1)..(278): Xaa is any amino acid
MTVFALDEFNEINAKAYFDYQRQHIFXRTERKVYKAVSNNQQSAKQYNQIDKRINLFPDECEFCKSKDISNVRRRKKKQIDLVFMKSGIKKQVIEYEGGAYRCKKCKKFVMVKNMKVLPIYGHNLMLWSVNQKIQYKLSTENIINLLKDSFKIDVSRTQMTRFKEIIAFQYFETYTEIIRKMCKSKLIHIDETIAKIMDIDGYVWVFANYDSVYYQFRETRETGFLKELLQDFEGVLVSDFYTGYDSIECKQQKCLVHLIRDLNEDFMKNQLDDELNK

SEQ ID NO: 27233 - DNA, 813 bp, Unknown
  Obtained from environmental sample
  misc_feature (1)..(813): n is a, c, g, or t
atgaaaaaaatagggctactcttcttaataatacctgtctctgtgttccttataacagcttgtagcagaaacccggcatctggcacggtttctcctgttacgcataataagcaggccgttttagaaccagtgttaaaacggataatgccggaagccatggaagatggcatagtaaaggtggctttgatccgtaacacggcggtagaggactatgccctgcagtatatggaaagctgtatagccgaaggacgttctatgggattcattgtggattcttttgttcttggctccgatagcgaaacctgccgggagcacatagctaaaattgcggcagcggactatgacggctttatcttttccatgagtggctctgatttttactacgattcttttctgcccactattaacagcaggattaaaattgttaccttcgacaccctgcccggggaaaacgatctgcgaaaggatctttcctacggcgttacagccaccgcccaggacgacgcggggctggctgaattatgtctgcagacgctggttaatattttttcctcacctatacgcattatttccataacaacaaacgattcgggaaatttcctgttgaatagccgcaatgcggtttacgagaaatatcttcgggagggaaggataattgaagtggcaagaattgctcttcctgattccacatatatccgcagcgggatcagggaggcacttatgaacctacttgcggtttttcctcccggtacgatagacgcaatatgggtgccttttgacgaatatgcccagggctgtattgacgccttttga

SEQ ID NO: 27234 - protein, 270 aa, Unknown
  Obtained from environmental sample
  SIGNAL (1)...(28)
  misc_feature (1)..(270): Xaa is any amino acid
MKKIGLLFLIIPVSVFLITACSRNPASGTVSPVTHNKQAVLEPVLKRIMPEAMEDGIVKVALIRNTAVEDYALQYMESCIAEGRSMGFIVDSFVLGSDSETCREHIAKIAAADYDGFIFSMSGSDFYYDSFLPTINSRIKIVTFDTLPGENDLRKDLSYGVTATAQDDAGLAELCLQTLVNIFSSPIRIISITTNDSGNFLLNSRNAVYEKYLREGRIIEVARIALPDSTYIRSGIREALMNLLAVFPPGTIDAIWVPFDEYAQGCIDAF

SEQ ID NO: 27235 - DNA, 1005 bp, Unknown
  Obtained from environmental sample
  misc_feature (1)..(1005): n is a, c, g, or t
atggagccttttattttcgcggcacccggtgttgacctttcggcaatcaggaatgaaataatgatggcggggaacatttccggaatgttgcgtcaggttcccattattgaccaggtcatctccaccggtgcaatcggaaccgaatcgggcttcgtaatagccatggacgcttatccctggccgcttatcccctttgaccccagaatatcgccctggtatttgggcgcgaaagaaaagcgaggccttttctggaccggagtgtacgcggatttccgggggcgagggccggcaatcacctgcgccgttcctttttatgacacgaacaacgggcaatttaagggcgtagcaaggatcacaatgaagctttcggatttttcgcgcattatttattctgccaacttggggcaggcggggtatattttcatccttgacgcggaaggggtcaggctcttttcaagcggttcgaaggatgttgttgttgccactgacggaagcattgaaggcgaaaattttttgaagagcggcaatcggcgggtcaggagcctgggtatgagcatgaccctcggggccagcggtctaatggagctggagcttaacggcgtcccggtatacgcggcctatactcccattcatactttgggttggagcctcggagtcgccatcccagttgcggaggttcaaataccggcctggcaaatcaatgaaagaattacagctatgacaggtgaagtccttctagccctgaaccggaacttgttttttctgatagctattatcgcttttatactccttatagctcttctggtggcaacttttctttctgtccgttttaccgccgccgtttcagatcccgttcttgctttgaatgagggggttcgggaagtctccagcggaaatctgaaccgcgaggtgagcattaatacgggagacgagcttgagcagcttgctgcttcatttaatctaatgactgaaaatctgcgagaacaggtcgcaaagattgcctga

SEQ ID NO: 27236 - protein, 334 aa, Unknown
  Obtained from environmental sample
  DOMAIN (84)...(165): Cache domain
  misc_feature (1)..(334): Xaa is any amino acid
MEPFIFAAPGVDLSAIRNEIMMAGNISGMLRQVPIIDQVISTGAIGTESGFVIAMDAYPWPLIPFDPRISPWYLGAKEKRGLFWTGVYADFRGRGPAITCAVPFYDTNNGQFKGVARITMKLSDFSRIIYSANLGQAGYIFILDAEGVRLFSSGSKDVVVATDGSIEGENFLKSGNRRVRSLGMSMTLGASGLMELELNGVPVYAAYTPIHTLGWSLGVAIPVAEVQIPAWQINERITAMTGEVLLALNRNLFFLIAIIAFILLIALLVATFLSVRFTAAVSDPVLALNEGVREVSSGNLNREVSINTGDELEQLAASFNLMTENLREQVAKIA

SEQ ID NO: 27237 - DNA, 1284 bp, Unknown
  Obtained from environmental sample
  misc_feature (1)..(1284): n is a, c, g, or t
atgctgggggtactggtaactttgtttatcctgtcgccgaaactggccctctgcgtgattctaactctgccaccggttctcgcgctgaccctgatcagcagggtaaaagcccgcgacgcgttccgccgccagcgtaccgcgtcttccaaagtgtacgcctaccttgccgagcgtcttgccggaattcaggtagtacagcttttccggcgggaggaaaaaagctgcaaggaatttgccgaacggaatcgcgaattgcttgacgccaatctgggcgaaatgtatgtgtttgcgacattccggcccattgttgaatggttcgcgacctttaccgccgccgtggttatcgttgtgggcagtaaaatgattctttcactgtcggtttcactgggggtgctgatcgcctttgtcaatctggttcagatgttttacgcccccgtaacggatattgccgaaaagtacaccctgctgcagtccgctatggccggcggggaaaaagtgttcaagttaatggataccgacgagcatattcccgataacgcggaccgttcagccattatccggggcagcgttgaatttgacaacgtgcgctttgcctataaaaaaggcgaagatgtgctgcgaggtttaagttttgcggtccaaccgggggatatggcggcgatagtcggctataccggcgcgggtaaaaccacgattatcaatgttctgtcacggctctgggatgttgattccggcgagatacgattggacggcgttccggtcaaggacattccccttgatgaattacgccgcgctgtattgcctgttttacaggatgtgtttttattttccggcacggtggcggacaatatcagcctggggctggaactttcgcgagaacagattattgaggcggcaaaaaaagttcacgctcatgaatttatttccgccctgcctgacggctataaaacggaactttccgagaaagcggcgaatatttccacaggacaaaggcagttgataagttttgcccgtgtaatcgcccataacccacgcgtagttattcttgatgaggcgacaagctcgatagataccgagacggagaggctgattcagcttggaatgaagacggtattggcggacaggacttcatttgttatcgcccacaggctttccacgattagggacgcggatagaatttttgttctgtcttcaggccgtcttgtggaggagggcaatcatgaggaattggcggctaaagacggaatttattcaggtctttacagattgcaatatgaggattaa

SEQ ID NO: 27238 - protein, 427 aa, Unknown
  Obtained from environmental sample
  DOMAIN (216)...(399): ABC transporter
  misc_feature (1)..(427): Xaa is any amino acid
MLGVLVTLFILSPKLALCVILTLPPVLALTLISRVKARDAFRRQRTASSKVYAYLAERLAGIQVVQLFRREEKSCKEFAERNRELLDANLGEMYVFATFRPIVEWFATFTAAVVIVVGSKMILSLSVSLGVLIAFVNLVQMFYAPVTDIAEKYTLLQSAMAGGEKVFKLMDTDEHIPDNADRSAIIRGSVEFDNVRFAYKKGEDVLRGLSFAVQPGDMAAIVGYTGAGKTTIINVLSRLWDVDSGEIRLDGVPVKDIPLDELRRAVLPVLQDVFLFSGTVADNISLGLELSREQIIEAAKKVHAHEFISALPDGYKTELSEKAANISTGQRQLISFARVIAHNPRVVILDEATSSIDTETERLIQLGMKTVLADRTSFVIAHRLSTIRDADRIFVLSSGRLVEEGNHEELAAKDGIYSGLYRLQYED

SEQ ID NO: 27239 - DNA, 477 bp, Unknown
  Obtained from environmental sample
  misc_feature (1)..(477): n is a, c, g, or t
gtgatcgccgtaagctttggaaagccccttggcttctataaccaattgcccaagccgtggccccgccggaatggtgatcttgctttctttaatcttttcccgttcgtcgtccaaaaagagtttttcgtactgtgcaattctggccttgcttttagcgtgcctgcctttggggctcatatgtatccattcaagctcacgttgcagttgcttgcgcctgtcgctttcgcccttttcttcctgggcaaggcgctgttccttttgttcaagccaggacgaatagttccccttccagggaattccctcgccgcggtcaagttccagaatccacccggcaacattgtccagaaagtagcggtcgtgcgtaacagcaattactgttcccgcgtattccctaaggtgcctttcaagccatgcgacggtttcagcgtccaggtggttcgtcggctcgtcaagcaaaaggatgtccggcttttttag

SEQ ID NO: 27240 - protein, 158 aa, Unknown
  Obtained from environmental sample
  misc_feature (1)..(158): Xaa is any amino acid
MIAVSFGKPLGFYNQLPKPWPRRNGDLAFFNLFPFVVQKEFFVLCNSGLAFSVPAFGAHMYPFKLTLQLLAPVAFALFFLGKALFLLFKPGRIVPLPGNSLAAVKFQNPPGNIVQKVAVVRNSNYCSRVFPKVPFKPCDGFSVQVVRRLVKQKDVRLF

SEQ ID NO: 27241 - DNA, 831 bp, Unknown
  Obtained from environmental sample
  misc_feature (1)..(831): n is a, c, g, or t
gtgaaaaacaaaatatacgaactgtatgcgcttgaacaattagccgccggcagtacctgtattcaccgcctgaacccgctggttaaattattggcggcggcggtttttatcgtaactgtcgtttcgtttaaccgatacgcactggggcgtttgataccgtacatcttttaccccgcgctcctcatggctctttcagaaacgccgtatacaatgctttttaagcgtttccttatcgccctgccgttctgccttttcgctggaataagcaatataatttttgacagaaacacagcgttaataacaggcggattaaccgtaagccgtggcgtaatttcgtttttttccatattgttcaaaacttatttgtgcgtaatggcagttttaatcctcatatcggtaacacggttttccgaacttgccaatgaactacggcgcttgcgtcttccaaaaatatttatcatcatgtttgaactaacctaccgttacatcggcgtattactgaacgaggcgtactccatgagtatagcgtattcattaagaagcccccacagaaaaggaatagaaatgagggacatgggcagtttttcgggacaattactaatccgcagttttgaccgcgccgagcgagtatacaattccatgaaatgcaggggctatgccccaggttattcatcagagtatgcgctacagaatataccgcanaaaaaagagacgctagtattacaagattatatttttttgtttttagtatgtctgttatgcgctacattccgttttattaacgtaaacgccctgttgaccgaatttttaggaaggttttttatatgctga

SEQ ID NO: 27242 - protein, 276 aa, Unknown
  Obtained from environmental sample
  DOMAIN (17)...(227): Cobalt transport protein
  misc_feature (1)..(276): Xaa is any amino acid
MKNKIYELYALEQLAAGSTCIHRLNPLVKLLAAAVFIVTVVSFNRYALGRLIPYIFYPALLMALSETPYTMLFKRFLIALPFCLFAGISNIIFDRNTALITGGLTVSRGVISFFSILFKTYLCVMAVLILISVTRFSELANELRRLRLPKIFIIMFELTYRYIGVLLNEAYSMSIAYSLRSPHRKGIEMRDMGSFSGQLLIRSFDRAERVYNSMKCRGYAPGYSSEYALQNIPXKKETLVLQDYIFLFLVCLLCATFRFINVNALLTEFLGRFFIC

SEQ ID NO: 27243 - DNA, 723 bp, Unknown
  Obtained from environmental sample
  misc_feature (1)..(723): n is a, c, g, or t
atgctgaaacttgaaaatgtaacaatcatttatccagataaaacaaaagcgattgacaacatatccttgaccgtcaacaccggcgaaaatatagcgttaataggcgaaaacggcgcgggtaaaacaacgcttctgcttgcgatagtcggggtacttgaattatcaaacggtgctattgaaatagacggaatacggcttgaaaaaaagacagtaaatgaaatccgaaaacgaaccggcatggtctttcaaaaccccgatgaccagttatttatgccgcttgtttttgacgatgtggctttcggctgccgtaattatggaatgtctgaagatgaaattaaaatacaggtagatgaaacacttaaacaattaaacataaatcatctgcatagccgttcatcgctaaaattgtccggcggcgaaaaacgcatggcggcaatagcttcagttttggcaatggagccttctattttgatgtttgacgaaccgaccgcttatcttgacccaaaggcgaaacgctctcttattgaaaccataaaaaaattaaaccatacaaaaataatagcgacccatgatataacatttgcgtctaacgtatgcgacagggtaatcatattgaagaacggacaaattgccgcagacggagcgacaaacttgctgtatgataaagaattgatgacgcattgcaaactagaggcgattgaggaaaggaacaaaaaattatga

SEQ ID NO: 27244 - protein, 240 aa, Unknown
  Obtained from environmental sample
  DOMAIN (28)...(208): ABC transporter
  misc_feature (1)..(240): Xaa is any amino acid
MLKLENVTIIYPDKTKAIDNISLTVNTGENIALIGENGAGKTTLLLAIVGVLELSNGAIEIDGIRLEKKTVNEIRKRTGMVFQNPDDQLFMPLVFDDVAFGCRNYGMSEDEIKIQVDETLKQLNINHLHSRSSLKLSGGEKRMAAIASVLAMEPSILMFDEPTAYLDPKAKRSLIETIKKLNHTKIIATHDITFASNVCDRVIILKNGQIAADGATNLLYDKELMTHCKLEAIEERNKKL

SEQ ID NO: 27245 - DNA, 663 bp, Unknown
  Obtained from environmental sample
  misc_feature (1)..(663): n is a, c, g, or t
gtgagcgacagcaaatacatgagagaggtggaatttttggagaaaggcagcatggttgccttggacaagggctacagcgaccatgaagtgtttgaggaactgagcgagcggggcatatattacgctacccgtctgaagaacaacgtctgctacgaaactgtcggcgaagccttctgcccggataatgccgaaggcatagtcagggacgagcatatcctgctgtcgctgcgaggcaagaaaaagcacgatgccagaagggtggaatacgtatcgcccgatgacggcaagaaattcgtgttcctcacgaacaacttcaagctcaaggctgccacgatagcgaagatatacaggaagagatggcagatagagcttatgttcaggaagctgaagcagaacttccagcttaaatacttctacggggatagtgccaacgcaatagagatacaggtttggtgcgttctcattgcctgcctgctgatgtccgtgttcagggcggccaacaaaatccagaaaatgtccttctcaaacatgatgtttgtcgtgaggcgcgttctgatggaatacgtttggctttgcgcggtaatgaccgagtcggagagaacgctgaccagaatgctttccaagcataatcgggctcatgcaccgccttcgctttttgattag

SEQ ID NO: 27246 - protein, 220 aa, Unknown
  Obtained from environmental sample
  DOMAIN (3)...(159): Transposase DDE domain
  misc_feature (1)..(220): Xaa is any amino acid
MSDSKYMREVEFLEKGSMVALDKGYSDHEVFEELSERGIYYATRLKNNVCYETVGEAFCPDNAEGIVRDEHILLSLRGKKKHDARRVEYVSPDDGKKFVFLTNNFKLKAATIAKIYRKRWQIELMFRKLKQNFQLKYFYGDSANAIEIQVWCVLIACLLMSVFRAANKIQKMSFSNMMFVVRRVLMEYVWLCAVMTESERTLTRMLSKHNRAHAPPSLFD

SEQ ID NO: 27247 - DNA, 633 bp, Unknown
  Obtained from environmental sample
  misc_feature (1)..(633): n is a, c, g, or t
atgaaggcatatttagttttacagaacggcacagtaatggaaggcacctcctttggcgctcagggggaagttaccggagaagttgtttttgcaacaggcatgacaggttatttggaaaccctgaccgatccaagctattacgggcagatcgttttacagaccttccccctgattggaaattacggcattatacccaccgattttgaaagcgccggagtcgggacaaaagcctatatcgtcaagcatccgtgtcaaaacccctccaatttccgaagcgagggcactcttgacgctttcttaaaagagcagggcattataggtttatacgggatcgatacgagggctcttacaagaatcatccggcaaaacggcgtaatgaacgggaaaatcacggcgaggcctccgactgaagatgacattgcggaagcaaaggcatatacaatcctgaacgcggtttctgccgtttcctcgcgctccgtaacgaagacctttcctacaaacttgcaagtgctaaggcgagttgcgttgatggatttcggcgcanagcgtgggatagcggcggcgctggcgacgcggggctgtgaggtgtggtctttccacatgacacgaaagcggaggaaatgctacaaatga

SEQ ID NO: 27248 - protein, 210 aa, Unknown
  Obtained from environmental sample
  DOMAIN (1)...(147): Carbamoyl-phosphate synthase small chain, CPSase domain
  misc_feature (1)..(210): Xaa is any amino acid
MKAYLVLQNGTVMEGTSFGAQGEVTGEVVFATGMTGYLETLTDPSYYGQIVLQTFPLIGNYGIIPTDFESAGVGTKAYIVKHPCQNPSNFRSEGTLDAFLKEQGIIGLYGIDTRALTRIIRQNGVMNGKITARPPTEDDIAEAKAYTILNAVSAVSSRSVTKTFPTNLQVLRRVALMDFGAXRGIAAALATRGCEVWSFHMTRKRRKCYK

SEQ ID NO: 27249 - DNA, 642 bp, Unknown
  Obtained from environmental sample
  misc_feature (1)..(642): n is a, c, g, or t
gtgttctatggtcgaagaggagggacaagcgtgaagtatgcgattcttggcggcagctttaaccccgtacacatcggccacctcaatttggccgattctgcgctttttaagtttggttatgaccgggtcatccttgttccggcttatcaatccccctttaaagacagcccgcagggctcttcaccgaaagatcgcctggatatgctggcttcttccatcgcaggcgatcccagactgaccattgatgactgcgagctaagccgcgaaggcctctcctacacaattgacaccataaaggaaataatttcccgctacgaaattgaggggaagcccggcttaataatcggagacgaccttgtttccacttttaatcagtggaaagacgcggaagagattgcaaggcttacagacattataattgccggaaggctcaattccgggacggatctggcggcctttccttatccgcataaaattctggacaacgagctgataaatgtggcgtcggcgcagatacggcagaaaataagctcatgtgaagcctggcattacctcgttccgcctggcgccaggtgtattattgaggacagggcactttacggttttcaaaaactagggctcggccgatctgatacttggtaa

SEQ ID NO: 27250 - protein, 213 aa, Unknown
  Obtained from environmental sample
  DOMAIN (15)...(175): Cytidylyltransferase
  misc_feature (1)..(213): Xaa is any amino acid
MFYGRRGGTSVKYAILGGSFNPVHIGHLNLADSALFKFGYDRVILVPAYQSPFKDSPQGSSPKDRLDMLASSIAGDPRLTIDDCELSREGLSYTIDTIKEIISRYEIEGKPGLIIGDDLVSTFNQWKDAEEIARLTDIIIAGRLNSGTDLAAFPYPHKILDNELINVASAQIRQKISSCEAWHYLVPPGARCIIEDRALYGFQKLGLGRSDTW

SEQ ID NO: 27251 - DNA, 690 bp, Unknown
  Obtained from environmental sample
  misc_feature (1)..(690): n is a, c, g, or t
atggatcagagccttgggggattttcccgttttatgcgggtattccaaagcgatgaaataatcttcagtgaatatgaacccggggacactttctaccttatccagtccggaagggtaaagctgttgaagaacgaaggggaatccgaacggtcgctggatatcctgcagccgccggaaatgttcggcgaaatggcaatactggaaggcacgccccgcagcgccactgccattgccgttgacgaagtaaaagcgctggaattcaacgcgcagaactttgaactcctcatgaccgggaacccgcagattggcattaacctgctgaggatttttgcaaaaaggatttacgattcaaaacggcgtttcatgatccttaccctgcccaccccgcaggtaaagatcgcagacgtgttccttatgcttgatgaaactttgacggatattgacagaaaaaccgacacccgtgaattccagaccactattgaagatatagcgcattgggccggagtgagcgtcacggaggcaagggacatacttcacacctttgtcgtgcagaaccgcatggagatttactccacgcgcatggtggttaaaaatatcaatgactttgcccgcgttgtcagctaccggcgcanacaggcaaagaacccgaccggaataaaacgtgatttaaaaaggagcgttatacattaa

SEQ ID NO: 27252 - protein, 229 aa, Unknown
  Obtained from environmental sample
  DOMAIN (12)...(101): Cyclic nucleotide-binding domain
  misc_feature (1)..(229): Xaa is any amino acid
MDQSLGGFSRFMRVFQSDEIIFSEYEPGDTFYLIQSGRVKLLKNEGESERSLDILQPPEMFGEMAILEGTPRSATAIAVDEVKALEFNAQNFELLMTGNPQIGINLLRIFAKRIYDSKRRFMILTLPTPQVKIADVFLMLDETLTDIDRKTDTREFQTTIEDIAHWAGVSVTEARDILHTFVVQNRMEIYSTRMVVKNINDFARVVSYRRXQAKNPTGIKRDLKRSVIH

SEQ ID NO: 27253 - DNA, 765 bp, Unknown
  Obtained from environmental sample
  misc_feature (1)..(765): n is a, c, g, or t
gtgaaggtgcttctttccaacatgggagccatatccaccgagtacgtgggcgctgctctccgcagtcagagcatcaacgcggaagcgctgcctgtggctaccgccaaaacaatacagattgcccgctcccacgcttccgggaaggagtgcgtccccagccatctggttttgggcagcgccctggaattctttttcagcgataaataccgcaaggacgagctttacatgctttttgtcccaattacaaccggcccttgtcgtaccggccagtactacgtgttttacgagaaccttttccgcgatttaaggcttgagaatgtcgtcgtcttcatcctttccgccgacaattcctacaccgagcttggaggcggctttgccaaagaaatgtggaagggccttgtgctttccgattacctaaaggacatacagtgcgccctcaaggcctgcgccgttgatccccaaaaagcccaggcggattttgaacattcgtggcgcagggtcatgcacgctgtggagcataatcccaaatatctttggaaggaattaaaaaatgtcgcgaatgacgttagaaagatacccttaaagcgaaaagtcgttgactgcccccgcgttcttgtcgtgggcgaaatctacgtgcggcgcgacgattttgccgttggcgagcttaccgaccttatgagcgagagaggcatagtggtaaaggtggctggcatttccgaaatggatacactacctggactttgtgcgggagtacgccctcaataa

SEQ ID NO: 27254 - protein, 254 aa, Unknown
  Obtained from environmental sample
  misc_feature (1)..(254): Xaa is any amino acid
MKVLLSNMGAISTEYVGAALRSQSINAEALPVATAKTIQIARSHASGKECVPSHLVLGSALEFFFSDKYRKDELYMLFVPITTGPCRTGQYYVFYENLFRDLRLENVVVFILSADNSYTELGGGFAKEMWKGLVLSDYLKDIQCALKACAVDPQKAQADFEHSWRRVMHAVEHNPKYLWKELKNVANDVRKIPLKRKVVDCPRVLVVGEIYVRRDDFAVGELTDLMSERGIVVKVAGISEMDTLPGLCAGVRPQ

SEQ ID NO: 27255 - DNA, 522 bp, Unknown
  Obtained from environmental sample
  misc_feature (1)..(522): n is a, c, g, or t
gtgcgggagtacgccctcaataaagtgcttaagctccgtaagccgggaaggcggcttttttcaaagccctggcgtgatttaagaattctcgaaatcgaggaatggtggaaacactcgatagagaaaaaagttattaagattttagggcctacgggactcattcccgaaacgccccatgacatgcacaaaataatggaatacacacaggaacattttgtgaacctggaactcaattcggagatagcggtttcttccggttccgccgccgccgcaatggaggcaggctattcaggcatcgtgaacatcagcccgtttgcctgcctcataggccgggtcatcgaagggctatttactccctgggcaagagagcgcaactacccgattctctctgtggaagttgacggaaaccttttgcccccgaacatcgtaaacaagctcaatatcttcatggtgaacgtgttgcgctttaaggggagcgatgatctttcgggcctggtggacgcgccgcgttgtgaaagctga

SEQ ID NO: 27256 - protein, 173 aa, Unknown
  Obtained from environmental sample
  misc_feature (1)..(173): Xaa is any amino acid
MREYALNKVLKLRKPGRRLFSKPWRDLRILEIEEWWKHSIEKKVIKILGPTGLIPETPHDMHKIMEYTQEHFVNLELNSEIAVSSGSAAAAMEAGYSGIVNISPFACLIGRVIEGLFTPWARERNYPILSVEVDGNLLPPNIVNKLNIFMVNVLRFKGSDDLSGLVDAPRCES

SEQ ID NO: 27257 - DNA, 405 bp, Unknown
  Obtained from environmental sample
  misc_feature (1)..(405): n is a, c, g, or t
atgatctttcgggcctggtggacgcgccgcgttgtgaaagctgataaggttattgcgacctaccgccgcatgcggaaagagccgctatggagactgcttgcttcaaccaatggcccctttgtcattggtctgctgcaatcacatctttatgaaaatgagcggagcttgcccgcatcgatcctgcatgaacgaattggacgcgatctggaatcgctcagagcacggggagaagatcttcctcaaaccgctcatgcctatattgccaactggctgacggaaggttatctcgaaagacgttttcctgccggagccgccgaagaagaatatgagctttccaccgcggctgtcgaagcgatccgtttcctgtccggttggagcagccgcatcggcctcggccgaatctga

SEQ ID NO: 27258 - protein, 134 aa, Unknown
  Obtained from environmental sample
  misc_feature (1)..(134): Xaa is any amino acid
MIFRAWWTRRVVKADKVIATYRRMRKEPLWRLLASTNGPFVIGLLQSHLYENERSLPASILHERIGRDLESLRARGEDLPQTAHAYIANWLTEGYLERRFPAGAAEEEYELSTAAVEAIRFLSGWSSRIGLGRI

SEQ ID NO: 27259 - DNA, 795 bp, Unknown
  Obtained from environmental sample
  misc_feature (1)..(795): n is a, c, g, or t
atgaatctaggaacacctaatgcaaatgacgcaactcgcacggttaaccgttcaagaagtgtcgttccgtcaagcggtctttgttcacgctgcatggacgattgccgggggaactgcgagatttttaaggcgacattcaggggcagggaacttatctatccgggtccttttggcaatgttactgccggcggagacaagaattatcctgtagattattcccacttgaacattcaagggtatgctacgggagcaaggggcttgcctgaaggcgttgcggcggagccggataacgctctttttgcgtcggtcaacaccgaaaccgaatacggctgggataaaaaagtaaaaatgcgtgtgcctatttttacaggtgcgttaggctcaacagagattgcccgtaaaaactgggaacattttgctgttggctctgcgttagcaggcgttacgctggtttgcggcgaaaacgtttgcggtattgatcctgcgcttgaacttgacgggcaaaaaaaagttaagaaagcacccgatatggatcgccgtatcgaaaattacaaacgctaccattctggttacggcgaaatccttattcagatgaatgttgaggacactcgtcttggcgttgcggaatacataatcgaaaaacacggcattgataccatcgaactaaaatggggacagggagcaaaagatatcggcggcgaaattaaagtcggctcgcttgaacgagctcttgaacttcaaagcagaggctatattgttacgcccgacccgtccaacccctctcggccaatctga

SEQ ID NO: 27260 - protein, 264 aa, Unknown
  Obtained from environmental sample
  misc_feature (1)..(264): Xaa is any amino acid
MNLGTPNANDATRTVNRSRSVVPSSGLCSRCMDDCRGNCEIFKATFRGRELIYPGPFGNVTAGGDKNYPVDYSHLNIQGYATGARGLPEGVAAEPDNALFASVNTETEYGWDKKVKMRVPIFTGALGSTEIARKNWEHFAVGSALAGVTLVCGENVCGIDPALELDGQKKVKKAPDMDRRIENYKRYHSGYGEILIQMNVEDTRLGVAEYIIEKHGIDTIELKWGQGAKDIGGEIKVGSLERALELQSRGYIVTPDPSNPSRPI

SEQ ID NO: 27261 - DNA, 552 bp, Unknown
  Obtained from environmental sample
  misc_feature (1)..(552): n is a, c, g, or t
ttggggctgagtaaatctcaaatgagtcatgttatcagcgggcggacaaagcgttctcgtgaagtattagttaaaatggctttaaaatataaaataaacctaaactggttaatttccggaaaaggtcatccgcaagaggaagcggaaaccacacttatcgaactttttaatcaggaagcggctgccggcaggggtatccttattgaagactatcctgaaataagcgctattcctgttccgcaaacacttattcatcctcataaaccatccggtttaaaagcggtatatgtgtcaggcgattctatgatagaagaaaaaatctatgacggcgatatcgttattttctgtccaaaacttacatccggagacgctgtctatgttgtatctgtgggagacagccttcttgttaaacgagttcattttgacgggataaagaacaccatcacccttataagcgccaattcgtgttatccgccgcgtatactgacggaggacgaagctgataatgttaaaatagaaggaaaggttatcgcttgtcttcacaggatgtga

SEQ ID NO: 27262 - protein, 183 aa, Unknown
  Obtained from environmental sample
  DOMAIN (96)...(165): Peptidase S24-like
  misc_feature (1)..(183): Xaa is any amino acid
MGLSKSQMSHVISGRTKRSREVLVKMALKYKINLNWLISGKGHPQEEAETTLIELFNQEAAAGRGILIEDYPEISAIPVPQTLIHPHKPSGLKAVYVSGDSMIEEKIYDGDIVIFCPKLTSGDAVYVVSVGDSLLVKRVHFDGIKNTITLISANSCYPPRILTEDEADNVKIEGKVIACLHRM

SEQ ID NO: 27263 - DNA, 1095 bp, Unknown
  Obtained from environmental sample
  misc_feature (1)..(1095): n is a, c, g, or t
ttgacaaatgcaaaggaacagccgaaagtgaaatttacaaggattgctactttagcttgncagacagggactcaagggttcatggacagcagattcgttgaacaaataaatgccgcgctttctccaagcaatattctggaagcgctgataattaccgggccagaaggcgagtacgcgtttgagcgtgaacagggatatgccataacatgggctaataattctcccagattcattaaaagattcagtttttcaaaccagccttattatagaccacttccgtttcaaaacattcgcaatgtcaatataaaagccgttgcgagagcttttgactataatgaaatattaaaaatccttaaagaaacccttcttttaattctggcagggtttgcaattgctttttttacgatgcttttgcaactgcttcttggaaaaccggaaattgaacaacaaacgataaataatgcggcttacccggagcggcagaatgagagagacaatgaaagagatattgaaaattatttcacagcagaagaaaaaactcaggatttttcatccgtaaataataccccctatacggcagatgaaacaatgccgaaaggtctttattcgccgcgaagcaatatcggctggcaggaatatataaatgacagactcaattctgagctatatcgctgttcatccacggaaaatgatttaactcttgtattaattgaattcatggatttaaaaaatgacgaaatgtacaggcaggcggcggaagaaacggcttcattcttttcatcgagggatcttctttttgaatacggcaggtacggcatcgctgttattcttccgggaattgatcttggcacgggaatatcaaagttagaaaaattttaccagcgcataacaggaaaattcccgcataacaaaaaaggaacgcaaggtatctgcatcggtctttcttcacgctcgggcaggctgcttaatgcaggccgcctgattttggaatgcagagaagcgcttgaaaaagcaaaatacgatccaaattcttcaataatcgcttttaaaagcgatccggaaaaatacagagcctttattgcttctcaaaactag

SEQ ID NO: 27264 - protein, 364 aa, Unknown
  Obtained from environmental sample
  DOMAIN (210)...(345): GGDEF domain
  misc_feature (1)..(364): Xaa is any amino acid
MTNAKEQPKVKFTRIATLAXQTGTQGFMDSRFVEQINAALSPSNILEALIITGPEGEYAFEREQGYAITWANNSPRFIKRFSFSNQPYYRPLPFQNIRNVNIKAVARAFDYNEILKILKETLLLILAGFAIAFFTMLLQLLLGKPEIEQQTINNAAYPERQNERDNERDIENYFTAEEKTQDFSSVNNTPYTADETMPKGLYSPRSNIGWQEYINDRLNSELYRCSSTENDLTLVLIEFMDLKNDEMYRQAAEETASFFSSRDLLFEYGRYGIAVILPGIDLGTGISKLEKFYQRITGKFPHNKKGTQGICIGLSSRSGRLLNAGRLILECREALEKAKYDPNSSIIAFKSDPEKYRAFIASQN

SEQ ID NO: 27265 - DNA, 843 bp, Unknown
  Obtained from environmental sample
  misc_feature (1)..(843): n is a, c, g, or t
ttgggcggtacaattgtctattttccgagctccgattatgactgttccaatatacataaagatataaaaatacaaataatcaagccgaaaatcaatcttaatttaaaaaaagcgtatcaaaatattgtgaataaataccgactgattatcaattcgtataccggcagacttagccagcttcttaaaggtgcggttgatgaaattgaagaccgccagttttttggaactggcattatgtcaaaaaaacttgccgacgtaaaaaaacgctactggtacaagatggtacggggggaggctgttcccaacatcgggtttctttttctcattgacggatcaggttccatggagggagagcggctgcaaggcgctttggaaacttgtgtcattcttcatgaagtcttgcgtgcaaataagattccgcacgcgattgttgagcatcgcgctctatatggttccgctcgtttggagcataaattaatggtaagtttttccggcagaaaagaagaaaaatataatttgcttggtttggaggctgatgaaggaacaagagaggggttaacgctttattgggcggaaaaatatctgcaaaatgaatgttccgccgagaaaaaaatgattattatgatctctgacggagctccggcccatagttacacggataattatggccgcgaaaaagagtattatcccccggtttcgataaaagacacggctttggcggtaaaaaaaattacacggcgcggaaccgaaattatcgctattgctctttcagcgccgggtgaaaatgattgttacggacaattaaaagtatgtataaagatgttgtcgcttgtacagatataa

SEQ ID NO: 27266 - protein, 280 aa, Unknown
  Obtained from environmental sample
  misc_feature (1)..(280): Xaa is any amino acid
MGGTIVYFPSSDYDCSNIHKDIKIQIIKPKINLNLKKAYQNIVNKYRLIINSYTGRLSQLLKGAVDEIEDRQFFGTGIMSKKLADVKKRYWYKMVRGEAVPNIGFLFLIDGSGSMEGERLQGALETCVILHEVLRANKIPHAIVEHRALYGSARLEHKLMVSFSGRKEEKYNLLGLEADEGTREGLTLYWAEKYLQNECSAEKKMIIMISDGAPAHSYTDNYGREKEYYPPVSIKDTALAVKKITRRGTEIIAIALSAPGENDCYGQLKVCIKMLSLVQI

SEQ ID NO: 27267 - DNA, 696 bp, Unknown
  Obtained from environmental sample
  misc_feature (1)..(696): n is a, c, g, or t
atggagagaggtatcacggccatggaagagatttcccgctccggcaacgagataggcaagatcatcaagaccatcgacgagatagccttccagaccaacctgttggccttgaacgcggcggtggaggcggcccgggccggcgaggccggggccggcttcgccgtggtggccgacgaggtgcgcaacctggccatccgctcggccgaggcggccaagaacacggccgacctcattgaggccaccataaagaacatcaattccggctcggacatggtcaacgccacggccgaagccttcaaggtagtggagaccaacgcggccaaggtgggctccctggtctcggaagtggccgcggcctccaaggaacagagccagggcataacccagatcaccaaggccatgagcgagatggacaaggtgacccaggccaacgcggccacggccgaggaatcggccagcgcggccgcgcagttgtcccaacaggccaacaacctcttacaggtggtcaacgagatcaacgttctggcccacgggaccggcggtcgcgcccaaagccagggcgccgccgcccagccccgccttaacgcgccgactccgccgcctccggccatgcccatgccccccagacctccggccgggaaccaggcttccgaggccaacaaggccatgccgatggacgacagtttcgacttctga

SEQ ID NO: 27268 - protein, 231 aa, Unknown
  Obtained from environmental sample
  DOMAIN (1)...(175): Methyl-accepting chemotaxis protein (MCP) signaling domain
  misc_feature (1)..(231): Xaa is any amino acid
MERGITAMEEISRSGNEIGKIIKTIDEIAFQTNLLALNAAVEAARAGEAGAGFAVVADEVRNLAIRSAEAAKNTADLIEATIKNINSGSDMVNATAEAFKVVETNAAKVGSLVSEVAAASKEQSQGITQITKAMSEMDKVTQANAATAEESASAAAQLSQQANNLLQVVNEINVLAHGTGGRAQSQGAAAQPRLNAPTPPPPAMPMPPRPPAGNQASEANKAMPMDDSFDF

SEQ ID NO: 27269 - DNA, 744 bp, Unknown
  Obtained from environmental sample
  misc_feature (1)..(744): n is a, c, g, or t
ttggcaatagccctgatgatatatgtcggcattgtggcaacccgacggaactacccccggggtgagatagtcaagtttaagacatttctgattaccacgctgaaatccattcccgcccttctcacgccgataatactgctggtgggcatctactcaggcgtcatgacccctaccgaagcgggcgctattgcgggtttttacgccattctgatctcggtattcgcttatcgggctttgggattcagggattttataaaactggtgcaggatactataaaggacgttggcgctaccagtataatgattggagccgccgcaatcatttcgtatatcgttgcaagagagcaaatcgccagtatcctcggcaactggataataggcatttcaggcagcaaatacttctttctcatgctgaccaatgtggttattctcatccttggctgtttcattgatacttccaccatacagttgatctttgtgcccatccttattccggtagccaaaatactcgggattgaccttgttcatttcggcgtggttgtcacatttaatatgatgatcggcctttgtacgccgccttttggtatgctgctttttatcactgcgggtatttcaggcacaccgctaaaagccatcataagggaaattatttggcctataatagccatgcttattgtgctggtggtcttaacatacatccccgagacaatcacttttattccgaaactatttggtttaatgtaa

SEQ ID NO: 27270 - protein, 247 aa, Unknown
  Obtained from environmental sample
  DOMAIN (1)...(237): DctM-like transporters
  misc_feature (1)..(247): Xaa is any amino acid
MAIALMIYVGIVATRRNYPRGEIVKFKTFLITTLKSIPALLTPIILLVGIYSGVMTPTEAGAIAGFYAILISVFAYRALGFRDFIKLVQDTIKDVGATSIMIGAAAIISYIVAREQIASILGNWIIGISGSKYFFLMLTNVVILILGCFIDTSTIQLIFVPILIPVAKILGIDLVHFGVVVTFNMMIGLCTPPFGMLLFITAGISGTPLKAIIREIIWPIIAMLIVLVVLTYIPETITFIPKLFGLM

SEQ ID NO: 27271 - DNA, 1557 bp, Unknown
  Obtained from environmental sample
  misc_feature (1)..(1557): n is a, c, g, or t
ttgaaatttcacgaagttaatgctttacaaaatgaagaccctttaaccggcgcggttaaaaaactgttcggtctttcttatctgttcccgtatcaaagacttgtaatgacaaatattctggaagcggcgcaggcggtgggaattccagtaaaatggccggaagaaaacgagaaaattgatatttccgaagatgagccgtttatttccgaccgtgaaatgtcaggaaggcagatagttattctgccgacaggagcgggaaaatccctctgtttccaactgccggcaatgttgatagaagggcttacattggtcatctatcctattttatcgctaatggcggatcaacagaggcgtttaggcgagcgcagcttttccccggtaacaatcaggggaggacaaagcaaggaagagcgcaatgagatttggcaaaaactggaaagcggacaaagtaagtttataatcgcaaaccctgaagtactgcttacgccacaggtaaaagaaaaactggaaaaaataaaagtcgtccacattgtaattgacgaggcacactgtgtaagcgaatggggagaaagtttccgtcccagctatctggaaattggctctataataaactctcttaatccgccgcttgttaccgcttttaccgccaccgcaagcacacccgtacttgaaaaaattaaaaaatacatttttggcgatactgatattaatcaaattattggtaaccccgacaggccgaatatttactacaccgcaaaaggttgcattaaccgcaatctggcggttcgggatttattaattaaaaacgcgcgcccagcgattgtattctgctcctcgcgccccggcactgaaaaactgcccagctaccttcgcggcgaattaaaagaaatgggatatgactggtacaaagaaattcgcttttaccacgcaggtttaagcagggaagaaaaagcggaaacggaaaaatggctgttaaaaaatacggaagcggttttgtgcagtacatgcgcgtttgggatgggagtggacaagtccgatgtacgcactgtaatacacagggactgcgccccgtctgttgaagcgtatttacaggaatcgggcagggccggacgcgacggagaacaatcaaaagcgattcttttatggggaccggaagatgaaatttccatgaaaagggcaaaaaccgaagcggatcgtaaaagactctcggcgcttttcagttacgcgagaaataccgagcattgcagaaggcactcactacttgccatgctaaattacgattcaggcggagaagcgccggaaaaattgtgctgtgatgtctgcgaaaaagaagccggcggcggcttaagagaagaattgtcaatattgaattttttcaaaaagaacaaaagacgttttacacaaaacgaagccgtcggcgttttggcgcagagcgaaacaatacgctggtcgcaagaagaagcctcccaggtcatcggctatttgttaaaaaccaaaaacttaaggaggcttaaatttccctggaaaaataaaattactcttttaggccgcccatag

SEQ ID NO: 27272 - protein, 518 aa, Unknown
  Obtained from environmental sample
  DOMAIN (302)...(373): Helicase conserved C-terminal domain
  misc_feature (1)..(518): Xaa is any amino acid
MKFHEVNALQNEDPLTGAVKKLFGLSYLFPYQRLVMTNILEAAQAVGIPVKWPEENEKIDISEDEPFISDREMSGRQIVILPTGAGKSLCFQLPAMLIEGLTLVIYPILSLMADQQRRLGERSFSPVTIRGGQSKEERNEIWQKLESGQSKFIIANPEVLLTPQVKEKLEKIKVVHIVIDEAHCVSEWGESFRPSYLEIGSIINSLNPPLVTAFTATASTPVLEKIKKYIFGDTDINQIIGNPDRPNIYYTAKGCINRNLAVRDLLIKNARPAIVFCSSRPGTEKLPSYLRGELKEMGYDWYKEIRFYHAGLSREEKAETEKWLLKNTEAVLCSTCAFGMGVDKSDVRTVIHRDCAPSVEAYLQESGRAGRDGEQSKAILLWGPEDEISMKRAKTEADRKRLSALFSYARNTEHCRRHSLLAMLNYDSGGEAPEKLCCDVCEKEAGGGLREELSILNFFKKNKRRFTQNEAVGVLAQSETIRWSQEEASQVIGYLLKTKNLRRLKFPWKNKITLLGRP

SEQ ID NO: 27273 - DNA, 387 bp, Unknown
  Obtained from environmental sample
  misc_feature (1)..(387): n is a, c, g, or t
atgccgccggaagaagatgtagcgcagattttatcagaaccattaagcgatgatattgacgctgacattcctgctgatgatcttcatctttcagattttgatgatcttgaaacagatacccttgatgctgaagaaccgcagaaacccgcagtctcagccaaaaaacctgaacctgtaaaacagcctgtacaggcgcagccccagcaaaaggcaggcgggaaggggaattttgaacttcctgtgaaattaaaatcagagctgagaaatattcttagttacatggatcagcttcttgattctcttcctgaagaaaaaattgaagaattcgcaaaatcggaatattttgattcctataaaaaactctttaaggatttggggctggtataa

SEQ ID NO: 27274 - protein, 128 aa, Unknown
  Obtained from environmental sample
  misc_feature (1)..(128): Xaa is any amino acid
MPPEEDVAQILSEPLSDDIDADIPADDLHLSDFDDLETDTLDAEEPQKPAVSAKKPEPVKQPVQAQPQQKAGGKGNFELPVKLKSELRNILSYMDQLLDSLPEEKIEEFAKSEYFDSYKKLFKDLGLV

SEQ ID NO: 27275 - DNA, 783 bp, Unknown
  Obtained from environmental sample
  misc_feature (1)..(783): n is a, c, g, or t
atgacgcgggagcttgtctcggaggagtcctctcctttccaggtctgcttcatgacgacatgctggattgcctttcccgcatccttgacccggaacttggggtcttcttccccctgccggctgaccggcataccccggacaccagagaggagcgctatgacccccgcgacttctagcctcgccctcacccctctcgccgacagacaggcccgcgcctatgtcttccggcgcatggcggaggagggccgcgcccgcatcgtgcaataccatctgccggaaccgagccttgacgcatggcttgagcataccgcgccggaaagggcctggttctgcactttgagcggctgcgggccgctttgccgtgatgcttcgtcaggcttcgtttcgggcttgggtcatggaccgcaagagtccactccccgcgcccgaaacttgtcttcctcgcctgacggcaaagccttcccgcagctttatgctgctgtatggatcaacaacttcaccggcaaggctgccttcgtccacttcgtcatcttccggggctttgagcatctggcccgccacatttgtcacagtacatgccgctgggccttttccggcgggctggcctgcctgctgggcctgatcccggcggtcaaccgcgccgcgcttgcggccatgcgcgcctgcggctggcaggagatatttcgcgtcccgcaggcgtgtttcgttcaccggcttggccgccacgttgacggcgtgctgtgtcatttcaccccgcaacttttacacgaggccatccaatga

SEQ ID NO: 27276 - protein, 260 aa, Unknown
  Obtained from environmental sample
  misc_feature (1)..(260): Xaa is any amino acid
MTRELVSEESSPFQVCFMTTCWIAFPASLTRNLGSSSPCRLTGIPRTPERSAMTPATSSLALTPLADRQARAYVFRRMAEEGRARIVQYHLPEPSLDAWLEHTAPERAWFCTLSGCGPLCRDASSGFVSGLGHGPQESTPRARNLSSSPDGKAFPQLYAAVWINNFTGKAAFVHFVIFRGFEHLARHICHSTCRWAFSGGLACLLGLIPAVNRAALAAMRACGWQEIFRVPQACFVHRLGRHVDGVLCHFTPQLLHEAIQ

SEQ ID NO: 27277 - DNA, 1662 bp, Unknown
  Obtained from environmental sample
  misc_feature (1)..(1662): n is a, c, g, or t
atgcattacaaagcggctnttcgtgataaattgggtgcctctgcttttactgaacaattggacagcgaacgggcctatntgcttggaatggcttatttaaagggaattagtgtagaaagagattttgacagagcggtacaactgttagaggttgctacagaggatagtactatggcatccattgacgcagcaagccagttggcaagaatctacgaggatggaatagggactaatgtcaatttagataaagcattacattggcatcagagggctttaaccatcaaagagaaagcgttgggtaaaaagcacccggacactgccgccgtttataataacattgcgtttgtatataataatcaaggggagtaccaaaaagcattgagatggtaccagaaggccatgggcatctttgaaaaagtgcttggaaaggagcatccgaatactaccgccgcttataacaacattgcggtggtctacgatagccaaggaaagtacatcaaggcactggaatggcatcagaaagcattagccattcgtgagaaagtgttgggaaaggaacacccggacactgctatcagttataacaacattgcaggtgtctacagaaatcaaggggagtactcaaaagcgctggaatggtatcagaaggcttctgccgtctgtgaaaaagttctgggtaaagagcacccggactcttccgtcaactataataacattgcgcttgtataccatcatcaaggagactatgccaaggcgctggaatggtttcagaaggcttctgccgtctgtgagaaagtgcagggcgaagagcacccgtccaccgccaccagttacaacaacattgcacgtgtatactctcaccaaggtgaatacgcgaaggcactggaatggcacctgaaagctttagccatccgtgagaaagtgctggacaaggaacacccggacaccgccattacttacaacagcattgcggatgtctacgatgctcaaggagagtatgcgaaagcgctggaatggcatcagaaagctttagccatccgtgagaaaatacttggcaaggaacacccggacaccgccaccgcttacaacaatattgcaagtgtatactctcaccaaggagagtacacgaaggcattggaatggtaccagaaagctataaacatttgtaagaaaatgctgggcaatgagcacccggacaccgccaccacttacaacaacattgcggttgtgtacttttaccaaggagagtacgcgaaggcgctggaatggtaccaaagggctttagccgtctgtgagaaagtgctgggtaaggaacacccggacaccgccgccacttacaacaacattgcggttgtctatttttatcaaggcgagtatgcgaaggcgctggaatggtaccagaaagttttaaccatacgtgagaaagtactgggtaaggaacacccggacaccgccgccacttacaacaatattgctagtgtttactataatcaaggggaaaacgcaaaggcgtcagaatggtacgggaaggctttagccatcagtgagaaagtactgggcaaggagcaccccttcaccgccactacttacaacaatgttgcgcttgtatacaataatcaaggcgagtacacgaaggcactggaatggtaccagaaggcttaa

SEQ ID NO: 27278 - protein, 553 aa, Unknown
  Obtained from environmental sample
  DOMAIN (107)...(140): Tetratricopeptide repeat
  misc_feature (1)..(553): Xaa is any amino acid
MHYKAAXRDKLGASAFTEQLDSERAYXLGMAYLKGISVERDFDRAVQLLEVATEDSTMASIDAASQLARIYEDGIGTNVNLDKALHWHQRALTIKEKALGKKHPDTAAVYNNIAFVYNNQGEYQKALRWYQKAMGIFEKVLGKEHPNTTAAYNNIAVVYDSQGKYIKALEWHQKALAIREKVLGKEHPDTAISYNNIAGVYRNQGEYSKALEWYQKASAVCEKVLGKEHPDSSVNYNNIALVYHHQGDYAKALEWFQKASAVCEKVQGEEHPSTATSYNNIARVYSHQGEYAKALEWHLKALAIREKVLDKEHPDTAITYNSIADVYDAQGEYAKALEWHQKALAIREKILGKEHPDTATAYNNIASVYSHQGEYTKALEWYQKAINICKKMLGNEHPDTATTYNNIAVVYFYQGEYAKALEWYQRALAVCEKVLGKEHPDTAATYNNIAVVYFYQGEYAKALEWYQKVLTIREKVLGKEHPDTAATYNNIASVYYNQGENAKASEWYGKALAISEKVLGKEHPFTATTYNNVALVYNNQGEYTKALEWYQKA

SEQ ID NO: 27279 - DNA, 504 bp, Unknown
  Obtained from environmental sample
  misc_feature (1)..(504): n is a, c, g, or t
atggcagaaaaaatagccgcttgggcaaagtcgtctcaagattctgttattctcatgggaatggcaagccgcggcgtgccaatagctaagaatgtagctgaaatcctcagcagcaaacacaatttaaatgttgcagttggcagcatagacaattcttattatagagacgattttcactatcgcaaacgtacaagtaatccatccttgaaaataatagaaatgccagcagaagttgagggcaaaaccgtgattttgatagacgatgttctttacacaggtcgctccgtacgtgccgctttgcaggctattttagaccttggtcgtccggctgcagtgaagctctgcgtgattgtggatagaggttgtcgcgaattgccaatagcccccgattatgtgggcatttccatagagacgaagcacaaccaagaagtaaaagtttgtttgagtccctacgacaaagaaactgcggtttggcttgttgaaatagatggagagcctgcatga

SEQ ID NO: 27280 - protein, 167 aa, Unknown
  Obtained from environmental sample
  DOMAIN (1)...(137): Phosphoribosyl transferase domain
  misc_feature (1)..(167): Xaa is any amino acid
MAEKIAAWAKSSQDSVILMGMASRGVPIAKNVAEILSSKHNLNVAVGSIDNSYYRDDFHYRKRTSNPSLKIIEMPAEVEGKTVILIDDVLYTGRSVRAALQAILDLGRPAAVKLCVIVDRGCRELPIAPDYVGISIETKHNQEVKVCLSPYDKETAVWLVEIDGEPA

SEQ ID NO: 27281 - DNA, 933 bp, Unknown
  Obtained from environmental sample
  misc_feature (1)..(933): n is a, c, g, or t
atgagcgcactggaaattaagcacttgctcggcttgcggggcgttagcgcaaacgatatcagagctattttagacaatgcagcagaattcagaaaagtattggaacgcaaggtaaaaactttgcccacgctccgcggcacaaccgttgtgaatttattttttgaaagctcaacccgtacccgcataagctttgagcttgcagaaaaacgcctctctgccgacattgtgaatttcgcaacctctggttctagcgttcaaaaaggcgaaactctgctggatactcttaaaaacatagaagcgatgaaaatagatgtggttgttgtgcggcacaaaggcacaggtgtcccaaaatttttatcggaacacaccaatgccgttattgtgaacgccggagacggagcgcacgaacaccccacgcaagccctgctggatattttcacaattgaaaacagtttgggcaacctaagcggcaaaacagtcaccattgttggcgatattaagcacagcagggtagcccgttcaaatgcttggggcttgaatgccttaggtgccaaagtccgtttttgcggtcctccaaccctcatgcctcgcaacccaaaaatgcttccagctgaaattttttgcgatgttgccaaagcagttgaaggagctgatgccgttattgcccttcgcctgcaaaaagaacgaatggacgattctcttttgccaagcataagagaataccgcaacttttacggcataacaaggcaaaccttggaacacgcaaaaaagaacgttttaattatgcatccgggtccaatcaataggggagtggagttggattcggatattgccgatggcgaaaactccgttattctggaacaggtcacgaatggcgttgctgttaggatgtcggttttgtatttgttgtcagcgggtagggctggagactag

SEQ ID NO: 27282 - protein, 310 aa, Unknown
  Obtained from environmental sample
  DOMAIN (155)...(303): Aspartate/ornithine carbamoyltransferase, Asp/Orn binding domain
  misc_feature (1)..(310): Xaa is any amino acid
MSALEIKHLLGLRGVSANDIRAILDNAAEFRKVLERKVKTLPTLRGTTVVNLFFESSTRTRISFELAEKRLSADIVNFATSGSSVQKGETLLDTLKNIEAMKIDVVVVRHKGTGVPKFLSEHTNAVIVNAGDGAHEHPTQALLDIFTIENSLGNLSGKTVTIVGDIKHSRVARSNAWGLNALGAKVRFCGPPTLMPRNPKMLPAEIFCDVAKAVEGADAVIALRLQKERMDDSLLPSIREYRNFYGITRQTLEHAKKNVLIMHPGPINRGVELDSDIADGENSVILEQVTNGVAVRMSVLYLLSAGRAGD

SEQ ID NO: 27283 - DNA, 1680 bp, Unknown
  Obtained from environmental sample
  misc_feature (1)..(1680): n is a, c, g, or t
atggccgaggttgagtcccccgcaaggcaaagacaatcgagaagtaccttgggttctttatatacggttaaagcttccatggggcacttgatcgatctgccaaaatcccgccttgccatagacgtagaaaaaaattttgaaccggaatacataactgtccgtggacgggcaaagctccttaaagaactacagggggacgcaaagaaagcgggtacggtgcttctggcaagtgataatgaccgcgaaggcgaggcaattgcctggcacttaagaaacgctataagcgcaaagaccgacaaagtacccattcagcgtatcgcttttaacgagatcactccgggggccataagggacgcggtggcaaacccgtcaacgatcgacgaggcgaaggtaaacgcccagaaagccaggcggattcttgaccgtcttgtgggctataacctttcgccccttctctggaaaaaagtaaagaacgggctttcggcgggaagggtacagtcagtggcgttgcgccttatctgtgaaagggaaaaggaagtggaatcctttgttcccgaagaatactggacgctggaagcggattttaaggcaggcaaatcctcatatacggcgcagctggtttcatggaacggtgaaaagccagagttaaaaaacgagggtgacgtccgcgcaataattgacgccgttaaaaacagtgaatgtcttgtttccgaaatcagggagattgaaaagagcgttaagccaaagcctccttttacaacgtcccagcttcagcagaccgcggcaaaccgccttggttttacctccaggaaaaccatgcagattgcccaacagctttacgaaggaataaaccttcaaagctcccgcatcgggcttatcacatacatgcgtaccgattcggtgcgaatttcaaagagtgcccaggaagaggccagaaagtggataggcgaaaaatatcctggggagcttcccgatcaggcgcaggaatactcggtgggaaaaaaggcacaggacgcccatgaggctatacggcctacctatatcagctatacgccagacagcgtaaaagaatacctgacaaaagatcagttgaaactttacacgattatctgggaaaggtttgtgtccagccagatgaaaaatgccaggacaaaaaccgtgagcattgacatttcagcttcatcgggcgatgcctgcggcgtgttccgcatagccggtacaaaaataattgaaaaaggtttttaccgtgctatgaaacttctggcatccagggatgaaaaagggagtacttatccgtcgttaaagaaaggcgacagagtaaaagttgaccagttcaggccggaacagcacttcacccaggggccgccccgtttcaccgacgcctccattgttaagaccctggaagagaagggcattggcaggccttcaacctatgtgcctataatttccgtccttttggatcgctattatgttgtcagatcgaacaaacagctagtccccaccgtcttgggcaggatgataaacgatctgcttgtggaaaattttccgcaagtggtaaacgcgagttttaccgcctcaatggaaacgatgcttgacgaggtcgaagatagccagagatcgtggccggacatgatacgcgagttttgggatcctttaaataccgggggggactcgcgataa

SEQ ID NO: 27284 - protein, 559 aa, Unknown
  Obtained from environmental sample
  DOMAIN (4)...(109): Toprim domain
  misc_feature (1)..(559): Xaa is any amino acid
MAEVESPARQRQSRSTLGSLYTVKASMGHLIDLPKSRLAIDVEKNFEPEYITVRGRAKLLKELQGDAKKAGTVLLASDNDREGEAIAWHLRNAISAKTDKVPIQRIAFNEITPGAIRDAVANPSTIDEAKVNAQKARRILDRLVGYNLSPLLWKKVKNGLSAGRVQSVALRLICEREKEVESFVPEEYWTLEADFKAGKSSYTAQLVSWNGEKPELKNEGDVRAIIDAVKNSECLVSEIREIEKSVKPKPPFTTSQLQQTAANRLGFTSRKTMQIAQQLYEGINLQSSRIGLITYMRTDSVRISKSAQEEARKWIGEKYPGELPDQAQEYSVGKKAQDAHEAIRPTYISYTPDSVKEYLTKDQLKLYTIIWERFVSSQMKNARTKTVSIDISASSGDACGVFRIAGTKIIEKGFYRAMKLLASRDEKGSTYPSLKKGDRVKVDQFRPEQHFTQGPPRFTDASIVKTLEEKGIGRPSTYVPIISVLLDRYYVVRSNKQLVPTVLGRMINDLLVENFPQVVNASFTASMETMLDEVEDSQRSWPDMIREFWDPLNTGGDSR

SEQ ID NO: 27285 - DNA, 471 bp, Unknown
  Obtained from environmental sample
  misc_feature (1)..(471): n is a, c, g, or t
atggtgatcccacgggcccacgattgtataagtttgcttcttggctccagggagcgttacaatgagctttttaatcaaagccccggaacatactggtattcccgtggctggattgaatgttccctacagccaggagaggaacgctacctcaaaaccaggcaaagttatgtggaaaagtacggagaggataacgcggattaccttatggaaatggaacagggctggtttaaatcttacgatcgcgcgttttttatcgactgggaagaactgggcaattccgagtactaccgttcatacacgaaaaaatgcgccgcctatctgaagtggaaatatgaagaataccggggctcgcctattctcctggaaaagatcctctcaggctgttttgatgaggaagaagtcctggttgtcccgccgggaatgaaaatcgccgccagttttgatgataaaataataaaagcctcgccgtaa

SEQ ID NO: 27286 - protein, 156 aa, Unknown
  Obtained from environmental sample
  misc_feature (1)..(156): Xaa is any amino acid
MVIPRAHDCISLLLGSRERYNELFNQSPGTYWYSRGWIECSLQPGEERYLKTRQSYVEKYGEDNADYLMEMEQGWFKSYDRAFFIDWEELGNSEYYRSYTKKCAAYLKWKYEEYRGSPILLEKILSGCFDEEEVLVVPPGMKIAASFDDKIIKASP

SEQ ID NO: 27287 - DNA, 807 bp, Unknown
  Obtained from environmental sample
  misc_feature (1)..(807): n is a, c, g, or t
atgaagcgaagactcggcatcggcatagatacaggcggcacttataccgacgcggttatttatgatttcacagaaaagaaggtcgttgccgccgcaaaagccctgacgaccaggcaggatctttccatagggattctggaagctctcgccatgcttccggaagatacgctaaggcaggcaaagatcgtttctctttccacaactttggcgaccaatgcctgtgttgaaggccggagcgggagggcaaaacttatttttttaggcggtgatgaaagagtaataaacgagcttggacaacaatacggtctgcctcatgcggatgaaatttatatccaagaatgtttttcgatgttttcgggggaaataaaaaaagagcctgactgggatttattcgacaaaaatatcggcggacaatttaacgatctggatggtgcgggaatagtagaaatctacgccgtgaagaacagcgcgatactggaaaaaaaggcaaaggatatttttcagaggaggttttccattcccgttgtctgcggtcatgaattattctctgatttgaattgccttcaaagggcatcgactactctcctgaacgcgggactttttcctgttataaaggaatttctcgatgctataaaaaaatccgtgcttgaacggcagatcaatgccgaatctgtaattgttcgcagtgatggaagccttatgtccgatgcccttgcccgcctgcgtccggtggagactctgcttttcggacctgccgncagtatttcaggaggaacgcttctttctggggaaaagactgcatcataa

SEQ ID NO: 27288 - protein, 268 aa, Unknown
  Obtained from environmental sample
  DOMAIN (6)...(171): Hydantoinase/oxoprolinase N-terminal region
  misc_feature (1)..(268): Xaa is any amino acid
MKRRLGIGIDTGGTYTDAVIYDFTEKKVVAAAKALTTRQDLSIGILEALAMLPEDTLRQAKIVSLSTTLATNACVEGRSGRAKLIFLGGDERVINELGQQYGLPHADEIYIQECFSMFSGEIKKEPDWDLFDKNIGGQFNDLDGAGIVEIYAVKNSAILEKKAKDIFQRRFSIPVVCGHELFSDLNCLQRASTTLLNAGLFPVIKEFLDAIKKSVLERQINAESVIVRSDGSLMSDALARLRPVETLLFGPAXSISGGTLLSGEKTAS

SEQ ID NO: 27289 - DNA, 882 bp, Unknown
  Obtained from environmental sample
  misc_feature (1)..(882): n is a, c, g, or t
atgagcgtaccttttcaactggcccccatggccgaattgggccatcgggccctgcgggagcttatccgggattttggggggtgcgatgagtattttaccgaaatgataagcgccggcgcccttttggccggaggaccttttgaaaaatggtatattgatccgggcccaaccccggaaaagctcgtttttcagcttgttggcgccgattccgggcaaatttcccgcgccgcggcccttttggaccggctggagtgcgctggaatcgacattaatatgggttgtagcgcccctcttatccgcaaaaatggggctggagccgcctggatggcctctattgaccgggcgggagagcttatttccagggtcaggccagtagtccggcacagactcagcgttaaattacgtaccgggttccatgacgactttgaattcctggcccggttttgctgtcgcctggaagccgagggggttgatttgattatcctgcacccccggacggttatggaaaagttcaaacgccgggcgcgatgggactatgtggcccggctcaaacaggaacttactattcccgtggcgggcaacggcgatatagaatccgcggcgggcctggctcaccgggcagccggcccttgggacgcggtcatggcgggccgggctgctgtcaggcagccctgggttttcgctgccgcgcgaaatattgaaaaaaagggaagcgaggcgggcctgtttgcgccaaaccggtttgttccaaacctggaagaaattggcctgcgctttcttggagcttttagttcgataccagccccccgatttccatttttcccgtgcaatgcgttttttcggttttttctgcgacaacttaaaatggggaaattatcttaa

SEQ ID NO: 27290 - protein, 293 aa, Unknown
  Obtained from environmental sample
  DOMAIN (6)...(292): Dihydrouridine synthase (Dus)
  misc_feature (1)..(293): Xaa is any amino acid
MSVPFQLAPMAELGHRALRELIRDFGGCDEYFTEMISAGALLAGGPFEKWYIDPGPTPEKLVFQLVGADSGQISRAAALLDRLECAGIDINMGCSAPLIRKNGAGAAWMASIDRAGELISRVRPVVRHRLSVKLRTGFHDDFEFLARFCCRLEAEGVDLIILHPRTVMEKFKRRARWDYVARLKQELTIPVAGNGDIESAAGLAHRAAGPWDAVMAGRAAVRQPWVFAAARNIEKKGSEAGLFAPNRFVPNLEEIGLRFLGAFSSIPAPRFPFFPCNAFFRFFLRQLKMGKLS

SEQ ID NO: 27291 - DNA, 570 bp, Unknown
  Obtained from environmental sample
  misc_feature (1)..(570): n is a, c, g, or t
atggaatgtccgtatccgcaggtctgccccaacttaagggcggatcatgatcagtatataaaaacattaaaatcattgcgccgaattcccggtatcaaaaaagttnttatacgttccggcatccgcttcgattttattcagcatgataaaaaacacggaaaagaatttttggaaaacttgtgcgaattccatgtgagcggtcagttaaaagtcgcgccggaacatatctgcgaaaatgtacttgatgctatgggcaaatgtcctcactcaaattatgaagaattcagaaataattttacggatataaacaagcggcttgggttaaaacaatatctgttaccctactttataacttcacatccgggcgcaggcatgaaggaagcggaagaactttcacggtacttaaaaaagactcgctttatgccggaacaaacgcaggacttttatcccaccccgggaaccatgtctaccgtgatgtatcacacaggactagaccccagaacaatgaagcctatatatgttcccaaaggcggcaaagaacggcgcaagcagaaggatatgatccattag

SEQ ID NO: 27292 - protein, 189 aa, Unknown
  Obtained from environmental sample
  misc_feature (1)..(189): Xaa is any amino acid
MECPYPQVCPNLRADHDQYIKTLKSLRRIPGIKKVXIRSGIRFDFIQHDKKHGKEFLENLCEFHVSGQLKVAPEHICENVLDAMGKCPHSNYEEFRNNFTDINKRLGLKQYLLPYFITSHPGAGMKEAEELSRYLKKTRFMPEQTQDFYPTPGTMSTVMYHTGLDPRTMKPIYVPKGGKERRKQKDMIH

SEQ ID NO: 27293 - DNA, 1029 bp, Unknown
  Obtained from environmental sample
  misc_feature (1)..(1029): n is a, c, g, or t
atgaatcagctaataaataattacagaagccttattgtaagagggttggatatttttaaccatgtcaacattgatgaaataatgaattctacggtttatcaaatatcggatcattttttaccgtcgtttctcgcatttttatggaaacctgtccagacaagggaagatgttacaattaaggcatataaaaattataaacctgtaaatctgaatttttatatagagagcataacgccgtttgaagcgtttttcaggcagaatcccaaacctgtaaagtttgattttttagccagcttgatgagcaacgaagaaattatgaaaccatataaggatatacaaaccgaaattgtagcccccattcttggcccttttggattatacggattaatcttaatcggtaaaaaaaatcttgatgaagaatacaacagcgatgaattgttttttctgcagcaactaatgtcttttgtatctcagggtatcaagaatcatctgcattatgaacattctcttcgcgacgtaaaaacagggctgtataatcacggcttttttcttgcccgtcttaccgaagaagtctcccgcactaaacgtaacaaatattgttctacagttgtagtaatagacgtagataaatttaaaaattttaatgattcctacggtcatcttgccggggataaagttttggaaaatcttgcccaggtaataaaaaagggagtgcgcaacgatgatattccttcccgttttggcggcgaagaatttacagtgcttttacctcanacagatcagccgacggcagggaatatcgcagaaaggctgcggaccaatatcgcggacatgaaagtcccgtgggatactcctctgccgcaggtaacaatcagtttgggggtttattcgtttgatcaaaattccggcgttgacgtaaacactattatccgccgcgccgacgacgcgttatacacgtcaaaacaacagggaaggaaccgttgtactgcatggcatccggggattacacacccgaatcaaggaggttga

SEQ ID NO: 27294 - protein, 342 aa, Unknown
  Obtained from environmental sample
  DOMAIN (166)...(327): GGDEF domain
  misc_feature (1)..(342): Xaa is any amino acid
MNQLINNYRSLIVRGLDIFNHVNIDEIMNSTVYQISDHFLPSFLAFLWKPVQTREDVTIKAYKNYKPVNLNFYIESITPFEAFFRQNPKPVKFDFLASLMSNEEIMKPYKDIQTEIVAPILGPFGLYGLILIGKKNLDEEYNSDELFFLQQLMSFVSQGIKNHLHYEHSLRDVKTGLYNHGFFLARLTEEVSRTKRNKYCSTVVVIDVDKFKNFNDSYGHLAGDKVLENLAQVIKKGVRNDDIPSRFGGEEFTVLLPXTDQPTAGNIAERLRTNIADMKVPWDTPLPQVTISLGVYSFDQNSGVDVNTIIRRADDALYTSKQQGRNRCTAWHPGITHPNQGG

SEQ ID NO: 27295 - DNA, 951 bp, Unknown
  Obtained from environmental sample
  misc_feature (1)..(951): n is a, c, g, or t
atgaaagagcctattggagacgagtctgtattcctgcggattaacgaattcaaaaaagggctaatccagtttacggacagcactaacgccatgcgccttgtaaaagagcatgggcgcaatatccggtataacgccgtatggagaaaatggattgtgtggaacggcaagttttgggaaatggacgagggcggggctttgatacacgaaaaagggcttgaaatggtgcgcaacatttacgacgagcttctgaaaaccgcagattacagggaacggattgacatagaaaaagcggcgatgatgagcgagagcgtaaggcggcgcaaggcttttgtagaggcggcaacatggatttccgctttgcgtattagaacggacgaactagacagcaacccgtggctcttgaatgtgaagaacgggactgtcgatattttgagcggcgaattcagggaacatagacaagaggacatgattacgaaaattgtcaatgtggactatgatccaaatgccgactgcccgatgtggaagaagtttgtccgtgaaataatggattataaagcggacattataaaatttgtccagactgcggcggggtggtctttgtccggcgacatttcagaacagacgatgttcattctgtacggtactggcgcaaacgggaaatcaacctttttgaatacgattatgtatatattgggcgattacgcgaccgcaacgcctaccgaaacatttatgaaaaaaacaggggataatttttcaaatgacgttgcccgtctgcggggtacccggtttgttacaacgactgaagttgagcaggggcggcggctgtccgaaccgctaattaaaaagataacaggcaatgacgaaatgactgcacggtttttgtatggggagttttttaacttcaagcccactttcaagattttcatggctactaaccacaagcctggataa

SEQ ID NO: 27296 - protein, 316 aa, Unknown
  Obtained from environmental sample
  DOMAIN (134)...(316): Poxvirus D5 protein-like
  misc_feature (1)..(316): Xaa is any amino acid
MKEPIGDESVFLRINEFKKGLIQFTDSTNAMRLVKEHGRNIRYNAVWRKWIVWNGKFWEMDEGGALIHEKGLEMVRNIYDELLKTADYRERIDIEKAAMMSESVRRRKAFVEAATWISALRIRTDELDSNPWLLNVKNGTVDILSGEFREHRQEDMITKIVNVDYDPNADCPMWKKFVREIMDYKADIIKFVQTAAGWSLSGDISEQTMFILYGTGANGKSTFLNTIMYILGDYATATPTETFMKKTGDNFSNDVARLRGTRFVTTTEVEQGRRLSEPLIKKITGNDEMTARFLYGEFFNFKPTFKIFMATNHKPG

SEQ ID NO: 27297 - DNA, 1059 bp, Unknown
  Obtained from environmental sample
  misc_feature (1)..(1059): n is a, c, g, or t
ttgttgagcggcacatgggtttccgctttgcgaattagaaccgatgaacttgatcctaatccgtggctcttgaatgtaaaaaatgggactgtagatatacaaagcggcgaattcagggagcataggcaaggggacatgattacgaaaatagccaacgtggattatgaccctgcggcggattgcccgatgtggaaaaagtttatccgtgaaattatggactataaagcggacataataaaatttgtccagactgctgcggggtggtcattgtccggcgacatatcagagcaggcgatgtttattctgtacggcactggagcgaacggcaaatccacgtttttgaatacgataatgtacctgttgggcgattacgcaatcgcaacgccaacggaaacttttatgaaaaaatcgggggacaattatacaaatgacgttgcgcgtctgcgaagcacgaggtttgtaacgactacggaagttgagcaggggcggcggctgtccgaaccgctaataaaaaagataacaggcaacgacgaaatgacggcaaggtttttgtatggggagttctttaatttcaagcctactttcaagatattcatggcgaccaaccataagcccgttattaaaggcactgatcatgggatatggcgaagaataaaactaattcctttcactgataggataccggaagaaaaacaggacaagcatttggaattaaaactgcgggaggaagcaagcgggattctaaactggctgctggaggggatagcaaactggaagctggaacgcctgaaaacgccgaaggctgtattgtttgccactgacgaatacaggggggaaatggacgttatcgggaatttcataaaggaaaaatgcggccaaaaaaaggagatgacgataccaattaaaaagctatacaaagcttattctgactggtgcgaagaaaacaacgaacacgctgtaagcgaaaggttttttaccctgcggcttaaagagatgggtttcgagcagagcagaacgtcaacggaaaggtattggattggaattgggctggtggaataa

SEQ ID NO: 27298 - protein, 352 aa, Unknown
  Obtained from environmental sample
  DOMAIN (24)...(335): Poxvirus D5 protein-like
  misc_feature (1)..(352): Xaa is any amino acid
MLSGTWVSALRIRTDELDPNPWLLNVKNGTVDIQSGEFREHRQGDMITKIANVDYDPAADCPMWKKFIREIMDYKADIIKFVQTAAGWSLSGDISEQAMFILYGTGANGKSTFLNTIMYLLGDYAIATPTETFMKKSGDNYTNDVARLRSTRFVTTTEVEQGRRLSEPLIKKITGNDEMTARFLYGEFFNFKPTFKIFMATNHKPVIKGTDHGIWRRIKLIPFTDRIPEEKQDKHLELKLREEASGILNWLLEGIANWKLERLKTPKAVLFATDEYRGEMDVIGNFIKEKCGQKKEMTIPIKKLYKAYSDWCEENNEHAVSERFFTLRLKEMGFEQSRTSTERYWIGIGLVE

SEQ ID NO: 27299 - DNA, 849 bp, Unknown
  Obtained from environmental sample
  misc_feature (1)..(849): n is a, c, g, or t
gtgaaggcgctgaagggaaaaaacaaaaatcagcgctccaaggcaaaaaaatcaggcggcgcttcccccgttattgtgaatattatcgcctntgcggcgcttgccgggggcatggtcctcctttcatcaatgcaggggaaaaccgacgcccggatcagaacgggggcgaaagtgtacaacagcgtcgagcgcgccctcattgagaaaatcagaaaggaaacacagagcgaggccgccgcaaatgcggccggcgaattggagcggctcagccaggaacaataccaggccgcggccattgaagatcagataggcgctttttttgccaatctgaacaggcagattacagataacaatcttgatgaagcaagcggcacaataaaagcgatgcggatttttattaacaccccctcgttccagtcgctacgttccatacaggcaaggaaagggctttatgtccatgctgttaattccctggaaacaatggttgaaacaaccaaaaaataccagaccgcgctgaacagcgataatcccaatcaaaacccgttttccgattttcaagccagaattgcccagcttgagcagaatctggcggaaaaggacaagaccatagacgcccttagctctcaaggttccggcgcctcgcggaggcttaacgagcttgaaaaggcaaacagcgctttgcaaacagagaacaggcagcttggaaggacaaacaacactctgcaaacgcggaattcgcagttgacagcggatttggacagacaaacccgctcaacagcgtccctgcagcagtctgttaactcgctccagcaatcagaacgggatcttcaaacggaaaacgcaaggtaa

SEQ ID NO: 27300 - protein, 282 aa, Unknown
  Obtained from environmental sample
  misc_feature (1)..(282): Xaa is any amino acid
MKALKGKNKNQRSKAKKSGGASPVIVNIIAXAALAGGMVLLSSMQGKTDARIRTGAKVYNSVERALIEKIRKETQSEAAANAAGELERLSQEQYQAAAIEDQIGAFFANLNRQITDNNLDEASGTIKAMRIFINTPSFQSLRSIQARKGLYVHAVNSLETMVETTKKYQTALNSDNPNQNPFSDFQARIAQLEQNLAEKDKTIDALSSQGSGASRRLNELEKANSALQTENRQLGRTNNTLQTRNSQLTADLDRQTRSTASLQQSVNSLQQSERDLQTENAR

SEQ ID NO: 27301 - DNA, 492 bp, Unknown
  Obtained from environmental sample
  misc_feature (1)..(492): n is a, c, g, or t
atgcttgttattcttaaaatagagaatccctcgattttaatcaatgaagaaattccacagcatatacggggcagggaagacgatctgtttacaaatcagttacctgagtgttttcaccgtatcggaaaactggtaaggcagcgcagagaagaaagcatatcgcgattcggcgaaaaaattcttgatttcatcaacaggaatctttttaatcccggactttacagtgtgatggtacaggatcatttcaacatttcccagccgactttgcaaaaattgataaaacaggttaccggtcatacattcctgtcatatgttgaaaacaaccgtcttgccagggccaaggaactcttatcggaaggtatttttaccaatcaggatataactgaaaaatgcggtttttccaacactaactctttctataaagccttcaaacgggtttacggattccccccgagtgatataaaaaatatgcagagaaaaccagaagtatga

SEQ ID NO: 27302 - protein, 163 aa, Unknown
  Obtained from environmental sample
  DOMAIN (112)...(156): Bacterial regulatory helix-turn-helix proteins, AraC family
  misc_feature (1)..(163): Xaa is any amino acid
MLVILKIENPSILINEEIPQHIRGREDDLFTNQLPECFHRIGKLVRQRREESISRFGEKILDFINRNLFNPGLYSVMVQDHFNISQPTLQKLIKQVTGHTFLSYVENNRLARAKELLSEGIFTNQDITEKCGFSNTNSFYKAFKRVYGFPPSDIKNMQRKPEV

SEQ ID NO: 27303 - DNA, 513 bp, Unknown
  Obtained from environmental sample
  misc_feature (1)..(513): n is a, c, g, or t
atgaggggcatattattgtgcggggtacgccgcaggacgcgcagtttaaactggttgtgcgcaaggcttagaaaaatgtttttgcccctcggtctcaatctggctaaacgtaaaattttaatcatcggcggcggcgcggcggcggcgcagaaaataaaaaccttggctctatataaagccgagcttacggtgctggcgccggaaataaaaattaaaaatcccaaagtaaaaaaacgaattaaacattatgcgccgactgatttgccgggttatgatttgatttatgcctgcaccaatgaccgccgtttaaaccggcagattgccagcgcggcgcgccggtggaatattttggttaatgtttgcgatgatccgcaaaattccgattttatttccccggctgtttttaagcgcggccggatgagcgcggcggttttttcggacggacgggatgtgcgcgccagtctgcgctggcgggataaaataaagaaaatcttttctaaaggaaaattatga

SEQ ID NO: 27304 - protein, 170 aa, Unknown
  Obtained from environmental sample
  misc_feature (1)..(170): Xaa is any amino acid
MRGILLCGVRRRTRSLNWLCARLRKMFLPLGLNLAKRKILIIGGGAAAAQKIKTLALYKAELTVLAPEIKIKNPKVKKRIKHYAPTDLPGYDLIYACTNDRRLNRQIASAARRWNILVNVCDDPQNSDFISPAVFKRGRMSAAVFSDGRDVRASLRWRDKIKKIFSKGKL

SEQ ID NO: 27305 - DNA, 975 bp, Unknown
  Obtained from environmental sample
  misc_feature (1)..(975): n is a, c, g, or t
atgnatgtttcatcggacggaaaaaatatgctgtgtcagggttataaacatgttgaggatcgcgcctttgccattgttaccgaacacaagacagataacgggcggaaaacaggcagggattacaaaggactttacaaggcgcgttatttccgcgacggagttatagggcttcgttcggaattgcacaacaactgtatagtatacgaaaattacaacggagaaagcgaagttctttttaagggaaatgaagcgcttatgttttccggccctcaagctgttgataatgaaaggattgcctttatcgcgtcaatcgaaggcaaaagggagctatggattttcaattatatttcgcgggaactttttaaggtagaaaatacggcggatgacaataattaccgggaatatatgcgggatttaggcgtttcagacgggaaacttttttttagttacaattccgatgaccgcatgtacaaacttgggattatcgatcttgaggctatgcaggcggttttaaccggcaaagaattttcaggcggcgttttcagcccggtttgcgccggaggagaaatatactatcttgcggcgtttgtttcgcgtaacagtcttttacgctttcccgaacctgtcagttctgtttcgggaaacaggataaacttgcggctaacaaaacaggaaattgaagataaaaagacggcttccgagccgccttataccgatccgtcaaaaccttacatcgggcttcgttatatgaatccgcttaagttatggtttccgctgcctttgatcaggcagaaggacaaagacaatgatttttccgtcaagctggacggcggcggcatcattacggtaatggcggatccaaccgacagaaacctggtttatttattggcttatgccgatgtcccctataaaatggcgatgatagaccaatttgtctggcaaaataccggcttaggtttccctctctctccataa

SEQ ID NO: 27306 - protein, 324 aa, Unknown
  Obtained from environmental sample
  misc_feature (1)..(324): Xaa is any amino acid
MXVSSDGKNMLCQGYKHVEDRAFAIVTEHKTDNGRKTGRDYKGLYKARYFRDGVIGLRSELHNNCIVYENYNGESEVLFKGNEALMFSGPQAVDNERIAFIASIEGKRELWIFNYISRELFKVENTADDNNYREYMRDLGVSDGKLFFSYNSDDRMYKLGIIDLEAMQAVLTGKEFSGGVFSPVCAGGEIYYLAAFVSRNSLLRFPEPVSSVSGNRINLRLTKQEIEDKKTASEPPYTDPSKPYIGLRYMNPLKLWFPLPLIRQKDKDNDFSVKLDGGGIITVMADPTDRNLVYLLAYADVPYKMAMIDQFVWQNTGLGFPLSP

SEQ ID NO: 27307 - DNA, 684 bp, Unknown
  Obtained from environmental sample
  misc_feature (1)..(684): n is a, c, g, or t
atgaattctattaacggcgggcttaagacaggagaattggggctgatagcttctccttcgggcatcggaaaaacatcggtactcgttcagatcgccatggacaaattactgcaagacaaaaaagtaatacacatttcctttacccggcatacgaattacgtcctggcntggtacgcggacatctttgatgagtttataaaaaagaaaaatctggaaaacgagcaggaagtaaaaacaaatattgaaaaaaaccgagtattaataaaatttacgcaggggggaatttccagcgatcaaatcttaagaaccctaaaggctttaataaaatccggctgtttcaacgctgaggtaattatcattgacggttttgattttaccgtagccgaagaaggccatgttgccgctatcaaatcatttgcctcggagatgggggtatcctgctggtattcctgtaacgtaaacggtgaaaagacatactccgacagatcatccgatcaggtttatgaccaaaggaacatcccggtggttttaaaagactgcgcagacctttttgatgttataatagttctggaacccaaaagcgatcacattgagctgactgtttccagggacagggatgtttataatccggagcatttggcgcttaaactggatccaaaaactctgctaattttggaaaactag

SEQ ID NO: 27308 - protein, 227 aa, Unknown
  Obtained from environmental sample
  misc_feature (1)..(227): Xaa is any amino acid
MNSINGGLKTGELGLIASPSGIGKTSVLVQIAMDKLLQDKKVIHISFTRHTNYVLAWYADIFDEFIKKKNLENEQEVKTNIEKNRVLIKFTQGGISSDQILRTLKALIKSGCFNAEVIIIDGFDFTVAEEGHVAAIKSFASEMGVSCWYSCNVNGEKTYSDRSSDQVYDQRNIPVVLKDCADLFDVIIVLEPKSDHIELTVSRDRDVYNPEHLALKLDPKTLLILEN

SEQ ID NO: 27309 - DNA, 909 bp, Unknown
  Obtained from environmental sample
  misc_feature (1)..(909): n is a, c, g, or t
ttgcgtccatggcaggttccgacggccgatcaggagcagacaagccttattacggtgtattcgggcattgttatcgaataccttgataagattgaagttctgccgtgggtagttgccacagagactcttgagtacgatcttacatcaaggattcgttcaatggtaaacgagaccgagcgtgtgttaggtgtaattataggcgatggtttcaggcagtggcgtgaagattttgcctatttgaaccagacgcttgccgggtctggatataaagtgcgccttatttcgcccggcgacgagatacccgacaatatccccgctatttttgttttgggcggcgttgaagacttggacaattgggcgctctacagaattgacaggtatattcaacagggcggaagggcgctttttgcggtaaagggagtttttgttgatacgataagaggttcgatagaagctaggcctcaggaagacaaggggcttctggagatgatcgcctcttacggcgttttaatccgccctgagcttgcgctggatcgtaatgcgctgactttgcaataccaaaccagaacgtcgtccggcgcggttcaattaaggattatccgctatccgttgtggattggcgttatgcaaaataacggagaccctcagcattctgtaagcgcgaatttttccggtcttgatctttactggtcaagcccgctggaattgcatccgtcggacaaggtgcaggcggatattctctttacaagttctcctgaagcgtgngtaatgagaggagagttttatatcagtcccgaaatgccgttttttttagaaagaaacgcggaggaaacagagggaagaaagacctcggcgcggcattgtccggagagtttccgagtttcttcaaaggttccccgaaacctgtaa

SEQ ID NO: 27310 - protein, 302 aa, Unknown
  Obtained from environmental sample
  misc_feature (1)..(302): Xaa is any amino acid
MRPWQVPTADQEQTSLITVYSGIVIEYLDKIEVLPWVVATETLEYDLTSRIRSMVNETERVLGVIIGDGFRQWREDFAYLNQTLAGSGYKVRLISPGDEIPDNIPAIFVLGGVEDLDNWALYRIDRYIQQGGRALFAVKGVFVDTIRGSIEARPQEDKGLLEMIASYGVLIRPELALDRNALTLQYQTRTSSGAVQLRIIRYPLWIGVMQNNGDPQHSVSANFSGLDLYWSSPLELHPSDKVQADILFTSSPEAXVMRGEFYISPEMPFFLERNAEETEGRKTSARHCPESFRVSSKVPRNL

SEQ ID NO: 27311 - DNA, 510 bp, Unknown
  Obtained from environmental sample
  misc_feature (1)..(510): n is a, c, g, or t
gtgngtaatgagaggagagttttatatcagtcccgaaatgccgttttttttagaaagaaacgcggaggaaacagagggaagaaagacctcggcgcggcattgtccggagagtttccgagtttcttcaaaggttccccgaaacctgtaagagaaggttccgacgaaaccctgcccgatatgcctatgttcgcgaatcagtcgcggattatcgtagtgggcgataccgattttgcgacaaatatgattaacgcgactaacgcaaagcagaatcttgatttccttatgcgcgccgcggactggcttgtaagcgacgaggacattatcaaaatacgaagcaaacagccgcatgttggacgtttggataaaattttcgattcggacaggaaagcggcggctatacgttttgttcagattgttaatgtcggcataattccgctcctggttatcgcgggcggttttttcctcgcttctcgccgtaaaaagcgctcgaatgaaactgagacggtatag

SEQ ID NO: 27312 - protein, 169 aa, Unknown
  Obtained from environmental sample
  misc_feature (1)..(169): Xaa is any amino acid
MXNERRVLYQSRNAVFFRKKRGGNRGKKDLGAALSGEFPSFFKGSPKPVREGSDETLPDMPMFANQSRIIVVGDTDFATNMINATNAKQNLDFLMRAADWLVSDEDIIKIRSKQPHVGRLDKIFDSDRKAAAIRFVQIVNVGIIPLLVIAGGFFLASRRKKRSNETETV

SEQ ID NO: 27313 - DNA, 483 bp, Unknown
  Obtained from environmental sample
  misc_feature (1)..(483): n is a, c, g, or t
atggagatagaggccgacntgccttccgacacattcagcatatcaaagccgggcctaacgtccaaattttcaatccctggcttcgactctcagtttgaaggccaagtggcccaagtggctcccgcggtcaaacaggacggccgcaccctgcgcgtgaggatagtagtgccaaatgacaacggtcgcctaaagagcggcctgtttgccgacggcgaaatcatatcaagccaaacaacgaacaagccggccataccctccagcatcgtgacagccgcaggaagaggggcggacgtgtttgtggccgaaaacaacatcgccaggcaaaagcgcgtgtccatagggaacgaccagaatggctggaggccagtggaaaatggcggactggccccaggccagcttgtcgtcgcccaagggcgcgagttggtgtccgacggtacgcgcctgcgcgtcgtggccaccccagaaaacacccctcaaaaatag

SEQ ID NO: 27314 - protein, 160 aa, Unknown
  Obtained from environmental sample
  misc_feature (1)..(160): Xaa is any amino acid
MEIEADXPSDTFSISKPGLTSKFSIPGFDSQFEGQVAQVAPAVKQDGRTLRVRIVVPNDNGRLKSGLFADGEIISSQTTNKPAIPSSIVTAAGRGADVFVAENNIARQKRVSIGNDQNGWRPVENGGLAPGQLVVAQGRELVSDGTRLRVVATPENTPQK

SEQ ID NO: 27315 - DNA, 444 bp, Unknown
  Obtained from environmental sample
  misc_feature (1)..(444): n is a, c, g, or t
atggacgacgattatatggattccgtagagcctttctactacgcggatcttaaggatttccacagcacttttctcgcgggctacacggcggagaaatacgatgtggacgcgagtaaaagccgagagagggcggcgcacagaattaagtcgtcgttagaaagagcttttgccaaatcagtaaccggatacgcaaccgtcacgcccgaacactccgccataaatgtccacgacggcaaagtgagttacgccttttttccggtgtgggttctcaacaccaaatacaatgacgcccattatactttcatgatgaacggccagacgggccgcctcgtgggaaggctgccggtcgattcagggaaggcgtggaaatataggctgctgattgccggtattctgggcatagtttccaccggcgccattttggcatatcagatgctgcgttaa

SEQ ID NO: 27316 - protein, 147 aa, Unknown
  Obtained from environmental sample
  misc_feature (1)..(147): Xaa is any amino acid
MDDDYMDSVEPFYYADLKDFHSTFLAGYTAEKYDVDASKSRERAAHRIKSSLERAFAKSVTGYATVTPEHSAINVHDGKVSYAFFPVWVLNTKYNDAHYTFMMNGQTGRLVGRLPVDSGKAWKYRLLIAGILGIVSTGAILAYQMLR

SEQ ID NO: 27317 - DNA, 681 bp, Unknown
  Obtained from environmental sample
  misc_feature (1)..(681): n is a, c, g, or t
atgaactcatccaaactcttagaaatcctgcggataaccctccccgtcttcgccatgctcgccctcggcaacgtcctctcccgcgccaaaaaaatgaacgagactcaccagaccttcctcaactggttagtctactacatctcgctccccgccctgatcttcgtgggcatggctacccagcccatccgcagtctgatgcgggccgacttcatttggactacgctggcgtctatgctgctgataatggcgctgtttatagttatagcgctcttcatgcgcttggaaaagaagaccgccgtcatcatggtgttcttcacctattggtcgaactgcgcctacatgggcttccccctgacgcagtcggccttcggcgagacaggctttttgatggccgccatactgaactccgtcaccatgccgatattggtgtccatgacgttcgtgatgatcagtttctgctccgacaagcatcaaagcatcctaaaatcaatacgtgacgcattgcttaaccccatcatactgtcttcaatagggggaatactctacgcgctctgcgccgatctcttaggcttcggcgagggcggcggcagacgcttgccggtcgtcgcgggggagcttctggggatatgtgagatcgcgcttaaacggtggggactatgggcatatcgcttgcgcttatag

SEQ ID NO: 27318 - protein, 226 aa, Unknown
  Obtained from environmental sample
  SIGNAL (1)...(23)
  misc_feature (1)..(226): Xaa is any amino acid
MNSSKLLEILRITLPVFAMLALGNVLSRAKKMNETHQTFLNWLVYYISLPALIFVGMATQPIRSLMRADFIWTTLASMLLIMALFIVIALFMRLEKKTAVIMVFFTYWSNCAYMGFPLTQSAFGETGFLMAAILNSVTMPILVSMTFVMISFCSDKHQSILKSIRDALLNPIILSSIGGILYALCADLLGFGEGGGRRLPVVAGELLGICEIALKRWGLWAYRLRL

SEQ ID NO: 27319 - DNA, 738 bp, Unknown
  Obtained from environmental sample
  misc_feature (1)..(738): n is a, c, g, or t
atgaccgcttatgaaatagcgcaaatgatcgatcattcccttttaaacccgaaattcacccggcaggaagttgagtccggctgccgtcttgccgctgaatacgaatgcattacggtatgtgtaaaaccatgcgacgtccgtctcgcttacggcatattaaaagataccaaagtgattacaaccagcgtcatagggtttccccacggcagcaatattacggaaataaaagtgctggaagcaagacgcgcaattgaggaaggctgcggagaagtagacatggtgatgaacataggccgttttctctcaggcgattacagcctggtacaggacgatatagcggcagtttgcggggaagttcacaaggcaaaggccattttgaaagttattctggaaaacgcctatctatccgaagagcagatcaaaaaagcctgcgagctctgcgtggccgcgcttgccgattttaccaagaccagtacaggatacgctccctatggcgcgcgtatttccgatttaaaaattatgcgggccaatactccgccgtcgatgcaggtgaaagcggcgggcggggtaaggcagctggacgacgctctggcggtaagggctgtgggcgttacccgttttgggtgtacaacaacagcggcaatgattgaggaagcccgtaggcgggaagaaaaaggggagctgtttgtgccgccgcctgaaagtgtacaggaactcgcgtacctcagacaaaattaa

SEQ ID NO: 27320 - protein, 245 aa, Unknown
  Obtained from environmental sample
  DOMAIN (5)...(218): DeoC/LacD family aldolase
  misc_feature (1)..(245): Xaa is any amino acid
MTAYEIAQMIDHSLLNPKFTRQEVESGCRLAAEYECITVCVKPCDVRLAYGILKDTKVITTSVIGFPHGSNITEIKVLEARRAIEEGCGEVDMVMNIGRFLSGDYSLVQDDIAAVCGEVHKAKAILKVILENAYLSEEQIKKACELCVAALADFTKTSTGYAPYGARISDLKIMRANTPPSMQVKAAGGVRQLDDALAVRAVGVTRFGCTTTAAMIEEARRREEKGELFVPPPESVQELAYLRQN

SEQ ID NO: 27321 - DNA, 894 bp, Unknown
  Obtained from environmental sample
  misc_feature (1)..(894): n is a, c, g, or t
atgtatcagatcggccgagcggcacgagcggcacgagaaaaaagcggcattccgtgctatcgcgagctgcgggaaatgctgctcgctgcaaaccctgatgtggtagatgtatgcgttcctacttttatgcattacccaatagtcatggaagccctgcgggacggcaggcatgtaatatgcgaaaagccgcttgcccttaaaagcgctcatgccggggaaatgtacgctttggcggaacagcatggcctgcagctcctggtcggccatgtgcttcagttctaccccgcctcaaagatactccacgaaattgtgcgggacagccgttttggcaagccgctggacgcggtgtttctaaggctttccgcctgcccgcgctgggcttccgatggctggcttttggacaaggccaagagcggccttttgcccttcgatctccacatccacgatcttgatctcatggtcagtcttttcggaaaaccagagagctacgaaactatttcaggcggcagggagagcgccgtttataaggagtattaccgcatcctttaccgttatccgaatctgaacgtctgctgcgaggcagcgtggtacaacgccgatttgccctttaccgcaagctggcgtgtttattttgaaaaagccgttttgatctgcgagaacggaaaacttttctcttacagttttgacggccctccgatagaattcgacatagaggaaaagcttaagatccccaccggcattaacctgcctcctacgggagttttttacgaagagctctcgttttttcttgaccgtatcaaatccggtgagaaaacgcagtaccgcaaggacgaaataatcggtgttttaatattcttgagaatattaccgggcttgaagatagtccctaattag

SEQ ID NO: 27322 - protein, 297 aa, Unknown
  Obtained from environmental sample
  DOMAIN (4)...(89): Oxidoreductase family, NAD-binding Rossmann fold
  misc_feature (1)..(297): Xaa is any amino acid
MYQIGRAARAAREKSGIPCYRELREMLLAANPDVVDVCVPTFMHYPIVMEALRDGRHVICEKPLALKSAHAGEMYALAEQHGLQLLVGHVLQFYPASKILHEIVRDSRFGKPLDAVFLRLSACPRWASDGWLLDKAKSGLLPFDLHIHDLDLMVSLFGKPESYETISGGRESAVYKEYYRILYRYPNLNVCCEAAWYNADLPFTASWRVYFEKAVLICENGKLFSYSFDGPPIEFDIEEKLKIPTGINLPPTGVFYEELSFFLDRIKSGEKTQYRKDEIIGVLIFLRILPGLKIVPN

SEQ ID NO: 27323 - DNA, 1131 bp, Unknown
  Obtained from environmental sample
  misc_feature (1)..(1131): n is a, c, g, or t
atgaagatagggattgatacctttgcctgcgatggcggcaaatccggagttggaacttatttgtcgcatctgttaaaacgtatcccgccctcaggcgcccaatttgagatgttcgggtgggaatacgaccgcttcgcatacagtgaattcgcccctgatatcgagtttatcccccgctgcaactataccggcagaaccgcaaacgccttatggcacctgtacaaataccccgatttcgcaaaaagccgctcgtacaaggcctgttttttcccggcggcgcacaaacagccgccctacaaatccccctgccccaccataggcgttgtccatgacatggccgcctggggaaacaggcgcaacagggagcatttgggcgccgtgcttcgcgtgttgatgcccaattcgctgcggcatctggatcatatcatcgcggcgagcgaatgggtaaagcgggaactggtggaacttacccgcgtgaaagaaagccgtatagaggttgtgccaaacggcgttgaccatgaggtctactaccccaggccgcacggcgaggaaagcgaattgcttatacagcccttcagtttccgccggccctacatactctgcgtctcccgcatcgaacatccgataaaaaaccataaaagtcttatcaccgcgtttggcatatttaaggaacgcaccggatttccgcaccggctggtgctggtcggcagggacagtaccaacgcggcaaaggtaaaagccgcggcagcgaagtcggcatggagaagcgatatattctntacggggtattntccggtaaagggtctgccggaactatacgccgccgctgattttgccgtgttcccgcaaatatatgaaagtttcggcatgggcgttattgaggcgatggcgtccgggataccggttgtctgcgcccgcgccgcatccctgccggaaaccgccgagcacgccgccctgtactttgacccaaaagacccggaggacatggccgaccgcatggtatctctcgcgtccgaccgggagctctacgaaaaatgccgtaatcagggtctggaacgcgccaagtcgttttcctgggatcgctgcgcgcagaggacgctggagattattctggagacggcggggggataa

SEQ ID NO: 27324 - protein, 376 aa, Unknown
  Obtained from environmental sample
  DOMAIN (184)...(353): Glycosyl transferases group 1
  misc_feature (1)..(376): Xaa is any amino acid
MKIGIDTFACDGGKSGVGTYLSHLLKRIPPSGAQFEMFGWEYDRFAYSEFAPDIEFIPRCNYTGRTANALWHLYKYPDFAKSRSYKACFFPAAHKQPPYKSPCPTIGVVHDMAAWGNRRNREHLGAVLRVLMPNSLRHLDHIIAASEWVKRELVELTRVKESRIEVVPNGVDHEVYYPRPHGEESELLIQPFSFRRPYILCVSRIEHPIKNHKSLITAFGIFKERTGFPHRLVLVGRDSTNAAKVKAAAAKSAWRSDIFXTGYXPVKGLPELYAAADFAVFPQIYESFGMGVIEAMASGIPVVCARAASLPETAEHAALYFDPKDPEDMADRMVSLASDRELYEKCRNQGLERAKSFSWDRCAQRTLEIILETAGG

SEQ ID NO: 27325 - DNA, 813 bp, Unknown
  Obtained from environmental sample
  misc_feature (1)..(813): n is a, c, g, or t
gtgccttgcgattattcaggacaaggttgtagcgattacaggggaaaagccatcgatatacgccttgtttcgactaccggttccagccgtgagattctcggggtgtttcttgaaacccccggcgtctacaacgagatcatcgcccactcggtagggaccacctatttcgattcgggcgtggaaacgattttcgagataggcggtcaggacgcgaagtacgttttgctcaagaacggcgtgcccatcgactacgccatgaacgaggcttgttctgcgggtactgggtccttcctggaagaaagcgccgctggggatctttccatacacagcgcgaaggacatcggccccattgcgcttaacgctgatgcgccccttaagttcggggagcattgttcggctttcatcaacagcgacatccgcaaggcggttcagcagggcgcaagccgcgagaacataaccgcggggatcgtctgctcaattgtagccaactaccttaaccgcgtggtgggaaaccgcaccataggcggaaagattttccttcagggcggcgtcgcgaaaaatcccgcagtgccccttgcttttgcgatgttactggacaaggaaatccttgtgccgccttccccggaactaatgggctgttttggcgtggcactgctttcaaaacgcaagcatgccgacggccttttggaagaacgcccggttgtagagggcggttcgcctatcgacgatctgttaaaccgcgagattggttacgagcgggtcttcacctgccaggcttgcgagaatctctgccccattcaggtttgtcgatag

SEQ ID NO: 27326 - protein, 270 aa, Unknown
  Obtained from environmental sample
  DOMAIN (1)...(220): BadF/BadG/BcrA/BcrD ATPase family
  misc_feature (1)..(270): Xaa is any amino acid
MPCDYSGQGCSDYRGKAIDIRLVSTTGSSREILGVFLETPGVYNEIIAHSVGTTYFDSGVETIFEIGGQDAKYVLLKNGVPIDYAMNEACSAGTGSFLEESAAGDLSIHSAKDIGPIALNADAPLKFGEHCSAFINSDIRKAVQQGASRENITAGIVCSIVANYLNRVVGNRTIGGKIFLQGGVAKNPAVPLAFAMLLDKEILVPPSPELMGCFGVALLSKRKHADGLLEERPVVEGGSPIDDLLNREIGYERVFTCQACENLCPIQVCR

SEQ ID NO: 27327 - DNA, 483 bp, Unknown
  Obtained from environmental sample
  misc_feature (1)..(483): n is a, c, g, or t
atgctcgcttacccctttaagcttgatacaattaccgctcccctgccgccgttccgcgggaatgttaatggtcagggttcccgccagatactgcccggtcaggctttccttaacctgcatcacttcctggggactgccctgggcgacaacccggccgccgtgtactcccgcgccgggccccagatcgacaatatgatccgccgtgcgcagggtttgctcgtcatgttccaccacaatgagggtgttgcccaagtcgcgcagatgaagcagggtatcaataagccgctggttatcccgctggtgcaggccgatggacggctcatcaagaatgtacaaaaccccgacaaggctcgatccaatctgcgtcgccagcctgatccgctgggcttcaccgcccgaaagggttgccgccttgcgctcaaggctgaggtaatcaaggcccacattctgcataaagcccagccgggcgctgatttcctttaa

SEQ ID NO: 27328 - protein, 160 aa, Unknown
  Obtained from environmental sample
  misc_feature (1)..(160): Xaa is any amino acid
MLAYPFKLDTITAPLPPFRGNVNGQGSRQILPGQAFLNLHHFLGTALGDNPAAVYSRAGPQIDNMIRRAQGLLVMFHHNEGVAQVAQMKQGINKPLVIPLVQADGRLIKNVQNPDKARSNLRRQPDPLGFTARKGCRLALKAEVIKAHILHKAQPGADFL

SEQ ID NO: 27329 - DNA, 471 bp, Unknown
  Obtained from environmental sample
  misc_feature (1)..(471): n is a, c, g, or t
atgagaaaacagcttgtgcgttgtaccattaacggcaaggccacggagacaatggtggacatccgcgcgtcattgacagatatgctgcgtaatgaataccgcctgaccagcgtaaaaaaaggctgcgaggtaggcgaatgcggcgcctgcaacgttatcatcaacggggaatgttttaattcctgtatttacctcgcaatctgggcggaaggcaaggagattaccactaccgaagggcttttaagcgccgacggggaactctccgcgctccagcaggcgttcattgacgagggcgcggtgcagtgcggcttttgtacgccgggttttctgatgagcgccacggaaatcatacgctcgggaaaaaactacagcgacgcggaactgcggaaactactatccgggcacttatgccgttgtactggttatgagaacatattccgcgctgtgagaaaacttgctggtcagaaataa

SEQ ID NO: 27330 - protein, 156 aa, Unknown
  Obtained from environmental sample
  DOMAIN (76)...(151): [2Fe-2S] binding domain
  misc_feature (1)..(156): Xaa is any amino acid
MRKQLVRCTINGKATETMVDIRASLTDMLRNEYRLTSVKKGCEVGECGACNVIINGECFNSCIYLAIWAEGKEITTTEGLLSADGELSALQQAFIDEGAVQCGFCTPGFLMSATEIIRSGKNYSDAELRKLLSGHLCRCTGYENIFRAVRKLAGQK

SEQ ID NO: 27331 - DNA, 303 bp, Unknown
  Obtained from environmental sample
  misc_feature (1)..(303): n is a, c, g, or t
ttgcgaccctggggtgttcggcaaatgtccgcgctttcaaaagatagcaaaaccattgacaggcttcgcctggcatacggcgtcgccgggcctgtccccatgcgggttcccacagcggaacaggcggcatccggaaaaccggcaaacgccgaaaccgcagccgccgtcgcaaaactggtgttaaacgacattaatccacgctcaagctggcgggccagcaaggaattccgcctgcatctggcggaagaacttgctaaacgggcgattgccgaatcgctgaaacgcgcgggggtatcgttatga

SEQ ID NO: 27332 - protein, 100 aa, Unknown
  Obtained from environmental sample
  DOMAIN (7)...(97): CO dehydrogenase flavoprotein C-terminal domain
  misc_feature (1)..(100): Xaa is any amino acid
MRPWGVRQMSALSKDSKTIDRLRLAYGVAGPVPMRVPTAEQAASGKPANAETAAAVAKLVLNDINPRSSWRASKEFRLHLAEELAKRAIAESLKRAGVSL

SEQ ID NO: 27333 - DNA, 495 bp, Unknown
  Obtained from environmental sample
  misc_feature (1)..(495): n is a, c, g, or t
atggtaatagacgtcagactcgtccctgaggggcgctccgccgtggagcgggaatccgagcttctggggtatcggggcgacttgccaccgtttcttaagccgctgttgtgccgtgccgagttggatagggctgatggggtgattgcggtcgccctgagctttgatggtgaatttgaggttgaatgcgcgcgctgcttggccgcggtacgcgtacccgtatgcggcgagttgagccttgtcctaaaggaggaggtcggcaggcatggccccgcgctcgacgacgaaggcgcggatttttttttcgataccgccgatagccttgtagacttgagcccggccctttacgacgagataatgacgacgctgcctatgatgccgctgtgctcggaggattgcgccggggcgatatccgcgaggccgcaagcggcggcggagggcggagagcgggaggtcgacccgcggtgggcggggttgctgaaattgaaaaacggttga

SEQ ID NO: 27334 - protein, 164 aa, Unknown
  Obtained from environmental sample
  DOMAIN (6)...(160): Uncharacterized ACR, COG1399
  misc_feature (1)..(164): Xaa is any amino acid
MVIDVRLVPEGRSAVERESELLGYRGDLPPFLKPLLCRAELDRADGVIAVALSFDGEFEVECARCLAAVRVPVCGELSLVLKEEVGRHGPALDDEGADFFFDTADSLVDLSPALYDEIMTTLPMMPLCSEDCAGAISARPQAAAEGGEREVDPRWAGLLKLKNG

SEQ ID NO: 27335 - DNA, 819 bp, Unknown
  Obtained from environmental sample
  misc_feature (1)..(819): n is a, c, g, or t
ttgtgcctgaggagtaggcaatcgggaatggtgcgcttagcggttgatgttgacagcggggatttcggcccggaggcgatggtgcgcggcgttatcgcggcgcgtctcgcggcctccgagccgttttccgtctgtttatgcggtaaagaggagcggattcggcaggtgcttgcggctgtaggcgaaggcgccgtggcggacgagttcgccattgagcactgcccggatacggttacggatggggataggcgcactacggtctggaaaacgaagggtggggcgtccatagttcgttgcgtagcgttgcagaaggaggggcgtgcggacgcctcggtcagcgcgggagacacaggggttttgatagggtcggcgctgtttatacttgggcgtgcggagggtgtggcgcgtccggcgcttgccgctttcatcccgacgccgaaaaaaccggtgctcataatggacgtgggcgcgaacatcaactgccgggctgagttgttggtcgggttcgcgaaattgggttgcggatacgtgggccgcgttaggggcggcaaatcgcccaaggccgcgcttttaaatatcggatcggagccgcacaagggcccgcccgcggttcgcgccgcggcggaacttttagcagactacgaaaactacatagggttcatagagggcgacaaggtattctccggggtagcggacgtagtggtctgcgacggctttgtgggcaacgccctactcaaagcctgcgagagtttctatgccctaacatcggaattcttagccgacagccgcgagacctacgagaaactgtcgcnaaaataa

SEQ ID NO: 27336 - protein, 272 aa, Unknown
  Obtained from environmental sample
  DOMAIN (11)...(272): Fatty acid synthesis protein
  misc_feature (1)..(272): Xaa is any amino acid
MCLRSRQSGMVRLAVDVDSGDFGPEAMVRGVIAARLAASEPFSVCLCGKEERIRQVLAAVGEGAVADEFAIEHCPDTVTDGDRRTTVWKTKGGASIVRCVALQKEGRADASVSAGDTGVLIGSALFILGRAEGVARPALAAFIPTPKKPVLIMDVGANINCRAELLVGFAKLGCGYVGRVRGGKSPKAALLNIGSEPHKGPPAVRAAAELLADYENYIGFIEGDKVFSGVADVVVCDGFVGNALLKACESFYALTSEFLADSRETYEKLSXK

SEQ ID NO: 27337 - DNA, 456 bp, Unknown
  Obtained from environmental sample
  misc_feature (1)..(456): n is a, c, g, or t
gtggcagtacttcgggcggacaccggcggggcgggcgtcatatcaagttacttggcctccgacggcacgatgggcgaattgttgagcctttcggcgtggggcgaggagcgctttctgaggatgaaaggcaatgaggtattcaaacacgcggtgcggatgatgagcaacgcatcgttaatagcggtagagcgggccgggatgaaacttgaggacatagatctgatggtaccccaccaagccaatataaggataatacaagccgtagcggacagcctaaagttgcccgcggaaaaggtagtggcaaatattcacaagtacggaaacacctcaagcgcgtcaatcccgatagcgttggaagaggcgtggttggacggtcgggcgcaaaatggcagccgcctattatttgtagggcttggcggtgggtttacagtgggcagcgcggtgtgcattatgtaa

SEQ ID NO: 27338 - protein, 151 aa, Unknown
  Obtained from environmental sample
  DOMAIN (62)...(150): 3-Oxoacyl-[acyl-carrier-protein (ACP)] synthase III C terminal
  misc_feature (1)..(151): Xaa is any amino acid
MAVLRADTGGAGVISSYLASDGTMGELLSLSAWGEERFLRMKGNEVFKHAVRMMSNASLIAVERAGMKLEDIDLMVPHQANIRIIQAVADSLKLPAEKVVANIHKYGNTSSASIPIALEEAWLDGRAQNGSRLLFVGLGGGFTVGSAVCIM

SEQ ID NO: 27339 - DNA, 1200 bp, Unknown
  Obtained from environmental sample
  misc_feature (1)..(1200): n is a, c, g, or t
atggaatcgcatttaaacccggaaacaattgagaaagcttacgctttggcaaagcctgcctacgccgcttttggcattgatacggataaaacaataagcgccgcgatggatattcccatatccgtacattgctggcagggagacgatgttacaggctttgagggggcggacgggctgtccgggggcggtattctcaccaccggcaattatccgggcagggcgaggaacggggatgaactgagggctgacgccgaattcgcttttaccctaattccgggaacaaaacgttttaacctccatacattttacgcggaacctgcagggaagaaagtatcaagggacgcgcttgaaccggaacactttcaaaaatggatggactggtcaaagaaaaagggaatacctctggattttaaccctagttttttctcgcaccccatggccgattccggctttaccctttcaagcgccgatcatcaaatcagggatttctggataaggcactgcaaggcttcccgtaaaatagcggctgcttttgggagcaatcagggattcgcctcggttaataacatctggataccagacggctcaaaagacctgcccgccgaccgcctttccccgcgaaaaaggctatgcgatgcgctggatgatattctttctataaaatatgacgcgaatacaattgttgatgcagtggaatccaaactcttcgggattggcagcgaatcctacgtggtaggttcgcatgagttttatttggcttatgccgctttaaagcgtattaacctatgcctggatacggggcattttcaccccaccgaaaacattgcggacaagatttccgccattatgctttttgtgccgggccttcttatccactttagcaggggggttcgctgggattcggatcacgtcgcggttttttcggacgagcttcgggaagtttgccgcgaaataataaggcacaagtatttaaacagggtaaacatctcccttgattattttgacgcgtcgattaaccgtatcgcagcatggacaataggtagccgcagtttgcggaagggccttttggaagctctccttgaaccgattgaactcttaaagaaagccgaagcatcaggcaggtaccatgagcgccttgccttgatggaagaggctgaaaacntttgccattcccggcagtctgggacaagttgtgcctaa

SEQ ID NO: 27340 - protein, 399 aa, Unknown
  Obtained from environmental sample
  DOMAIN (8)...(393): L-rhamnose isomerase (RhaA)
  misc_feature (1)..(399): Xaa is any amino acid
MESHLNPETIEKAYALAKPAYAAFGIDTDKTISAAMDIPISVHCWQGDDVTGFEGADGLSGGGILTTGNYPGRARNGDELRADAEFAFTLIPGTKRFNLHTFYAEPAGKKVSRDALEPEHFQKWMDWSKKKGIPLDFNPSFFSHPMADSGFTLSSADHQIRDFWIRHCKASRKIAAAFGSNQGFASVNNIWIPDGSKDLPADRLSPRKRLCDALDDILSIKYDANTIVDAVESKLFGIGSESYVVGSHEFYLAYAALKRINLCLDTGHFHPTENIADKISAIMLFVPGLLIHFSRGVRWDSDHVAVFSDELREVCREIIRHKYLNRVNISLDYFDASINRIAAWTIGSRSLRKGLLEALLEPIELLKKAEASGRYHERLALMEEAENXCHSRQSGTSCA

SEQ ID NO: 27341 - DNA, 354 bp, Unknown
  Obtained from environmental sample
  misc_feature (1)..(354): n is a, c, g, or t
atgctcggtggaagtttgcatcaggatattcccacagaacttcctagcacaataatccattcccaaaactcgccttacgatgttcccgcccacgatgttaaaataattccgaatactccattgcataaacttgctggaaaagaacaccttgaagtgaacagttctcatcatcagggaataaataagatagcaaaagagcttgaaattatggcggtggctggagatggtcttgttgaagccgtatatatgccaactcatcctcacgtttgggctgtgcagtggcatcctgaatattctctcaaagatgaaatgtcaaagaagatattttcaaattttgtaaagagtattggataa

SEQ ID NO: 27342 - protein, 117 aa, Unknown
  Obtained from environmental sample
  DOMAIN (2)...(97): Peptidase C26
  misc_feature (1)..(117): Xaa is any amino acid
MLGGSLHQDIPTELPSTIIHSQNSPYDVPAHDVKIIPNTPLHKLAGKEHLEVNSSHHQGINKIAKELEIMAVAGDGLVEAVYMPTHPHVWAVQWHPEYSLKDEMSKKIFSNFVKSIG

SEQ ID NO: 27343 - DNA, 462 bp, Unknown
  Obtained from environmental sample
  misc_feature (1)..(462): n is a, c, g, or t
ttgccctacggacttatcagaataccgcacccctacgacaccgctacgctcaactataattggcagatatggggctgccacgcttactcgttattttcaaattacacagaacacatcgggaggcaatctacgcaaaccgccgtaaatgcggtactgcgttttctcatagccaagggaataatcaaatgggcactgcaccgcggaatgcatacccgtgtgctaaacgaggaattaataataaatgtccaagcacataaggctggaatactgaaaaaacacgtctatgtaggcgaagaggtatccgagggcgatctgctctgcgaaataattcatcctttagaaggcaacacgatagggcgaataaaatcaccaacagacggaacggtattttttgcttacaataagcaactagtgacggaatattcagacgtattcaacattgtaccgtttagctatgcgtga

SEQ ID NO: 27344 - protein, 153 aa, Unknown
  Obtained from environmental sample
  misc_feature (1)..(153): Xaa is any amino acid
MPYGLIRIPHPYDTATLNYNWQIWGCHAYSLFSNYTEHIGRQSTQTAVNAVLRFLIAKGIIKWALHRGMHTRVLNEELIINVQAHKAGILKKHVYVGEEVSEGDLLCEIIHPLEGNTIGRIKSPTDGTVFFAYNKQLVTEYSDVFNIVPFSYA

SEQ ID NO: 27345 - DNA, 627 bp, Unknown
  Obtained from environmental sample
  misc_feature (1)..(627): n is a, c, g, or t
atggataagaacgttatatactcaataaaatcgctctaccgagagagcatgaatatcatagggtacacctttggctctggcgaacattcgtgctgcgtggtgggagcgcttcgcggcaacgaaattcagcagatggctatctgcgcccaattaattgatacacttaaacgcttagaagaaaacggttgcatagccaatggcaaaagcataatgataataccgtgtgcaaatcactattccatgaatatcggcaaacgcttttggccgctagataacaccgacatcaaccgaatgttccctggctacgatcagggcgagaccacacaacgcatcgcagacgggctgtttaagtcaataaaagattatgtttacggagtacagatggcaagtttctaccgcgaaggcgaattcctgccgcacgtcaaagtgatggataccgattgcaagaaccgcgaaaactacgattcgctcactgatttcggttgccctacggacttatcagaataccgcacccctacgacaccgctacgctcaactataattggcagatatggggctgccacgcttactcgttattttcaaattacacagaacacatcgggaggcaatctacgcaaaccgccgtaa

SEQ ID NO: 27346 - protein, 208 aa, Unknown
  Obtained from environmental sample
  misc_feature (1)..(208): Xaa is any amino acid
MDKNVIYSIKSLYRESMNIIGYTFGSGEHSCCVVGALRGNEIQQMAICAQLIDTLKRLEENGCIANGKSIMIIPCANHYSMNIGKRFWPLDNTDINRMFPGYDQGETTQRIADGLFKSIKDYVYGVQMASFYREGEFLPHVKVMDTDCKNRENYDSLTDFGCPTDLSEYRTPTTPLRSTIIGRYGAATLTRYFQITQNTSGGNLRKPP

SEQ ID NO: 27347 - DNA, 357 bp, Unknown
  Obtained from environmental sample
  misc_feature (1)..(357): n is a, c, g, or t
atgcgcatcacagagaactattgcacgcaactcgtggacggaatactgaatttgctacacgaactcggaatgtgggatgagccagtagtgcaggtacggaagccactcgtttcaaaggatcgcagcattggttttctaaactcagatgcacacggaatatttattccgcgtgccgcgcatggcagccatataaacgccggcgattgtattggcaaagtaatagacccacttgtaggtgttgttgttgaagagacgcttgcaccgagtactggcttattgtttacgcttagggaatatccggttgtattcggaggttcacttctggcacgaatcataggagactccgataatggataa

SEQ ID NO: 27348 - protein, 118 aa, Unknown
  Obtained from environmental sample
  misc_feature (1)..(118): Xaa is any amino acid
MRITENYCTQLVDGILNLLHELGMWDEPVVQVRKPLVSKDRSIGFLNSDAHGIFIPRAAHGSHINAGDCIGKVIDPLVGVVVEETLAPSTGLLFTLREYPVVFGGSLLARIIGDSDNG

SEQ ID NO: 27349 - DNA, 612 bp, Unknown
  Obtained from environmental sample
  misc_feature (1)..(612): n is a, c, g, or t
ttgcctccatcatggcaggcatcccccgtgcgtcaggtactttccgcgattcccggcagccttacagatgaaacaagcccggcagcccggttactgcgggcgttccacgttgcccaatggcggcgggaatctcttttttgcggaagctgtggggccaaaaatggcgattcaggtactgaaccggcccgcctctgccctgtttgcggacgcgtggaattcccccgcatcgccccggcggttattacgcttataaccaatgatgaagggaagatactgcttgcccataacaaaaaattcacccccggcgtatacagccttatcgccggttttgtcgaggcgggggaaaatcttgaagcggctgtcgtccgtgaaatccgtgaagagatcggcattgaaattagcggcataaagtacattgcttcgcagccctggccctttcctcattccctcatgataggcttttcggcccgttatgccgccgggacaatcagacccgacggcattgagattgaagacgcgcagtggttcagccgcgatacactgccttcgctgcccggccccggctcgctatcacgctgccttatcagccgatggttggatagaacgttatag

SEQ ID NO: 27350 - protein, 203 aa, Unknown
  Obtained from environmental sample
  DOMAIN (76)...(202): NUDIX domain
  misc_feature (1)..(203): Xaa is any amino acid
MPPSWQASPVRQVLSAIPGSLTDETSPAARLLRAFHVAQWRRESLFCGSCGAKNGDSGTEPARLCPVCGRVEFPRIAPAVITLITNDEGKILLAHNKKFTPGVYSLIAGFVEAGENLEAAVVREIREEIGIEISGIKYIASQPWPFPHSLMIGFSARYAAGTIRPDGIEIEDAQWFSRDTLPSLPGPGSLSRCLISRWLDRTL

SEQ ID NO: 27351 - DNA, 810 bp, Unknown
  Obtained from environmental sample
  misc_feature (1)..(810): n is a, c, g, or t
gtgaacgccggaattcatatcatatcaacggaatttttaaaaagctgtcagttgtcaaaagagaaagtcgaccttgaccgcgatatgctaaagccttctatttcaggcgggaagatattcgcctactccactcccgaatacataaaggacatgggcacgccggagcgttacgcgcaagttacgtctgatattgaagaggggattgtcggtcaaaaaaatctttcggtaaagcaaaaatgcgtatttttggacagggacggcactatcaataaattcaataattttataaccaaaccggaaaattttgaattaattgaaggcgcgtcggaagcgattaaaaaaatcaacagtcgtggatatctcgcaattgttatcacaaaccagcctgtaatagcccggggagagaccgattttgaaacgcttgatttaatccacatgaaaatggagaccgaattaggcaaacacggcgcgtatattgacgatcttttttactgtccacatcaccctgataaaggattcccgggcgagcgtccggaatacaagatcgagtgcgactgcagaaagccaaaaccaggattgatccttaaagccgcgaaaaaatacaatattgatctttcgcggtcatatatggtcggcgatgacacgcgcgatgttaacgccggaaaaaacgccggctgtattccggtatttttaacaaatgataaaccggttgaaggtatgaataatataaaaacatttgccaatttacgtgatttcacagagctgtttttatcgcgggaagagatttatgacgcagccttacctgcttaa

SEQ ID NO: 27352 - protein, 269 aa, Unknown
  Obtained from environmental sample
  misc_feature (1)..(269): Xaa is any amino acid
MNAGIHIISTEFLKSCQLSKEKVDLDRDMLKPSISGGKIFAYSTPEYIKDMGTPERYAQVTSDIEEGIVGQKNLSVKQKCVFLDRDGTINKFNNFITKPENFELIEGASEAIKKINSRGYLAIVITNQPVIARGETDFETLDLIHMKMETELGKHGAYIDDLFYCPHHPDKGFPGERPEYKIECDCRKPKPGLILKAAKKYNIDLSRSYMVGDDTRDVNAGKNAGCIPVFLTNDKPVEGMNNIKTFANLRDFTELFLSREEIYDAALPA

SEQ ID NO: 27353 - DNA, 621 bp, Unknown
  Obtained from environmental sample
  misc_feature (1)..(621): n is a, c, g, or t
atgaagtataccccaaaaaaagacgtatccgaccgccgcgccgctattattgacgctttaatcaaatcaatagaaatattttcagctaataaagaagaaacgtttgaagaagtaataaccaacggaatacgaccctttgcggacgctgttggtctggatcgcgtagttttttacgagatggtggataccgaagaaggcaaacgtcccgggcaaatttatcgctgggacaagtcggaaggcggtttaatgtctcttgatgaagaacttaaaattttacccaagcatcctattttggatgaatggttttcgctattatcgaagggcgagcatatacgtttcaggaaaagcgattataccaaagatgtggcggctttgatgaaggtctatggcataatgtcaatattgatagtgcctattttcacgcgcggtgaattctggggagttatcaattttcaggagcacaccgacgacagatattttgacgaagactgctccgatttgatgcataccgcggcgcgcgtattttcaaacgcgattataagaaaggaatttaattatagcgctgaagaagcaatcaaggcgctcaaacgccgcgaaaaaaatggaagccgcgctgaataa

SEQ ID NO: 27354 - protein, 206 aa, Unknown
  Obtained from environmental sample
  DOMAIN (34)...(179): GAF domain
  misc_feature (1)..(206): Xaa is any amino acid
MKYTPKKDVSDRRAAIIDALIKSIEIFSANKEETFEEVITNGIRPFADAVGLDRVVFYEMVDTEEGKRPGQIYRWDKSEGGLMSLDEELKILPKHPILDEWFSLLSKGEHIRFRKSDYTKDVAALMKVYGIMSILIVPIFTRGEFWGVINFQEHTDDRYFDEDCSDLMHTAARVFSNAIIRKEFNYSAEEAIKALKRREKNGSRAE

SEQ ID NO: 27355 - DNA, 585 bp, Unknown
  Obtained from environmental sample
  misc_feature (1)..(585): n is a, c, g, or t
atgggtataattaagacagctttggaaattgcgcttgaaaaaaccgaagatgtaaaaagcggcaggtccaatattgaccaatatgaagcgaaacagcgcggcaaaaaactggcaaatgcctttcttgccggagagaaagatttaactgaagaaattaagaatacgccttctgaacagcaaggaagcctgaaacagggggtttttgacgtattaatttcccaaattaatatgcctgccgtcaaggaagatgaaaaacggatcgaattggccggcaaggggcttcaaacaattataaacaataaacaatttaacattttattccagcaatttatgcaaatactttcccgttatttgcaggaaacgtctcagtatgaacaggcaatccgccagcagtacgctcctaaacttcgccataaagaagaagaacttacccgcaggctgggcagggaagttcatattgatccgttacaggaccccgaatttatcgcgttttataatcagcacattaacgctttaaaaggcaattatgaacctgttgtaaaacaggtaaaagaagaagcccgcagtttatttgacgtttcttaa

SEQ ID NO: 27356 - protein, 194 aa, Unknown
  Obtained from environmental sample
  misc_feature (1)..(194): Xaa is any amino acid
MGIIKTALEIALEKTEDVKSGRSNIDQYEAKQRGKKLANAFLAGEKDLTEEIKNTPSEQQGSLKQGVFDVLISQINMPAVKEDEKRIELAGKGLQTIINNKQFNILFQQFMQILSRYLQETSQYEQAIRQQYAPKLRHKEEELTRRLGREVHIDPLQDPEFIAFYNQHINALKGNYEPVVKQVKEEARSLFDVS

SEQ ID NO: 27357 - DNA, 813 bp, Unknown
  Obtained from environmental sample
  misc_feature (1)..(813): n is a, c, g, or t
gtggctgtcattgaaatgcgggatattaaacgggaataccgtatggaaggtaaatccggcaaatcaaaagctgcaagcgcggtagttgtaagagcgctgcgcggagttaatttctccgcggttgaaggcgagtttgtttcggttatgggtccttcaggttccggcaaatccacattgatgaatatattaggatgccttgacaagccgtcggaaggaacttacaccctggacaatattgaaacttccgtttccgattccgatacattcgcatacatcagaaaccgcaaaatcggctttgtatttcagtcttttaatttacttgcaaggactacagcgctggaaaatgtggaactgccgcttttttaccgccgcagggaaacaaatgaaaagaaacaatcgtctcgtgatcgcagggaaaaggcaataaccgcccttagagaagtggggcttggcgagcgaatggatcattttccttcgcagctttcaggcgggcagcagcagcgggtcgctatagcgcgcgcaatagtaaatgatcccgcgtttattctggcggacgagcctacaggaaaccttgatacaggaatgacgcttgaaattatggggcttttccagcagttaaacaaaagagggaagacaattatcatggtgactcatgagccggaattggctgcctatacaaaacgtattataactttacgggacggaaaactggtttccgacagcaaggtaacggaaagacgcaatgcgttagccgatcttgcatactggaacaaggaacatgctttgcttgcggataagggagcggcaacatga

SEQ ID NO: 27358 - protein, 270 aa, Unknown
  Obtained from environmental sample
  DOMAIN (43)...(235): ABC transporter
  misc_feature (1)..(270): Xaa is any amino acid
MAVIEMRDIKREYRMEGKSGKSKAASAVVVRALRGVNFSAVEGEFVSVMGPSGSGKSTLMNILGCLDKPSEGTYTLDNIETSVSDSDTFAYIRNRKIGFVFQSFNLLARTTALENVELPLFYRRRETNEKKQSSRDRREKAITALREVGLGERMDHFPSQLSGGQQQRVAIARAIVNDPAFILADEPTGNLDTGMTLEIMGLFQQLNKRGKTIIMVTHEPELAAYTKRIITLRDGKLVSDSKVTERRNALADLAYWNKEHALLADKGAAT

SEQ ID NO: 27359 - DNA, 759 bp, Unknown
  Obtained from environmental sample
  misc_feature (1)..(759): n is a, c, g, or t
ttggtaaccccgcgcggcaaaaaagaggggctgacgcttcttttcacaaaccagacccgcgaaaaagaattaaaaaagactgtaaaaatcgtaaacgacgaaagacgcgtaatcaaggatatgttcgcccgttatatgtcacaggaagtaatgacaagccttatggaaaacccggacagcataaaactgggaggggacaaaagggaagcgaccgtattcttcgcggacatacgcgggtatacgagtttttcggagggccgcgacccggagattatcgttgaaatccttaacgagtatttcagcgaggcggttgaaaacgtcatgatctacaagggctatatcgacaaatttatcggggactgcatcatggccgtatggggcgttcccatgcagcccaaaaaagacgacgcgataaacgccgtttcttgcgcgatcgccattcagaacgccgtgcgttcgtcaaaaaggaaatttttccgcaatgaagcggcgcgcctgcgcataggcataggcattaacacgggccctctggtagcgggaaacctcggcagcatacagcggatggattactcggttataggcgataccgtcaaccttgcggcgcggcttgaaggcgcagcaggagccgacgaggtaatcatttcacaggcgacgcggaatcatctcggaaacaatttcaaacttgaaaaaagaaaacctatccgcgttaagggcaaggaaaaaccaatacagatatataatgtgctgggatttaaataa

SEQ ID NO: 27360 - protein, 252 aa, Unknown
  Obtained from environmental sample
  DOMAIN (65)...(250): Adenylate and Guanylate cyclase catalytic domain
  misc_feature (1)..(252): Xaa is any amino acid
MVTPRGKKEGLTLLFTNQTREKELKKTVKIVNDERRVIKDMFARYMSQEVMTSLMENPDSIKLGGDKREATVFFADIRGYTSFSEGRDPEIIVEILNEYFSEAVENVMIYKGYIDKFIGDCIMAVWGVPMQPKKDDAINAVSCAIAIQNAVRSSKRKFFRNEAARLRIGIGINTGPLVAGNLGSIQRMDYSVIGDTVNLAARLEGAAGADEVIISQATRNHLGNNFKLEKRKPIRVKGKEKPIQIYNVLGFK

SEQ ID NO: 27361 - DNA, 1101 bp, Unknown
  Obtained from environmental sample
  misc_feature (1)..(1101): n is a, c, g, or t
ttggcgcatttcgcgccggatacttttgtccctgtgggttttgactcaggcggcgtaaccaccggcccaatgacggtgcctttcattttagcgatgggcgccggtattgccgccctgcgcagcgataaaagttcgcaggaagacagcttcggccttgtggcaatgtgcagtatcgggcctattttagcggtgcttcttctcggcatctttttcaaaccgggtcacgcggaattggaaacttcagaaatttatgacgccgcgacttcacgggacgtggtcagatacttcgcggttgaactgccaatctttcttaaagaagtttttatttcattaagcgccattgtgctttgttttattattttccagataattacccggcgttttaaaaaatatcagcttggacgcattacagtaggttttttctacacttttatcggccttgttatttttttaacgggagtaaacgtaggattttttccggtaggccagcttttgggcttgcagcttgcctcttcgcctttcaagtgggtattaattccgcttggagcgcttatcggttactttatcgtaaaagcggaacccgcggttcatgttcttaacaaacaggttgaagaaatttcttccggcgcgattacgataaaaatgatgaacctcgggctttccatcggcatgtctttggctcttaccataacaatgatccgcatcctttacggcatcccgttaatgtacatattgatacccggctatgtcttcgcgctggcgctgactttttttgtgcctcctatttttacgggtatcgcgtttgattcgggcggcgtgtgttccggccccatgacttcaacatttcttttgcccttcgcaatgggaacctgcgccggcgtaggcgggaatcttatgattgacgctttcggcattgtcgccattgtcgccatgacgcccctaatcgttattcagctaatggggcttgtttaccagttcaggacaaaatacgccgccgctcttaccatacagcagactgaagctatcggcgcagaggccatcgccgcaggcggcgaaagcatcaactggggaaaaatttacgtttacggagaggatacatag

SEQ ID NO: 27362 - protein, 366 aa, Unknown
  Obtained from environmental sample
  DOMAIN (114)...(325): Protein of unknown function (DUF1538)
  misc_feature (1)..(366): Xaa is any amino acid
MAHFAPDTFVPVGFDSGGVTTGPMTVPFILAMGAGIAALRSDKSSQEDSFGLVAMCSIGPILAVLLLGIFFKPGHAELETSEIYDAATSRDVVRYFAVELPIFLKEVFISLSAIVLCFIIFQIITRRFKKYQLGRITVGFFYTFIGLVIFLTGVNVGFFPVGQLLGLQLASSPFKWVLIPLGALIGYFIVKAEPAVHVLNKQVEEISSGAITIKMMNLGLSIGMSLALTITMIRILYGIPLMYILIPGYVFALALTFFVPPIFTGIAFDSGGVCSGPMTSTFLLPFAMGTCAGVGGNLMIDAFGIVAIVAMTPLIVIQLMGLVYQFRTKYAAALTIQQTEAIGAEAIAAGGESINWGKIYVYGEDT

SEQ ID NO: 27363 - DNA, 876 bp, Unknown
  Obtained from environmental sample
  misc_feature (1)..(876): n is a, c, g, or t
atgagcaaagacaaaagcacgaaccaaagcgctggcgcgcaccaatacgacgaaagcaagatcaagactctgagctccttggagcacatacgtctgcgtagcggcatgtacatagggcggctcggcgacggcggaaaccccgacgacggcatctacgtcctcctcaaagaggtgatagacaacgccgtagacgagttcatcatggggttcggcaaaaagatcgaggtgaacgtggagaacggcgtggcctccgtgcgcgacttcgggcgggggattccgctgggcaaggtgatcgactgcgtctcgaccatcaacactggcgcgaagtacaacgacgacgtcttccagttcagcgtggggctgaacggcgtgggcaccaaagcggtcaacgcgctgtcaagcagcttccgcgtggtctcctaccgcgacggggagtactttcaggcgaagttcgagcgcggcaagctcatttccaaaaagggcggcgtctctaaaacggaggaaccggacggcacgttcgtggagttcgttcccgacgcggagattttcggcgagtacaagttcaattttgagtacatagagcaacgcctgtggaactacgcctacctcaactccggcctgaagctctttttgggtaagcagaagtttgagtctaagaacgggctcttggacctattgcaaaacgacatcggcgagtcggcagtctacagcatagcctactgccgcggcaagcagctggagttcgctttcacgcatacgcaggcgtacggggaggactaccactcgtttgtgaacggccagttcacctccgacggcggcacgcacctgagcgcctttagggagggcatactcaagggggtcaacgaatttctatag

SEQ ID NO: 27364 - protein, 291 aa, Unknown
  Obtained from environmental sample
  DOMAIN (46)...(181): Histidine kinase-, DNA gyrase B-, and HSP90-like ATPase
  misc_feature (1)..(291): Xaa is any amino acid
MSKDKSTNQSAGAHQYDESKIKTLSSLEHIRLRSGMYIGRLGDGGNPDDGIYVLLKEVIDNAVDEFIMGFGKKIEVNVENGVASVRDFGRGIPLGKVIDCVSTINTGAKYNDDVFQFSVGLNGVGTKAVNALSSSFRVVSYRDGEYFQAKFERGKLISKKGGVSKTEEPDGTFVEFVPDAEIFGEYKFNFEYIEQRLWNYAYLNSGLKLFLGKQKFESKNGLLDLLQNDIGESAVYSIAYCRGKQLEFAFTHTQAYGEDYHSFVNGQFTSDGGTHLSAFREGILKGVNEFL

SEQ ID NO: 27365 - DNA, 1656 bp, Unknown
  Obtained from environmental sample
  misc_feature (1)..(1656): n is a, c, g, or t
atgcgcgacaaactgatcgacggcatcgcgaacgccaatgacgaatctgaccgcgagggcatccgcgttgtcatagaactgaaaaaaggcgctatcgtcaaggtcgtgcttaaccagcttttctccaggacgccattgcaaacgtctttcagcataatcaaccttgccctggtgaacggcaggccccaatgcctcaacctgaaagaacttatccattattttattgagcaccgcgtcgaggttgtcacccgcagaacgcgctacgatctccgcaaggccgaagaacgcgcccatattctggaaggcctgatcatcgcccttgcgaatatcgacgaagtgatcgccattatcaaggcaagccgcgatgtcgctattgcccggcaaaaattgcaggaacgtttcagcctttccgaagcccagtcagaggcaatcgttgaaatgcgccttggccgccttaccagccttgaagtcgaaaaaattgaaaaagaacttgaagaacttaaagttcagatagcttattttaaatcgctgcttgccgacgagaaaaaactccgctcggtgataaaggacgagacaagagccataagcgaaaaatacggcgacaagaggcggaccgagatcatagccggcgaggtggagaacatcaacattgaagaccttatcaaaaaagaagagatgatgatcctcatttccaacctgggctatgtaaagagagtccccgtttcggcttaccgcaaccagggacggggaggaaaaggcatgcagagcgcgaaactcgcggaagatgattttgtcgatcagatttttgtcgcctccacccatgaatacattatgttcatcaccagcgcgggcaaggcctactggatgaaggtgcacgaactgccggagggcagccggacaagcaaaggctcccacataaaaagcctgcttacagtttcgcctaacgaagacatttccgctattgtctcgcttaaagatttttccgacaccgaattcctgttcatggggacggcgcggggcgttgttaaaaaagccagaacctccgaatttgtcaacgctaaaaccaggggcgttatcgcgattaaccttgacgacggggacaggcttgtcagcgccctgctgaccaacggctctgacgaggtggtgctgatttcccgcaggggacaggcactgcgcacccacgaggatcatataagggcgatgggacgctcgtcacgcggcgttaccggcatgaggctgtcaaacggcgacgagctcgccggcatgctgcgtgttgatatcgggaaagatctcccgcccgaaaaaaccgaaaaaatgctgatccttaccgaattcggctatggcaagagggttgacttcagcgaattctcatcgcacgggcgcgggacgggcggccagaaaatctacacggtcaatgaaaaaaccggcgagattataggctgcgtttccctgctggacgacgatgagataatgtgcataaccagccagggaaaatcaatcaagttaaaggtagacgagatccgcgttatgggacgcgcagctcagggcgtgaggatactcagcatagancagccggactttgtcatcggccttgaccgcgttataaaagaagacgaaacagttataaaagaggacgaaccctctgnaggagagtaa

SEQ ID NO: 27366 - protein, 551 aa, Unknown
  Obtained from environmental sample
  DOMAIN (1)...(200): DNA gyrase/topoisomerase IV, subunit A
  misc_feature (1)..(551): Xaa is any amino acid
MRDKLIDGIANANDESDREGIRVVIELKKGAIVKVVLNQLFSRTPLQTSFSIINLALVNGRPQCLNLKELIHYFIEHRVEVVTRRTRYDLRKAEERAHILEGLIIALANIDEVIAIIKASRDVAIARQKLQERFSLSEAQSEAIVEMRLGRLTSLEVEKIEKELEELKVQIAYFKSLLADEKKLRSVIKDETRAISEKYGDKRRTEIIAGEVENINIEDLIKKEEMMILISNLGYVKRVPVSAYRNQGRGGKGMQSAKLAEDDFVDQIFVASTHEYIMFITSAGKAYWMKVHELPEGSRTSKGSHIKSLLTVSPNEDISAIVSLKDFSDTEFLFMGTARGVVKKARTSEFVNAKTRGVIAINLDDGDRLVSALLTNGSDEVVLISRRGQALRTHEDHIRAMGRSSRGVTGMRLSNGDELAGMLRVDIGKDLPPEKTEKMLILTEFGYGKRVDFSEFSSHGRGTGGQKIYTVNEKTGEIIGCVSLLDDDEIMCITSQGKSIKLKVDEIRVMGRAAQGVRILSIXQPDFVIGLDRVIKEDETVIKEDEPSXGE

SEQ ID NO: 27367 - DNA, 771 bp, Unknown
  Obtained from environmental sample
  misc_feature (1)..(771): n is a, c, g, or t
atgatcctcgtgggtgcgcagtgcctgtcccctgcgggaaatcagcaccacctcgtcagagccgttggtcagcagggcgctgacaagcctgtccccgtcgtcaaggttaatcgcgataacgcccctggttttagcgttgacaaattcggaggttctggcttttttaacaacgccccgcgccgtccccatgaacaggaattcggtgtcggaaaaatctttaagcgagacaatagcggaaatgtcttcgttaggcgaaactgtaagcaggctttttatgtgggagcctttgcttgtccggctgccctccggcagttcgtgcaccttcatccagtaggccttgcccgcgctggtgatgaacataatgtattcatgggtggaggcgacaaaaatctgatcgacaaaatcatcttccgcgagtttcgcgctctgcatgccttttcctccccgtccctggttgcggtaagccgaaacggggactctctttacatagcccaggttggaaatgaggatcatcatctcttcttttttgataaggtcttcaatgttgatgttctccacctcgccggctatgatctcggtccgcctcttgtcgccgtatttttcgcttatggctcttgtctcgtcctttatcaccgagcggagttttttctcgtcggcaagcagcgatttaaaataagctatctgaactttaagttcttcaagttctttttcaattttttcgacttcaaggctggtaaggcggccaaggcgcatttcaacgattgcctctga

SEQ ID NO: 27368 - protein, 256 aa, Unknown
  Obtained from environmental sample
  misc_feature (1)..(256): Xaa is any amino acid
MILVGAQCLSPAGNQHHLVRAVGQQGADKPVPVVKVNRDNAPGFSVDKFGGSGFFNNAPRRPHEQEFGVGKIFKRDNSGNVFVRRNCKQAFYVGAFACPAALRQFVHLHPVGLARAGDEHNVFMGGGDKNLIDKIIFREFRALHAFSSPSLVAVSRNGDSLYIAQVGNEDHHLFFFDKVFNVDVLHLAGYDLGPPLVAVFFAYGSCLVLYHRAEFFLVGKQRFKISYLNFKFFKFFFNFFDFKAGKAAKAHFNDCL

SEQ ID NO: 27369 - DNA, 369 bp, Unknown
  Obtained from environmental sample
  misc_feature (1)..(369): n is a, c, g, or t
ttgggttatcgagagcggagaatcgacgtggacgccgagaaaagcaaggaaagggcgatacagcgtatcaaggcaacggttgagaccgagtttgcaagatcggttacagggtatgggtcggttataaccgaaagttccgtggtcggcgtcgaaaacggcaaggtaagttacagcctgttcccggtgtggatactcaataccaaatataataaagaaaattacctgtttttaatgaacggacagacaggccgccttgtcggaaagctgccggccgatcccggcaagtcctggaaataccggcttatgtttatcggtattttaggcatggcctttacgcttgtcattcaggctttgcggatattcatgtag

SEQ ID NO: 27370 - protein, 122 aa, Unknown
  Obtained from environmental sample
  misc_feature (1)..(122): Xaa is any amino acid
MGYRERRIDVDAEKSKERAIQRIKATVETEFARSVTGYGSVITESSVVGVENGKVSYSLFPVWILNTKYNKENYLFLMNGQTGRLVGKLPADPGKSWKYRLMFIGILGMAFTLVIQALRIFM

SEQ ID NO: 27371 - DNA, 1563 bp, Unknown
  Obtained from environmental sample
  misc_feature (1)..(1563): n is a, c, g, or t
ttgggcgataatcgtttaactgaaattgaaaaagagagtttttttgacaagctaaaagaaattttcaacgaccctatgataaaaattctgctggttgcgcttggagtaaatgcgctgctggtgctgggaacccaaactggggttatagctggcgaaaaaatggattggtatgaacctgtgggcatagcaatagcaatactcatagccaccatagtagctgcgctttctgaatacagaaacgaaaacgcatttcagaaattgcaagaagaagcctctcgaataaagataaaaacctaccgcaatggaatcatcgccgagcttaatatagatgaccttgttcaaggagatgcggttttactccagcccggcgataaaattccagcagacggaataataatagatggaaagataaaaattgaccagtctgttttaaacggcgaatccaaagaagctactaaaaaggcagctccaagcgattacaaagaagacaatgctccgctggattttctgcacccgcacaaggtgttcagaggtgccgttgtttgcaatggcaatgcggttatgcaggttagcgttgttggcgataaatccgtttatgggcagatagccaaagaacttcaaaccaccgatgatagagaaacaccattgaaagtgaaactcggcaagttggctcgcagcataagcaaattcggttatattggtagcatatcaatagcacttgcgttgttatttaaacatatagttatgaacaataattttgacccagcgcaaatcgctgtttactgctcaaattggggaacgctgctaaacgatattatacacgcctttatgctcgccgtgataataatagtcatggcggttccagaaggcttgccgcttatgatagccatcgtctccgctctgaatatgggaaaaatgctcaaagacaacgtgctggttcgcaaactagctggcatagaaaccgctggcagcctgaactttttattcagcgataaaacagggacaataacaaaaggcaaattggaagtggttgcatttatagacggaaatttaaaggagtacaaaaattacggcgatgttcaaggggatttgaaaaaatatctatcactttccattcaccagaacacggattcagttatctctggcaaaaaaattgtgggcgggaacgcaacggagcgtgcagttctcgcgttttctggcaacagcggcgaagcggtgaaagtgaaaacagcgggcaaaattccctttaacagcactaataaatattcggcaaccacaatagagggcgattattccctaactctgataaaaggagcaccggaaaaaattttgcagaagtgcaaattttactacgataacgatgggcaaaaaaagagttattccgggcacgagcagttgaataaaaacatagataccctcgcggagcgggcgattagagttgtggctttggcggtttctgaggaaaggataaatgacgaggttttgccggaaaacgattgggttttggtgggcgttatgggcataagggatgaggttcgcccagaatccgtgatccataactga

SEQ ID NO: 27372 - protein, 520 aa, Unknown
  Obtained from environmental sample
  DOMAIN (61)...(321): E1-E2 ATPase
  misc_feature (1)..(520): Xaa is any amino acid
MGDNRLTEIEKESFFDKLKEIFNDPMIKILLVALGVNALLVLGTQTGVIAGEKMDWYEPVGIAIAILIATIVAALSEYRNENAFQKLQEEASRIKIKTYRNGIIAELNIDDLVQGDAVLLQPGDKIPADGIIIDGKIKIDQSVLNGESKEATKKAAPSDYKEDNAPLDFLHPHKVFRGAVVCNGNAVMQVSVVGDKSVYGQIAKELQTTDDRETPLKVKLGKLARSISKFGYIGSISIALALLFKHIVMNNNFDPAQIAVYCSNWGTLLNDIIHAFMLAVIIIVMAVPEGLPLMIAIVSALNMGKMLKDNVLVRKLAGIETAGSLNFLFSDKTGTITKGKLEVVAFIDGNLKEYKNYGDVQGDLKKYLSLSIHQNTDSVISGKKIVGGNATERAVLAFSGNSGEAVKVKTAGKIPFNSTNKYSATTIEGDYSLTLIKGAPEKILQKCKFYYDNDGQKKSYSGHEQLNKNIDTLAERAIRVVALAVSEERINDEVLPENDWVLVGVMGIRDEVRPESVIHN

SEQ ID NO: 27373 - DNA, 801 bp, Unknown
  Obtained from environmental sample
  misc_feature (1)..(801): n is a, c, g, or t
atgccggtgtttttgccgataccgccgacgtcaggcgtcaggtcatttcgacttcgctcaatgaccttttctgtcgcttccgacggcgtaagagtttcgaagttgcttatatcaacaacgccgtcatcacctacaacgccgtcaatgttaattactccatccgtaccgacaagtccggctgtatcgatatcaacaactccgtcatcacctgcaacgccgtcgatattaattactccatccgtaccgacaagtccggccgtatcaatatcaacaacaccatcgtcacctacaacgccgtcaatgttaattactccatccgtaccgacaattccggctgtatcgatatcaacaacaccatcgtcacctacaacgccgtcaatgttaattactccatccgcaccgacaagtccggctgtatcgatatcaacaactccgtcatcacctgcaacgccgtcgatattaattactccatccgtaccgacaagtccggcagtatcaatatcgataacgctgtcattgcccgcaacgccctcaatgtcaacggcttcgacgccgctacccgcgtccacgaaacggcctatgtcgacgatgtcgtcggctataggaatattatcgatatcgataaatccgaccgtatcgatatcaacaatgccatcgatattaattattccgaccgtatcagtatcaacaactccgtcatcacctgcaacgccgtcaatgttaattactccatcggtattgacaagtccggccgtatcaatatcaacaactccgtcatcacctgaacgccgtcaatgttaa

SEQ ID NO: 27374 - protein, 266 aa, Unknown
  Obtained from environmental sample
  misc_feature (1)..(266): Xaa is any amino acid
MPVFLPIPPTSGVRSFRLRSMTFSVASDGVRVSKLLISTTPSSPTTPSMLITPSVPTSPAVSISTTPSSPATPSILITPSVPTSPAVSISTTPSSPTTPSMLITPSVPTIPAVSISTTPSSPTTPSMLITPSAPTSPAVSISTTPSSPATPSILITPSVPTSPAVSISITLSLPATPSMSTASTPLPASTKRPMSTMSSAIGILSISINPTVSISTMPSILIIPTVSVSTTPSSPATPSMLITPSVLTSPAVSISTTPSSPERRQC

SEQ ID NO: 27375 - DNA, 819 bp, Unknown
  Obtained from environmental sample
  misc_feature (1)..(819): n is a, c, g, or t
atgtatctgccagcccggggcggaggggaaggcgatgccggtgtttttgccgataccgccgacgtcaggcgtcaggtcatttcgacttcgctcaatgaccttttctgtcgcttccgacggcgtaagagtttcgaagttgcttatatcaacaacgccgtcatcacctacaacgccgtcaatgttaattactccatccgtaccgacaagtccggctgtatcgatatcaacaactccgtcatcacctgcaacgccgtcgatattaattactccatccgtaccgacaagtccggccgtatcaatatcaacaacaccatcgtcacctacaacgccgtcaatgttaattactccatccgtaccgacaattccggctgtatcgatatcaacaacaccatcgtcacctacaacgccgtcaatgttaattactccatccgcaccgacaagtccggctgtatcgatatcaacaactccgtcatcacctgcaacgccgtcgatattaattactccatccgtaccgacaagtccggcagtatcaatatcgataacgctgtcattgcccgcaacgccctcaatgtcaacggcttcgacgccgctacccgcgtccacgaaacggcctatgtcgacgatgtcgtcggctataggaatattatcgatatcgataaatccgaccgtatcgatatcaacaatgccatcgatattaattattccgaccgtatcagtatcaacaactccgtcatcacctgcaacgccgtcaatgttaattactccatcggtattgacaagtccggccgtatcaatatcaacaactccgtcatcacctga

SEQ ID NO: 27376 - protein, 272 aa, Unknown
  Obtained from environmental sample
  misc_feature (1)..(272): Xaa is any amino acid
MYLPARGGGEGDAGVFADTADVRRQVISTSLNDLFCRFRRRKSFEVAYINNAVITYNAVNVNYSIRTDKSGCIDINNSVITCNAVDINYSIRTDKSGRININNTIVTYNAVNVNYSIRTDNSGCIDINNTIVTYNAVNVNYSIRTDKSGCIDINNSVITCNAVDINYSIRTDKSGSINIDNAVIARNALNVNGFDAATRVHETAYVDDVVGYRNIIDIDKSDRIDINNAIDINYSDRISINNSVITCNAVNVNYSIGIDKSGRININNSVIT

SEQ ID NO: 27377 - DNA, 579 bp, Unknown
  Obtained from environmental sample
  misc_feature (1)..(579): n is a, c, g, or t
atgatcagatcggccgagcggcacgagcatgacaatacggaaaagtggcccgacatcgtccataacatgagaatgcgcataggcataaacaccggcgagatcatagccggcaacatgggttctaaactgagaaagaactacacgatgatgggcgacgccgtaaacctcgccgcccgcttggagagcgccgcgaaaaactacggcgtctacacgatgatcagccaccacacgcacgcgttggtaagcgataagtttgaaacaagaaaattggacacaataaccgtggtggggaaatcggaaccggttacggtgtacgagttgatcagccgaaagggagaattgaccggcgaggaggccgggctgctggagatatataataaaggcatcgacgcctattataatagagacttcggaaaagcgttggagttttttgataagtcgaaggaactggagccgaacaagaagataaatcccgcgaagccgacgccgtcggggaggtttgccgagatgtgcaggaagtacattgacaatccgccgggggcggattgggacggggttaataggctgacgtcaaaataa

SEQ ID NO: 27378 - protein, 192 aa, Unknown
  Obtained from environmental sample
  misc_feature (1)..(192): Xaa is any amino acid
MIRSAERHEHDNTEKWPDIVHNMRMRIGINTGEIIAGNMGSKLRKNYTMMGDAVNLAARLESAAKNYGVYTMISHHTHALVSDKFETRKLDTITVVGKSEPVTVYELISRKGELTGEEAGLLEIYNKGIDAYYNRDFGKALEFFDKSKELEPNKKINPAKPTPSGRFAEMCRKYIDNPPGADWDGVNRLTSK

SEQ ID NO: 27379 - DNA, 930 bp, Unknown
  Obtained from environmental sample
  misc_feature (1)..(930): n is a, c, g, or t
gtgatcgcgagctctcgtccggcgataggctccggcgggagcggcggcgacggtgaggacgaaggcggcaaatcagccttcgccggagatttcctgaaaggcgcggcggcgacggtgatggccaccccgtgcggcggcccgttcttaggcgcgctgctggcctgggcgctgcttcaaaaaccgttcacgatcttcatcctcttcgcgacaatgggcgtcgggatggcgctcccctacgttctcctcgcgtcaagcaaacgcctaatggcgctactgccgaaacccgggcgctggatagaggacttgaaacacttcatgggcttcctgctgctggcgttcgccgtcaacatgatgcgcagccttgacccgcgcctgaccaccgccaccgtcggaatatgcctgagcatcctcgtagcggcaagcgtaaacaaacgcttcacgcaattcggaatgcccgccgcgcgcagagcggccgtggcgacggtatcgctgatattgctgaccgccggaatcattgtctccgtaaactacctgcgcatagacgtgcagatattcaacgacgaccaccccggcgtaggcggcccgtactggtcggcgttctcggcgcaaacgctggcttcagctcacgacgagaaacgcaacgtgatcgtgaacttcacggcctcgtggtgcaccaactgcaaactaaacaaagcggccgccctaaacaccgccgcggcgcggcaactatacggcgaaaaaaatattctgctgctgacagccgatattacaagcgataatcctgcggcgcaagagctattgcaccacttgggttcaagaagcgtaccgttcctggcaatattccccggcgacgcgccgaagagcccggtgataatgcgggatattctctctagggagaaatttttgggggagttgcggaatttgccttaa

SEQ ID NO: 27380 - protein, 309 aa, Unknown
  Obtained from environmental sample
  misc_feature (1)..(309): Xaa is any amino acid
MIASSRPAIGSGGSGGDGEDEGGKSAFAGDFLKGAAATVMATPCGGPFLGALLAWALLQKPFTIFILFATMGVGMALPYVLLASSKRLMALLPKPGRWIEDLKHFMGFLLLAFAVNMMRSLDPRLTTATVGICLSILVAASVNKRFTQFGMPAARRAAVATVSLILLTAGIIVSVNYLRIDVQIFNDDHPGVGGPYWSAFSAQTLASAHDEKRNVIVNFTASWCTNCKLNKAAALNTAAARQLYGEKNILLLTADITSDNPAAQELLHHLGSRSVPFLAIFPGDAPKSPVIMRDILSREKFLGELRNLP

SEQ ID NO: 27381 - DNA, 576 bp, Unknown
  Obtained from environmental sample
  misc_feature (1)..(576): n is a, c, g, or t
atgtcggactggttatactcagatacggttaaagaacattttacaaatccgcgcaatgtgcttctggaagatgaggctgtttttgcgccggacgcgaaagggcagaccggaaatataaaatgcggcgatcaaatgttaatgctcttaaaaattaaagacgatgttattactgacgtgcgttggaaaacttacggttgcgcaagcgccatcgcttctaccagtatgctctcggagaccataaagggaatgaaactggaagaggcttataaaattcgccccgaagaccttgtagccaaacttggagggcttccaagttttaaaatacactgctccgtgttaggcgacaaggcccttcgcgccgcgatagacgattatctttcaaaaacgggacggccggggctttttgtagaggagaccgttgttatttgtcattgtttgggtattacggataaagacatagaggacgcttttcataacggggcgagaaactgggaacagcttcaacaggcgactaaaatcggcacggtctgcggaagctgtaaagaaaaagnccgtggatattctccacggctttga

SEQ ID NO: 27382 - protein, 191 aa, Unknown
  Obtained from environmental sample
  DOMAIN (140)...(190): BFD-like [2Fe-2S] binding domain
  misc_feature (1)..(191): Xaa is any amino acid
MSDWLYSDTVKEHFTNPRNVLLEDEAVFAPDAKGQTGNIKCGDQMLMLLKIKDDVITDVRWKTYGCASAIASTSMLSETIKGMKLEEAYKIRPEDLVAKLGGLPSFKIHCSVLGDKALRAAIDDYLSKTGRPGLFVEETVVICHCLGITDKDIEDAFHNGARNWEQLQQATKIGTVCGSCKEKXRGYSPRL

SEQ ID NO: 27383 - DNA, 1191 bp, Unknown
  Obtained from environmental sample
  misc_feature (1)..(1191): n is a, c, g, or t
atggcgggtgagatagaagtcgatatccacaagatactcttgggcgacgaggagcggttcagcccgttcgccaagaagagcagcgaatctttggggagacgccgcccgatagacgacgaccccttccgcctcgagttcgcccgcgacgagacgcgtatcctgcactcccgcccgttcaggcggctcaagcacaaaacgcaggtcttcctatcgccggacgacgaccacatctgcacgcggatggagcatgtcctgcacgtgtcaagcatagccgcggtcataggccgctgcctcaacctgaacaccgacctgatcaacgccatagccaaaggccacgacctaggccacccgcctttcgggcactccggggagcgtgtgctgaacgatatcattgtcaaagataaagagaaagacaataagacgtcgggcggattcaagcacgagatacacggactgcgggtggtggacaaactgaccaattacggcgccggactcaacctcacctacgaggtgcgcgacggcatcgccacgcactgcggggagagcttcgagcggatagtacgcccggaccgcggccgagacctagagaagctcgatctgctggacgaccgcaccagtatgcccgccacgctggagggatgcttggtgagattggtcgaccgcatcgcttacctggggcgcgaccttgaggacgccataaaggcgcgtttgataaagaaggacgatatcccgcctgaggtggtgcggggtttgggctccgacaacgggcatatcatcggggtcttcgcgaacgatactatagcgaacagcgtcggcaaggatcaaatagagatgagcgaggagatattcggtctgatgaagatgcttaaggagttcaattacaagcgcatatacaagcatcctgaggtggaacgggtatccgacaaggcgaacaagatgcttcgtatgctgttttacgaggtggagaggatatacgatgagtcggagcggggcggcgatacgtcgtatgtcgccacggcggtaaaagcgtcgccggtgctggagacgttcttcaaattcacgaagaatacgaattacaacaacgaggtaaagccgtggcgggtggtggcggactatgtggcggggatgaccgaccacttcgcggaaaaaaccttcacgcagctgttcatgccgtcgccgtttgtggaatga

SEQ ID NO: 27384 - protein, 396 aa, Unknown
  Obtained from environmental sample
  DOMAIN (80)...(225): HD domain
  misc_feature (1)..(396): Xaa is any amino acid
MAGEIEVDIHKILLGDEERFSPFAKKSSESLGRRRPIDDDPFRLEFARDETRILHSRPFRRLKHKTQVFLSPDDDHICTRMEHVLHVSSIAAVIGRCLNLNTDLINAIAKGHDLGHPPFGHSGERVLNDIIVKDKEKDNKTSGGFKHEIHGLRVVDKLTNYGAGLNLTYEVRDGIATHCGESFERIVRPDRGRDLEKLDLLDDRTSMPATLEGCLVRLVDRIAYLGRDLEDAIKARLIKKDDIPPEVVRGLGSDNGHIIGVFANDTIANSVGKDQIEMSEEIFGLMKMLKEFNYKRIYKHPEVERVSDKANKMLRMLFYEVERIYDESERGGDTSYVATAVKASPVLETFFKFTKNTNYNNEVKPWRVVADYVAGMTDHFAEKTFTQLFMPSPFVE

SEQ ID NO: 27385 - DNA, 1557 bp, Unknown
  Obtained from environmental sample
  misc_feature (1)..(1557): n is a, c, g, or t
ttgctgctgccccttgcgggcatacagaaacgctttgaagaagcgggagaggagtttccacccattaaggtcgacacccgttccggggacaccccgcaagccgagcgcaggcgctttctttccatgcccccttctatcctggcactgacgcctgaaagcctggggatcatactccttaaccccagagggcggcagatactttcctcagtgcgctgcgtgatcctggacgagatacacgctgcattgggcagcaagcgcggctgttacctttcctgccaggttgatcgcctttcgcttgttgccggtaatttccagcggattgccctttccgctaccgtcaagccaccggaagcggcagcgaatcttgtcgggaaaaaaatccacattgtttctcccgagggaaaaaaagaaattcagtttagagtgatatttcccgaaagcgagggaaagccttattcaggtgaagccggcgtagaacgctacggcaagcgttatacggaacttattaaattcattttaggcaaaataaggtccaatgacaaaaaaaatgacaaaaaagcggcaatacttgtttttacagattcaaggcgcagggctgagcggatcagctttcttctaaaccatgccgcagaaaatgaagctgaattttcaggtcgttctgtcgcttattgccaccacggttccctctcgaaagaagtccgcagggaggtggaagtagccctcgcttccggggagatttcctgcgtggttgcaacaggctctctggaacttggaattgacatcggcaacgtcgacgaggtgattctggcgggcagtcccatttcggcggcagtcgctttgcagagggttggccgttcgggacacacggtcggcgcggcaagcagaggctggctttttcccttccacggtatagatctgctgcaggcggcggcgctttcaggcgcggtggaagaaagggagattgaagaaaccgagagcatcgaaaatcccctggacttgctcgctcagatcattctttcattctgcgccgaaagggattggaacgaagatgagcttttccggataatccgtggatttttcgtttaccgtaatttgtccagagaaggctatgacggagttgtgcgaatgctttcaggcagttacgaggacacacggcttagggagctcaagcggcgtttgtttcgcgatgaccagacaaagatcctgagcgctgcgcccggccttcttccccttttgtatacatccagcggcgttattaccagccgcggccactactccctgcggattgccccgggaaccgaaggggcgggaaccaaaatcggagagctggacgaggagtttgtctgggagcgccgtctgggggacatttttgatttcggaaaccgctcctggaggatcaccgctataggaagcgaagcggtggaggtaattccacttccaactggagcggactacgctccattctggacaggcgagggcatttaccgcagcccggttctttccctgcgtatcctggaaatactggatgggtactaccccaaaagctggacttcataa

SEQ ID NO: 27386 - protein, 518 aa, Unknown
  Obtained from environmental sample
  DOMAIN (215)...(290): Helicase conserved C-terminal domain
  misc_feature (1)..(518): Xaa is any amino acid
MLLPLAGIQKRFEEAGEEFPPIKVDTRSGDTPQAERRRFLSMPPSILALTPESLGIILLNPRGRQILSSVRCVILDEIHAALGSKRGCYLSCQVDRLSLVAGNFQRIALSATVKPPEAAANLVGKKIHIVSPEGKKEIQFRVIFPESEGKPYSGEAGVERYGKRYTELIKFILGKIRSNDKKNDKKAAILVFTDSRRRAERISFLLNHAAENEAEFSGRSVAYCHHGSLSKEVRREVEVALASGEISCVVATGSLELGIDIGNVDEVILAGSPISAAVALQRVGRSGHTVGAASRGWLFPFHGIDLLQAAALSGAVEEREIEETESIENPLDLLAQIILSFCAERDWNEDELFRIIRGFFVYRNLSREGYDGVVRMLSGSYEDTRLRELKRRLFRDDQTKILSAAPGLLPLLYTSSGVITSRGHYSLRIAPGTEGAGTKIGELDEEFVWERRLGDIFDFGNRSWRITAIGSEAVEVIPLPTGADYAPFWTGEGIYRSPVLSLRILEILDGYYPKSWTS

SEQ ID NO: 27387 - DNA, 1086 bp, Unknown
  Obtained from environmental sample
  misc_feature (1)..(1086): n is a, c, g, or t
ttggagcaaattgcggttgtgaatccagatttgataatttcagactacaaaatgcccggaatgactgggctggatttgctgaaagctgtgaaaaaggaaagaccttcgcaaccatttttgatgatgaccgcatttggttccattgaaatggcagtggaagctctgcaaaacggcgcagaccattttatagaaaaaaaagattttgaacacgcagaaataatagaacacgctgttgctatggtgcttgaaaaatacaagtacagaatggaaaataccgttttgaaaaaacgcctttgcgaaaaaaatttcattggacatagcgaaaaatttgtggcactaaataaatttgtggaaaccgttgcacccacaaacgcttcggttttaataacgggagaatctggggttggaaaagaggttttggctcgcgccttgcattaccaaagtttgagagctggctgtccgtttatcaaaataaattgtgctgcattgccggaatctttaatagagagcgaactctttgggcacgaaaagggagccttcacaggagccttgaaaactagacggggcaaatttgagcttgcagatagcggtacccttttgctagacgaaataggcgaaatgccacttgccgcacaaagcaagctactacgtgttttgcaagaacgcacagttgtacgaattggcggagacgatgagataaaagttgatgtccgcataatttgcaccaccaatagggatttgaaaaaagaagtggaaaatggaaatttcagagaagatttatattatcgtttgagcgttgtgcctgtgcatattccaccactcagagaacgcacagatgatattcctgatttgctgaattattttattggcaaattcaacgaagaaaacggtcgcgctgtggaagaggcaagtgaagaaactgtgtctatgcttcaagagcaaatgtggcccggcaatattcgccagttggaaaatgccgttgcgagggctatggtattctgtaaaggtacagttctaactccagaattttttgaaattgaaggcggaaaaaacgtgtctgctggcaaaacaaaaaagaaggcataa

SEQ ID NO: 27388 - protein, 361 aa, Unknown
  Obtained from environmental sample
  DOMAIN (126)...(266): ATPase family associated with various cellular activities (AAA)
  misc_feature (1)..(361): Xaa is any amino acid
MEQIAVVNPDLIISDYKMPGMTGLDLLKAVKKERPSQPFLMMTAFGSIEMAVEALQNGADHFIEKKDFEHAEIIEHAVAMVLEKYKYRMENTVLKKRLCEKNFIGHSEKFVALNKFVETVAPTNASVLITGESGVGKEVLARALHYQSLRAGCPFIKINCAALPESLIESELFGHEKGAFTGALKTRRGKFELADSGTLLLDEIGEMPLAAQSKLLRVLQERTVVRIGGDDEIKVDVRIICTTNRDLKKEVENGNFREDLYYRLSVVPVHIPPLRERTDDIPDLLNYFIGKFNEENGRAVEEASEETVSMLQEQMWPGNIRQLENAVARAMVFCKGTVLTPEFFEIEGGKNVSAGKTKKKA

SEQ ID NO: 27389 - DNA, 765 bp, Unknown
  Obtained from environmental sample
  misc_feature (1)..(765): n is a, c, g, or t
ttgaaaaaagaattcatcagccataataatctgtttggcgaaaaagcaaaaactgatgaaatcgaagatgctttatattatttacttaaaatcggtgcgatgaaaatagatggtggttttttggtaatttataatacaatgaggattgaacggctggagatggataacagggcgcaatataaaagagaacattacgcgcagctcgaagaatattataaaaataaaaggcagcaaattcatattgtaggcgaatacgcaaaccgtatgatcaatgactatgatgaagcgatgacctttgtgagtgattactttgaaatagattacgaaaaatttttgaataaatatttcaaaggtagaagtaatgagattgacagaaatatttcatcaaaaaaatttaatcaattattcggagagttatcatcagcgcaattagaaattatcaaagatcaggattctaaatatatcgttgtggcggcaggtcccggcagcggcaaaacaaaattgctcacccacaagttggcgtcgctttatatgatggaagatgtgaagcacgagcagatgcttatgcttacattttcccgggcggcggctacggagtttaaaaaacgcttgattacattaattggcaacgccgctcattttattcaaattatgacctttcattcttattgttttgatcttctcgggaaagttggtaatttagaaaaatcagatgaaattatcaagcatacagttgaaaaattaataccagagaagtggagctaa

SEQ ID NO: 27390 - protein, 254 aa, Unknown
  Obtained from environmental sample
  misc_feature (1)..(254): Xaa is any amino acid
MKKEFISHNNLFGEKAKTDEIEDALYYLLKIGAMKIDGGFLVIYNTMRIERLEMDNRAQYKREHYAQLEEYYKNKRQQIHIVGEYANRMINDYDEAMTFVSDYFEIDYEKFLNKYFKGRSNEIDRNISSKKFNQLFGELSSAQLEIIKDQDSKYIVVAAGPGSGKTKLLTHKLASLYMMEDVKHEQMLMLTFSRAAATEFKKRLITLIGNAAHFIQIMTFHSYCFDLLGKVGNLEKSDEIIKHTVEKLIPEKWS

SEQ ID NO: 27391 - DNA, 801 bp, Unknown
  Obtained from environmental sample
  misc_feature (1)..(801): n is a, c, g, or t
ttgtgtatggggacacacaaaacctatgaaaccaatgcttatgccaggacgctggacacgaatgtcgtgagggcgtttgaggaaggcggacggcgctgcgttgtcctggaagactccattctgtacccagagggcggggggcagcccagcgatcgcgggcgcataggcagtgcaaatgtgctggacgtcgtccacgggcgcgtcagggacatggacatgcacatagtggatcgcgccttggagccaggccctgttaccgtgcggttggactggggtcgccgctttgatcacatgcaacagcacacgggccagcatctcctgacggcggtggcccatggcaggttcggctgggtcacgaccgcgttccaccttggccccgaactctgcgacatagaactggacacgccgcaaattacgccacagcagcgccatgatctggaagaagccgtaatgggcgaaatcatagccgccagaagcgtcacggtgtcgtgggtgagccaagatgagtacaaaaccctcaacgtgcgctccaggggtctgcctggggggcatgagggcgacatccgcttggttgagataaagggcttggatgtgaatacgtgcggcggcacacatttggtctcaacgtcggagctggagtgcgtgaagttggtcggagcggagcaggcgccaggcgggacacgcttgctcttcatttttggcaaaagaggtgcgcaaccgcctagaggcgcacgagcagcgcagccatgcgcttcggacaattttggggcgcccggacgatgggctggtggcggccgttga

SEQ ID NO: 27392 - protein, 266 aa, Unknown
  Obtained from environmental sample
  DOMAIN (188)...(230): Threonyl and Alanyl tRNA synthetase second additional domain
  misc_feature (1)..(266): Xaa is any amino acid
MCMGTHKTYETNAYARTLDTNVVRAFEEGGRRCVVLEDSILYPEGGGQPSDRGRIGSANVLDVVHGRVRDMDMHIVDRALEPGPVTVRLDWGRRFDHMQQHTGQHLLTAVAHGRFGWVTTAFHLGPELCDIELDTPQITPQQRHDLEEAVMGEIIAARSVTVSWVSQDEYKTLNVRSRGLPGGHEGDIRLVEIKGLDVNTCGGTHLVSTSELECVKLVGAEQAPGGTRLLFIFGKRGAQPPRGARAAQPCASDNFGAPGRWAGGGR

SEQ ID NO: 27393 - DNA, 894 bp, Unknown
  Obtained from environmental sample
  misc_feature (1)..(894): n is a, c, g, or t
atggccgagtcccctcgcacgggcatcaaggagcggcattgggtggctcctggcgaggcatcttccgatttgggggccaaggccttgaagatggccttggagagacgcggcatagggcccagcgacttggacgcgatcatagtctgcaccgtcacgcccgacatgatgttccccagcactgccgcgctgatacagcacaagattggcgcggagggcgtttacgggtacgacatgaatgcggcctgctccagctttttgtttgggctgacctctgcggcctcgctcgttgcgagcggcgcggtaaagcgggttgcgcttgtgggctgcgacgtgatgtcgtccatagccgacaaaagcgacaggaacacggtggtcctgtttggcgacggcgccggggcggtgatagtcgagcaagtcgaagatggcttgggcattttggactttgagcactacctcgacggcactggggcgcacttgctctacatgaaggggggcgggtcgctgcacccgaccacgcacgagaccgttgacaagaaaatgcactacatctatcaaaatgggcaggaagtgttcaaacacgcggtgaagggcatggcagacatcagccggctgatgatagaccgcaacgggattgaccccgcagacctcaaactgttcgtcgcgcaccaggccaacatcaggatcatcgaagccgctgccaagcgcctagcgctgcccgccgagcgcgtggcgctgaacatcacgcacttcgccaacaccacctcagcgaccatcccgaccgcactgcaccagtcccttgaaaagggccttctcaaaaaaggcgagctgaccatattcgcggcgttcggcgcggggttcacctgtggcgcgacgctgatccggtgggcgtactga

SEQ ID NO: 27394 - protein, 297 aa, Unknown
  Obtained from environmental sample
  DOMAIN (76)...(154): 3-Oxoacyl-[acyl-carrier-protein (ACP)] synthase III
  misc_feature (1)..(297): Xaa is any amino acid
MAESPRTGIKERHWVAPGEASSDLGAKALKMALERRGIGPSDLDAIIVCTVTPDMMFPSTAALIQHKIGAEGVYGYDMNAACSSFLFGLTSAASLVASGAVKRVALVGCDVMSSIADKSDRNTVVLFGDGAGAVIVEQVEDGLGILDFEHYLDGTGAHLLYMKGGGSLHPTTHETVDKKMHYIYQNGQEVFKHAVKGMADISRLMIDRNGIDPADLKLFVAHQANIRIIEAAAKRLALPAERVALNITHFANTTSATIPTALHQSLEKGLLKKGELTIFAAFGAGFTCGATLIRWAY

SEQ ID NO: 27395 - DNA, 579 bp, Unknown
  Obtained from environmental sample
  misc_feature (1)..(579): n is a, c, g, or t
atgaaaataaaaatctgcggcttgaaaaattctgttgatgtggattatgtgaacgaagccatgccagattatataggttttgtgtttgccgaaagcaagcggcgcataagcccacaactcgctgcggagtttaagaatgggttaaacccaaaaattaccgccgtcggtgtttttgtaaatacggaaatttcctcaatatcgcaattatataacgatggtgttataaatatagcgcagttgcacgggagcgaaaccgaagcctacataaacgaactcaaaaaaacttgcgatattcccgtgataaaagctatcaacgttgaaattagcccccctgccaatgcagactacctgctctttgacaacggcaaaggcgggagcggcgaaagctttgactggaacttaatcccaaaatgcaacaaagattattttttggcaggcggaataaatttggacaacatcaagaaagctatgaaattaaaaccctacggcatagacctgagcagcggtactgaaacaaacggcaaaaaagatagggaaaaaataatccagcttgtgcaaattgcaagggaggaaagatga

SEQ ID NO: 27396 - protein, 192 aa, Unknown
  Obtained from environmental sample
  DOMAIN (3)...(187): N-(5'phosphoribosyl)anthranilate (PRA) isomerase
  misc_feature (1)..(192): Xaa is any amino acid
MKIKICGLKNSVDVDYVNEAMPDYIGFVFAESKRRISPQLAAEFKNGLNPKITAVGVFVNTEISSISQLYNDGVINIAQLHGSETEAYINELKKTCDIPVIKAINVEISPPANADYLLFDNGKGGSGESFDWNLIPKCNKDYFLAGGINLDNIKKAMKLKPYGIDLSSGTETNGKKDREKIIQLVQIAREER

SEQ ID NO: 27397 - DNA, 597 bp, Unknown
  Obtained from environmental sample
  misc_feature (1)..(597): n is a, c, g, or t
atgataaatattacctgcgaagactgcatggatttgatggcgcgctatcccgacaaacactttgacctggctatagtcgatcccccttacggcattggcgaggaatggaagaaaaggaattggcggaaatacaaaggccacggctttgtcgagacttcatataagaataacaagacgcctacaaaagaatactttgacgaattgttccgcgtctcaaatgaacaaattatttttggctataattactttgtagagtttcttggaccgaccaattatttaattatctgggataagcttggcagcaataattgctctatttgttattccaaagctgaaatagcatatacgtctatccatatacctgtttttgtattccatgttctttgggacggatttcgcatgagcaaagagaccggggaacgcaagatacacccgcaccagaagcctgtagagctttatgtaaaaattttattaaagtacgcggcgccgtcatggtctatccttgatacccacatgggttcgggctcctcggtaattgcctgccacaggcttgggcttgaagtaaccgcctgcgaaatcgatccgtattacttttag

SEQ ID NO: 27398 - protein, 198 aa, Unknown
  Obtained from environmental sample
  DOMAIN (21)...(198): DNA methylase
  misc_feature (1)..(198): Xaa is any amino acid
MINITCEDCMDLMARYPDKHFDLAIVDPPYGIGEEWKKRNWRKYKGHGFVETSYKNNKTPTKEYFDELFRVSNEQIIFGYNYFVEFLGPTNYLIIWDKLGSNNCSICYSKAEIAYTSIHIPVFVFHVLWDGFRMSKETGERKIHPHQKPVELYVKILLKYAAPSWSILDTHMGSGSSVIACHRLGLEVTACEIDPYYF

SEQ ID NO: 27399 - DNA, 708 bp, Unknown
  Obtained from environmental sample
  misc_feature (1)..(708): n is a, c, g, or t
atgttacgttacggaatcccctcctatcgcttaccacgtgaaacccttgatgaagaaataaatatcattaaatcacttggcgtggaatttatttacaacaaggaattcggcaaagatattaccgtaagtagtttacgcgccgcaggattcagcgctattcttttggcgattggttcgcaaaaaggatacccgttaggtgttgacggcgagaaagactgcccccatgtattaattggcgttgatttcctcggctctgttacaaggggcaaacagcccgactttaacggtaaaaaaatcgccgttgtcggcggcggtaacacagcgatggactgcgtaagaacagccattcgtcttggcgcggaaaatgtcaaacttatttaccgtaggacaatcgccgaaatgcccgccgatgaagcggaaattgaagaagcccaattggaaggcattgaatttttagtattaaataatccgttaagcgtttcagagagcggcggtaaggtgacaatgaaacttaccaaaatggaacttggcgaaagcgacgcgtctggcagaagatcgccgcgccctgtcgccggatcggaatacaatatcgaagttgattatgtaatttctgccatcggacaaactcaggatttatcttttattaatagcgaatgtaatgtttccactaaccgcgattgtctggttatgacaaaaatacaagcatga

SEQ ID NO: 27400 - protein, 235 aa, Unknown
  Obtained from environmental sample
  DOMAIN (98)...(207): Pyridine nucleotide-disulphide oxidoreductase
  misc_feature (1)..(235): Xaa is any amino acid
MLRYGIPSYRLPRETLDEEINIIKSLGVEFIYNKEFGKDITVSSLRAAGFSAILLAIGSQKGYPLGVDGEKDCPHVLIGVDFLGSVTRGKQPDFNGKKIAVVGGGNTAMDCVRTAIRLGAENVKLIYRRTIAEMPADEAEIEEAQLEGIEFLVLNNPLSVSESGGKVTMKLTKMELGESDASGRRSPRPVAGSEYNIEVDYVISAIGQTQDLSFINSECNVSTNRDCLVMTKIQA

SEQ ID NO: 27401 - DNA, 618 bp, Unknown
  Obtained from environmental sample
  misc_feature (1)..(618): n is a, c, g, or t
atggaaataccaacaaaaagtaaaccagaccctgatacctacaggatcatttttacgttttccaagcagggaagcgctgtttttcaccctcatctggggcttcttgaaattttatatatgacctttttaagggcagacattcctatcatttatactcagggattcaatcccctgccaaaactggaaattgcttcgccactttctttgggcattaaggccggggccgaagtagcctccattgatacggaagggtacttttccgctgaacaatttaaaaagaaaattaatgaattttttcctgagggattacaggttgttgaagcgatgaatgtttttattccgtcgggcgggaaaaaacattcgctatcgtcccttttatggggttatgtgtatacaggaaaagacaatgaaaaggaaattgtcgaagtgaaagaagaaaagtcctaccgtatcaatagaagtgcctctgacggaagtatatatagcctggaaaggctttcgctgcttgcgagcttaaatggaacgaaggaaaagtcaatcggcgtctcttactttgaagtttaccgagcactttaccctgaaaccggagaaggcagacaactcaaaaaatttgaatag

SEQ ID NO: 27402 - protein, 205 aa, Unknown
  Obtained from environmental sample
  misc_feature (1)..(205): Xaa is any amino acid
MEIPTKSKPDPDTYRIIFTFSKQGSAVFHPHLGLLEILYMTFLRADIPIIYTQGFNPLPKLEIASPLSLGIKAGAEVASIDTEGYFSAEQFKKKINEFFPEGLQVVEAMNVFIPSGGKKHSLSSLLWGYVYTGKDNEKEIVEVKEEKSYRINRSASDGSIYSLERLSLLASLNGTKEKSIGVSYFEVYRALYPETGEGRQLKKFE

SEQ ID NO: 27403 - DNA, 870 bp, Unknown
  Obtained from environmental sample
  misc_feature (1)..(870): n is a, c, g, or t
ttgccgctttacggtctggacacggggatacgccttggagatgttgatttattgatgttcacccttggctacgagcttttaattaccggccttttaaccatgcttgatgtatcaggcattccccttcgccgccgcgatcgcggctgggatgacccactggtcattatgggggggccttgcgtttcaaacccgctgccttatgcggattttatcgacgctttctggataggcgaggcggaaggcggcttttttgagcttgcttctgacctgcgcgacataaaaaaaaccggcggcaaaagagacgacctgttgaataagctcgtcacgcacccgtctgtctgggcaagcgggaagggcaaagccgtaagggcagtggacagcagtttttccgaccggccggccagccatgcggttttccctatacccagcatgaaggtagttcaccatcacggggcggttgaaattatgcggggctgcccaaacggctgccgcttttgccatgcgggctattggtacaggcccgcccgccagaaagatgccaatctggttgaagaagaagccggctttttagtcaaaggcggcggctacagggaaataacgctttcttccctttcatcggctaattatcagtaccttgaagacctattggatcatcttaacgcaaaatacagcccccatcatgtttcttttcagcttccttccttacgggtatcaagtttttcgcttaacctgttggaaaaaatctctatggtaaggaaaagcgggcttaccttcgcagttgagacgccatccgatttttggcaaatggcaattaacaacaggtgtcgggagaaacggtgtttcattttgcggaggcaaaaagctggctga

SEQ ID NO: 27404 - protein, 289 aa, Unknown
  Obtained from environmental sample
  misc_feature (1)..(289): Xaa is any amino acid
MPLYGLDTGIRLGDVDLLMFTLGYELLITGLLTMLDVSGIPLRRRDRGWDDPLVIMGGPCVSNPLPYADFIDAFWIGEAEGGFFELASDLRDIKKTGGKRDDLLNKLVTHPSVWASGKGKAVRAVDSSFSDRPASHAVFPIPSMKVVHHHGAVEIMRGCPNGCRFCHAGYWYRPARQKDANLVEEEAGFLVKGGGYREITLSSLSSANYQYLEDLLDHLNAKYSPHHVSFQLPSLRVSSFSLNLLEKISMVRKSGLTFAVETPSDFWQMAINNRCREKRCFILRRQKAG

SEQ ID NO: 27405 - DNA, 885 bp, Unknown
  Obtained from environmental sample
  misc_feature (1)..(885): n is a, c, g, or t
atgcgcgaactgtcagtgcagtccgcgaacgacaccaacacggacgccgaccgggcggaactgcaagctgaagtcacgcagctgcggtacgagattgaccggattgcgaacaccacggagttcaacactcggaagctgttggaaggtagcgccaagggcgtggccgacgaggtgcagggaacggcgcggtacaataataactctaggataacaatcgactccataaagagcaaagccatgatggaggccgtgagtaacgacaagagctgggcgttcgacggagcttatatgctcataaagaccaaccagacgtttaacagcggagaacctgtctatgatcccagcgactataagttggtcgggccggacgggactatctacaacttcagggcgatgagcgccgatacgaagatcaaagccagcgaattggaagccggtaccatattggcggacggcggggcggtatcgttgattgaaaataaaggatccaaactgagctcggttctcggaaccgctcctatagtcttaggcgaagctatcggcgatcacgagcttgattttgtcggcaagggcagcattcttgcctccggctctaatttcacgatgaaggccctgagcggataccaaatcgctctcaatgccgacacaggcgttaagtctatagaatacgatagcgagggtgtgctgaaactaaatctcctcacccccggtacaagccctgtcaaagtcgaagtaggcaaaagcgtaaggctcgacgacggcacggttatcaagaacaacggagggggtaatgtcagcgtggagaacggcagtctcgagattaacacagactttaagaaaggggataacgtatacaattactatatcgccactcaaagcacctag

SEQ ID NO: 27406 - protein, 294 aa, Unknown
  Obtained from environmental sample
  DOMAIN (1)...(78): Bacterial flagellin N-terminus
  misc_feature (1)..(294): Xaa is any amino acid
MRELSVQSANDTNTDADRAELQAEVTQLRYEIDRIANTTEFNTRKLLEGSAKGVADEVQGTARYNNNSRITIDSIKSKAMMEAVSNDKSWAFDGAYMLIKTNQTFNSGEPVYDPSDYKLVGPDGTIYNFRAMSADTKIKASELEAGTILADGGAVSLIENKGSKLSSVLGTAPIVLGEAIGDHELDFVGKGSILASGSNFTMKALSGYQIALNADTGVKSIEYDSEGVLKLNLLTPGTSPVKVEVGKSVRLDDGTVIKNNGGGNVSVENGSLEINTDFKKGDNVYNYYIATQST

SEQ ID NO: 27407 - DNA, 1446 bp, Unknown
  Obtained from environmental sample
  misc_feature (1)..(1446): n is a, c, g, or t
gtgatacaagggtcgaggccttcctggacattatcgacgggtaccgcgccaaaaaaaagcgaactggaagcggagcgcttcgataacggctggaagtttgtttatgatccggcagcagctttgccggaagatcagctcaggcttgacaatctcaaaagcggcgagaaggtaaggatacgcggcaacaagcgggtcaaggttttattatcgaacatgggcgcaatttccaccgagtacatgggagccgccgtgaggagcttcgggataaacgccgaagcgctgcctgtggcaaccggaaaaaccatacagatagcccgctcacacgcttcaggcaaagagtgcgtgcccagccacctggtacttggaagcgcgcttcaatttttctggagcgagaagtaccgcaaggatgagctttaccttctctttgtgccgattacaaccggcccgtgcagaacaggccagtattacattttctacgaaaacctctttagggatctgcggttagaaaacgtggtggtttttatcctttcggcggacaattcctacaacgaacttgggccgggcttcgcgcgggaaatgtggaagggcctggtgctttctgattatctaaaagatattcaaaacgcgcttttgacagttgccgaggatcccgtttcggcggccgtggtgtttgaaaagtcctggcgtaaggtaatgcacacggttgaacacaagcccaaagacctctggaaggaacttgaaaacgtagcgagggatgtaaagaagataccgctaaaaaagaaagtagccgattgccccaaggtgcttgtcgttggggagatctacgtccgccgggacgactttgccgtgggggaactcaccgagctaatgagcgagaggggcatcgtggttaaagtggcgggtatttccgaatggatacattatctggactttgtgcgggaatacgccctcaataaactgctcaagctccgaaagccgggaaggcgtcttttttccaagccctggcgggatttgaaattattgggaatcgaggaatggtggaaacactcgatagaaaaaaaagtcctaaaaattcttggtcccacaggactcattccggaaacgccccacgatatgcgcgagataatgaaatacacccaggagcattttgtaaacctggagctaaactcggagatagcggtttcttccggttccgctgccgccgccatggaggcaggctattcgggtattgtgaacatcagcccctttgcctgcctcataggccgggtcatcgaagggctctttactccctgggcaagagagcgcaactacccgattctctcggtggaagtcgatggaaacctgctgcccccgaacatcgttaataagctcaacatcttcatggtgaacgtgttgcgctttaaggggagcgacgatctttcgggtctggtggacacgccgcaatga

SEQ ID NO: 27408 - protein, 481 aa, Unknown
  Obtained from environmental sample
  misc_feature (1)..(481): Xaa is any amino acid
MIQGSRPSWTLSTGTAPKKSELEAERFDNGWKFVYDPAAALPEDQLRLDNLKSGEKVRIRGNKRVKVLLSNMGAISTEYMGAAVRSFGINAEALPVATGKTIQIARSHASGKECVPSHLVLGSALQFFWSEKYRKDELYLLFVPITTGPCRTGQYYIFYENLFRDLRLENVVVFILSADNSYNELGPGFAREMWKGLVLSDYLKDIQNALLTVAEDPVSAAVVFEKSWRKVMHTVEHKPKDLWKELENVARDVKKIPLKKKVADCPKVLVVGEIYVRRDDFAVGELTELMSERGIVVKVAGISEWIHYLDFVREYALNKLLKLRKPGRRLFSKPWRDLKLLGIEEWWKHSIEKKVLKILGPTGLIPETPHDMREIMKYTQEHFVNLELNSEIAVSSGSAAAAMEAGYSGIVNISPFACLIGRVIEGLFTPWARERNYPILSVEVDGNLLPPNIVNKLNIFMVNVLRFKGSDDLSGLVDTPQ

SEQ ID NO: 27409 - DNA, 582 bp, Unknown
  Obtained from environmental sample
  misc_feature (1)..(582): n is a, c, g, or t
atggcaactacaacgaaagcaaaagtaatccctccgccgcccaccggcgaaggcctcactttcgaaaaagtatgggcgatgtttcaggaaatcgccgaacggcaaaaggaaactgatcggcaaatgaaggaaactgatcggcaaatgaaggaaaccgaccggcaaatgaaggaaaccgaccggaaaatggaggaaaccgaccggaaaatgggcgacttgtataatcgtttcggagaaatggcggagcatctggtggcccccagcattcacgaacgctttaacgagttgggttaccattttgacgctgttgcgcccggcggctacgttatccgtaacgaggaaaatgaagtcctggcggaggtggacatcctgctggaaaacggcgactacattatggcggtggaagtgaaggcgaaaccgcgcataaaagacattcagcatcatataaaacgcctggaaatactgaggcaacaccggaacaaactccgcgatacgcgcaaaatagcaaggcgcgatagcgggcgcgatatttggcagcagggaaaaacaggcggcgatggaggcgggattcttcgtgattga

SEQ ID NO: 27410 - protein, 193 aa, Unknown
  Obtained from environmental sample
  misc_feature (1)..(193): Xaa is any amino acid
MATTTKAKVIPPPPTGEGLTFEKVWAMFQEIAERQKETDRQMKETDRQMKETDRQMKETDRKMEETDRKMGDLYNRFGEMAEHLVAPSIHERFNELGYHFDAVAPGGYVIRNEENEVLAEVDILLENGDYIMAVEVKAKPRIKDIQHHIKRLEILRQHRNKLRDTRKIARRDSGRDIWQQGKTGGDGGGILRD

SEQ ID NO: 27411 - DNA, 1320 bp, Unknown
  Obtained from environmental sample
  misc_feature (1)..(1320): n is a, c, g, or t
ttgatggccgagaaaacgaggaatgggctttactattcttcgcaccgtattcctttccgcgagcgcttggagggcgataccgacccgagcaacaatgacggttttgtcgtaagaaaaaatgacaatacctacgattacacgataaaccctgacggtacaaaaacttttaatttaaattggaacagctgggatatttcaagcacaaaaaatcttattgagcgaataaaatcccttggcgccggcggaccggaaaaattaacaataataagcgcgccctggacaacgccgaataatcgcataacgcgatggaaagaagacattacaggcgttaacgcaagaataaattatgtaatgaactggtcattgcccgacagatggggaagattacgccgcgacaaatacgacgattacgccgatcttcttgccgactatgtgaaaaactttgaatcaaaaatgggcgctcccctttctattctttccgtacaaaatgaaccaaactggaaagccgattgggaaacaacttactggaacggcgcggacttacgcgactttatcgtaacaatatccaaacgcttccccatgaaaggcgttattgcgggcagcggcggcattaacattatgatgccggaatttgagaattttaatatcaattttaatgagatgataaagccgtctctcgataatccggaatccgagaaaattattacgcatattgcgttacatcagtacaacggaaccaacgattcgtcctcaagggcgggatcaatggaattcccggagattacagcgtcagggaagcgtttctggcagacggaagtttccggatcgggttccgctcttcccaaaggatcgggaattcataacgcgcttttttacgcaaggatgattcattgggacatgactctggcgcagacaaacgccttcctttactggtggctttggacaaacaactccgccgaggatttttcaggcgcgctcataaaagcttacgatgacgaaatagttacttctaaacgtctttacgcgatggggcaatattcgcgttttatccgtcccgggtggcaaagaattgactgcgacgcgtcccccagaggcggcatttattcaagcgcgtataaaaacccgaatacaaaagaaatagcgatagtaataataaatgaaaccattactcatttttccgttattttggatttaaccggagcggaatacgagcagcttgaaatatggcgcacatcggaaaaagaagactttaaaaaaacaggtaaacagcagacatcacgtaacacccgcggaagtaattctagcttccaatgtccataa

SEQ ID NO: 27412 - protein, 439 aa, Unknown
  Obtained from environmental sample
  misc_feature (1)..(439): Xaa is any amino acid
MMAEKTRNGLYYSSHRIPFRERLEGDTDPSNNDGFVVRKNDNTYDYTINPDGTKTFNLNWNSWDISSTKNLIERIKSLGAGGPEKLTIISAPWTTPNNRITRWKEDITGVNARINYVMNWSLPDRWGRLRRDKYDDYADLLADYVKNFESKMGAPLSILSVQNEPNWKADWETTYWNGADLRDFIVTISKRFPMKGVIAGSGGINIMMPEFENFNINFNEMIKPSLDNPESEKIITHIALHQYNGTNDSSSRAGSMEFPEITASGKRFWQTEVSGSGSALPKGSGIHNALFYARMIHWDMTLAQTNAFLYWWLWTNNSAEDFSGALIKAYDDEIVTSKRLYAMGQYSRFIRPGWQRIDCDASPRGGIYSSAYKNPNTKEIAIVIINETITHFSVILDLTGAEYEQLEIWRTSEKEDFKKTGKQQTSRNTRGSNSSFQCP

SEQ ID NO: 27413 - DNA, 1440 bp, Unknown
  Obtained from environmental sample
  misc_feature (1)..(1440): n is a, c, g, or t
atgacagattggccgagccccttgggttgccaaagcagccgcgtagaacagcaggcccgagtcataatcccccggagtcttagggccaatccgggagaaattgacaatcctgccgagtacctggcgcgcgaggacagtctgtattccaaagtgccgcttgaggacggagaggtgcttgttaccgttttgtcgggtctatttgacggcggccccgtggaaaagcaatttgttgcttacagaaaccttctcgaaatcgacagccccatatacgttactttcattgactataacgaagcaagccgaagctacgagcgtatctggagcgctcaaaccgctgcaacacgacccggaacagtcagcctttccacgcaggaccttatcggagacaaaagcctctgtgtgctgcttgccggcatgaacgctcaggatcagcatacgctgaccattttcaggaaaactcccatggggcagagatcgtcagaaggtgagcttttccgaaagatcgccgaattcagcattgaaggaactatcaccgtaaaggaaaccgagcgcggcgtttcataccaaagcggacaaggcataggcccaagtttcaccatttccgccaatggaagggattatggatcatccaatattctggatcaggttgaagttacatatacctacaatgccggtgccggtgtctacgaacagacaaagtcagtccgcatccccggcagtcaggtggaacagcgccgtgtaagggaagttcttggcagccgtctggcttttgaggaatttataacaggcatgtggtaccacataaatccccagggaaagatagataaaaatcaatacatttattttagcccttcctcgcaggaaattattttttacagcgatgaaattttacaggtttttaactggacaaattcaatcgccacccgatacggtttgtatgtcgcaagccagaatatctccgttactactttaaagcgtacaatcgacatcgagcttgaatcccttgagagtatacgcgtacgggtccaggaggatgtgcgcctgaaaatcggcgtaaacaacacctgggacggctcatacttcaaggctcctccacccgaaaaccgcagttctcctccgccaataaaggcccacttcgatgcctggtacgaaggcccaataggaaaaatacattttctttcaaacggctcttatgaattaaccagcggaaacaactttaggcagggaaaatacgctttcttttatttttccgatcaggaattgcttgaactcaatcctgaaaacaatcgttcttccggcagggaaatctaccttgttgaaggtgaagtgacagaaccccaaatgagaaagaatctttctctttcgcgcgtcaggctaggctcaaacggtatagaaaggctgcatgagcgtgcgataaccttaactctcgcctctgagtaa

SEQ ID NO: 27414 - protein, 479 aa, Unknown
  Obtained from environmental sample
  misc_feature (1)..(479): Xaa is any amino acid
MTDWPSPLGCQSSRVEQQARVIIPRSLRANPGEIDNPAEYLAREDSLYSKVPLEDGEVLVTVLSGLFDGGPVEKQFVAYRNLLEIDSPIYVTFIDYNEASRSYERIWSAQTAATRPGTVSLSTQDLIGDKSLCVLLAGMNAQDQHTLTIFRKTPMGQRSSEGELFRKIAEFSIEGTITVKETERGVSYQSGQGIGPSFTISANGRDYGSSNILDQVEVTYTYNAGAGVYEQTKSVRIPGSQVEQRRVREVLGSRLAFEEFITGMWYHINPQGKIDKNQYIYFSPSSQEIIFYSDEILQVFNWTNSIATRYGLYVASQNISVTTLKRTIDIELESLESIRVRVQEDVRLKIGVNNTWDGSYFKAPPPENRSSPPPIKAHFDAWYEGPIGKIHFLSNGSYELTSGNNFRQGKYAFFYFSDQELLELNPENNRSSGREIYLVEGEVTEPQMRKNLSLSRVRLGSNGIERLHERAITLTLASE

SEQ ID NO: 27415 - DNA, 1302 bp, Unknown
  Obtained from environmental sample
  misc_feature (1)..(1302): n is a, c, g, or t
ttgttcggttcaaaaccgcccaaagggcaggagcttgaggatcattatttcggcgctatcaaaccgcgcgtatccgctttcatgaaagagcttgacgaagaactttggaagctcggcgtaaacgcgaaaacgaagcataacgaagtcgcgccggcacagcacgagcttgcgccgattttctcaacgacaaatatcgccacagaccacaatcagttgacaatggaactgatgaaatctatcgctaacaagcacggacttgtttgtctgcttcacgaaaaaccgttcgccggtgttaacggaagcggtaaacacaacaactggtcaatcagcaccgacacgggcgttaacctgcttgagccgggcgatacgccgaatgataacgcgcagttccttttgttcttggtagcggttatcaaagctatagacgtgtatcaagaccttctgcgcgtatccgtagcgagcgcgggaaacgatcacagactcggcgcgaatgaagcgccccccgctatcgtgtccatgttcctcggcgaagaattaaccgaaattatcgaagctattgaatcaggcaagggttataaaaacaaagagaaacttgatatggaaatcggcgtatctgtcttgccgcatttcccaaaagacacaacagaccgcaaccgcacatcgcccttcgcgtttaccggaaacaagtttgagttccgtatgctcggctcggcgttctcaatcggcggaccgaacatcgtattaaatactattgtcgccgaaaccttaagtcaatttgcggattcccttgaaaaatccaagaactttaagggagaccttgcggcgttgatcaaaaaaacaatcagcgaacacaagaggatcgtttttaacggcaacaactatgcggaagaatgggtagtcgaggcgcagaagcgcggattgtccaacttgaaaaccactgttgaggctcttcccgaatttgtttccaaaaagagcatagagttatttaccaaacaccatgtctttaccgaagtagagcttcactcgcgctatgaaatacttatggaatcatattgcaaaactattcatattgaagcgcttactatggttgatatggtcaagggagatattttccccgccagcgtaagctaccaaaacgaattattagagcttctgcagagaaagaaagcgttgggttattatgactcttcgctggaggaaaatttgataactaatatttcaaaactttccgccagtctgcttaacaaattatcggcgcttgaaaaagtattttggagaccaaagagaacgcagtatcgctga

SEQ ID NO: 27416 - protein, 433 aa, Unknown
  Obtained from environmental sample
  DOMAIN (1)...(237): Glutamine synthetase, catalytic domain
  misc_feature (1)..(433): Xaa is any amino acid
MFGSKPPKGQELEDHYFGAIKPRVSAFMKELDEELWKLGVNAKTKHNEVAPAQHELAPIFSTTNIATDHNQLTMELMKSIANKHGLVCLLHEKPFAGVNGSGKHNNWSISTDTGVNLLEPGDTPNDNAQFLLFLVAVIKAIDVYQDLLRVSVASAGNDHRLGANEAPPAIVSMFLGEELTEIIEAIESGKGYKNKEKLDMEIGVSVLPHFPKDTTDRNRTSPFAFTGNKFEFRMLGSAFSIGGPNIVLNTIVAETLSQFADSLEKSKNFKGDLAALIKKTISEHKRIVFNGNNYAEEWVVEAQKRGLSNLKTTVEALPEFVSKKSIELFTKHHVFTEVELHSRYEILMESYCKTIHIEALTMVDMVKGDIFPASVSYQNELLELLQRKKALGYYDSSLEENLITNISKLSASLLNKLSALEKVFWRPKRTQYR

SEQ ID NO: 27417 - DNA, 354 bp, Unknown
  Obtained from environmental sample
  misc_feature (1)..(354): n is a, c, g, or t
gtgggttcacggtttcaggttctgtttcactcccctcgccggggttcttttcgcctttccctcacggtacttctgctctatcggtcgtatctcgtatttagccttggatcgtggtcgacccggattccggcagggtttctcgtgccccgccgtactcaggaaccgccagggagacctcgccatttcgcgtacggggatttcaccctctctgtcaggctttcccaatgcctttccgctatgactcggttttctccaaactcccccctttcgggaaggcggccctacaaccccgccgtcgccggcggtttgggctcctccgatttcgctcgccgctactctcggaatctctgttga

SEQ ID NO: 27418 - protein, 117 aa, Unknown
  Obtained from environmental sample
  misc_feature (1)..(117): Xaa is any amino acid
MGSRFQVLFHSPRRGSFRLSLTVLLLYRSYLVFSLGSWSTRIPAGFLVPRRTQEPPGRPRHFAYGDFTLSVRLSQCLSAMTRFSPNSPLSGRRPYNPAVAGGLGSSDFARRYSRNLC

SEQ ID NO: 27419 - DNA, 375 bp, Unknown
  Obtained from environmental sample
  misc_feature (1)..(375): n is a, c, g, or t
ttgaccgccctgttaagactcggtttccctacggctccgggactcctatcccttagcctcgctgtacatcgcaactcgcaggctcattctacaaaaggcacgccatcacccgactgctcgggctttgacatgttgtgggttcacggtttcaggttctgtttcactcccctcgccggggttcttttcgcctttccctcacggtacttctgctctatcggtcgtatctcgtatttagccttggatcgtggtcgacccggattccggcagggtttctcgtgccccgccgtactcaggaaccgccagggagacctcgccatttcgcgtacggggatttcaccctctctgtcaggctttcccaatgcctttccgctatga

SEQ ID NO: 27420 - protein, 124 aa, Unknown
  Obtained from environmental sample
  SIGNAL (1)...(24)
  misc_feature (1)..(124): Xaa is any amino acid
MTALLRLGFPTAPGLLSLSLAVHRNSQAHSTKGTPSPDCSGFDMLWVHGFRFCFTPLAGVLFAFPSRYFCSIGRISYLALDRGRPGFRQGFSCPAVLRNRQGDLAISRTGISPSLSGFPNAFPL

SEQ ID NO: 27421 - DNA, 777 bp, Unknown
  Obtained from environmental sample
  misc_feature (1)..(777): n is a, c, g, or t
atgacaatggacgacgtattgttttcttttgaaagagcgaaagaccccgacggcggaacttatttttccgacttcttcagcgatgttgaaagttttacggttaacggctggcagttcattatcaaactccaaagtccgtcggcggtgtttaagtatgttcccgcgattggatcgggacggataatcagcaaggcttattatcagaagcacgagaaaaatttcggaaccgccgctggaggcattgtagctaccggtccctttgttttccataaatggacaagcggcagagaaataatattaaagaaaaactacaactactgggaaaaggaaagacaagcaagaaatattattgacacattggtttttaaaataatccctgaggacacaactcgtgtaatcgcccttcagacgggaagcgttgatttctgcgtcaatctgcctgaggatatgctggatcaactggcggcggataagaatttaaccttcaccatcatggactcttttaaacttacatatcttgcgcttaacacccaacgcgcccccatgaacgacgttaatgtacgcaaagcgatttcacgcgcgatgaacattcccgaatttcagaaaaacatcataaagaccgccggaacggctggaacaattctgcctttcggcaaggctctttacggcgagaataccgccaagtgggaggattatttaaagaaaactcagggctatacttacgatttagcagccgcaaaacacatctgggctagatcgcgtatccnaacgttttga

SEQ ID NO: 27422 - protein, 258 aa, Unknown
  Obtained from environmental sample
  DOMAIN (1)...(258): Bacterial extracellular solute-binding proteins, family 5 Middle
  misc_feature (1)..(258): Xaa is any amino acid
MTMDDVLFSFERAKDPDGGTYFSDFFSDVESFTVNGWQFIIKLQSPSAVFKYVPAIGSGRIISKAYYQKHEKNFGTAAGGIVATGPFVFHKWTSGREIILKKNYNYWEKERQARNIIDTLVFKIIPEDTTRVIALQTGSVDFCVNLPEDMLDQLAADKNLTFTIMDSFKLTYLALNTQRAPMNDVNVRKAISRAMNIPEFQKNIIKTAGTAGTILPFGKALYGENTAKWEDYLKKTQGYTYDLAAAKHIWARSRIXTF

SEQ ID NO: 27423 - DNA, 792 bp, Unknown
  Obtained from environmental sample
  misc_feature (1)..(792): n is a, c, g, or t
gtgatagtcggatacagttcacaaactccattatcggtaaatgttaccaatattggtaatgaagatactggtcttcttgatgtcaagctgactggagaaaataaagacagtttcacagtgttgccggaaaaaataaacaacatagcggctggtaagacttctacaggtgcttttaccgttgtaccaaaacccggtctttctgtcggcaattacactgccaccgtcactgtgtcgggtagccatgaaattaccgccagctttgatgtgagttttagagtaggcgacggtcctacctatagcatttctcttgacaagacaaactatacattcgatcccgatgagtttggttataccgtaaaaactccgctgacggtaactgttaccaacacaggtaatcaagcaacaggcgctctcaatgtcgtgttgaccggagatacaacagatttcatagtaacaggatcaccaataggctctatagcggctggcggtaaagaaacgtttactgtcggacctacatccggtcttctcgtcggcaatcacagcgcgacagttacagtgtctggaggcaacggaataactgccagcttaaatgtgagttttacggtaactgccgctcccacttacaatatcacccttcacaagacaggcgatacatcggctctagttagcccgtacaatttcacttccgcaacggatggttatggtgcacaaactgcgttgtcgatagatgtaaaaatacaggaaccggcgcaacaggcgagcttactgtacgtatcgggtcggccgatctga

SEQ ID NO: 27424 - protein, 263 aa, Unknown
  Obtained from environmental sample
  misc_feature (1)..(263): Xaa is any amino acid
MIVGYSSQTPLSVNVTNIGNEDTGLLDVKLTGENKDSFTVLPEKINNIAAGKTSTGAFTVVPKPGLSVGNYTATVTVSGSHEITASFDVSFRVGDGPTYSISLDKTNYTFDPDEFGYTVKTPLTVTVTNTGNQATGALNVVLTGDTTDFIVTGSPIGSIAAGGKETFTVGPTSGLLVGNHSATVTVSGGNGITASLNVSFTVTAAPTYNITLHKTGDTSALVSPYNFTSATDGYGAQTALSIDVKIQEPAQQASLLYVSGRPI

SEQ ID NO: 27425 - DNA, 1401 bp, Unknown
  Obtained from environmental sample
  misc_feature (1)..(1401): n is a, c, g, or t
ttgaggggcagcgacttgtctcaaaaggacattaacgaggcagtagccggtatttccaaaaagacgggtattccacttgtagcgacaaacgacgttcattatttgaataaggacgattatatttcgcatgacgttcttctttgtattggaacgggaaaagtgcgcacggaagaaaagcggaagaagtattacggggatcagttttattttaagacaggcgatgaaatggctgcgcttttcgccgagtacccgcaggctatcgagaatacggtaaaaatcgcgcagaggtgtaacgccgacgtaccgaagatagagacaaaagaattgccgcagtatctgcctgaatttaaaatccccgaaggttttagcgagccgggcgagtatttaaggcatcttacagccgaagggcttgaaaagcgttatgcgaaaataaaagaaaatgatttaaaaaaatgggaagatataaaaagaagagccgattatgaacttgatacgataatcagcatgggctatacgggatactttttgatagtcgccgattttataaattacgcgaaagagcagaacattcccgtaggtcctgggcgcggttcgggggcggggtctattgtcgcttattcactgcgtataacggatattgaccccctgaaatacggtcttatatttgagcgctttttaaaccccgagcgcatttccatgcccgattttgacattgacttcgccaatgagggacgcgaggaagtaataaattatgttacgcgtaaatacggtaaggaaagagtagcgcagataatcacgttcgggacactgggcgcgaaagcggttatcaaggacgtggcaagggtattgggaatatcaattccggaatcggaaatgataacaaaacttatctcgtttgatcctgaaattacccttgacaaggcgaaggaagaggaaccgcgcctgcgggaactggaaagcgacccccgctttacggagttattcgccatcgcgcataaactcgaggggcttaaccgtcattcaagcatacacgccgctggtatcgtaatcgggaagaagccgctgattgaactggtgccgctctttcaggaaagggaggaaaagggcggcaatatcgccacgcagtacagcatgaacttccttgaagaatgcggccttgttaaaatggattttctcggccttaaaaaccttgacatccttaaacattcgcaggaattaatccgccggcgcgggggcaagtacgcgaattttaatatggaagacattcccgaagatgacaaaaaaactttcaagatgttaggcgagggaaaaagccacgccgtttttcagttcgcttccgacggaatgcaggatattttacggcagacaaaacctacctctatagaagacttaacggcctaa

SEQ ID NO: 27426 - protein, 466 aa, Unknown
  Obtained from environmental sample
  DOMAIN (68)...(466): Bacterial DNA polymerase III alpha subunit
  misc_feature (1)..(466): Xaa is any amino acid
MRGSDLSQKDINEAVAGISKKTGIPLVATNDVHYLNKDDYISHDVLLCIGTGKVRTEEKRKKYYGDQFYFKTGDEMAALFAEYPQAIENTVKIAQRCNADVPKIETKELPQYLPEFKIPEGFSEPGEYLRHLTAEGLEKRYAKIKENDLKKWEDIKRRADYELDTIISMGYTGYFLIVADFINYAKEQNIPVGPGRGSGAGSIVAYSLRITDIDPLKYGLIFERFLNPERISMPDFDIDFANEGREEVINYVTRKYGKERVAQIITFGTLGAKAVIKDVARVLGISIPESEMITKLISFDPEITLDKAKEEEPRLRELESDPRFTELFAIAHKLEGLNRHSSIHAAGIVIGKKPLIELVPLFQEREEKGGNIATQYSMNFLEECGLVKMDFLGLKNLDILKHSQELIRRRGGKYANFNMEDIPEDDKKTFKMLGEGKSHAVFQFASDGMQDILRQTKPTSIEDLTA

SEQ ID NO: 27427 - DNA, 456 bp, Unknown
  Obtained from environmental sample
  misc_feature (1)..(456): n is a, c, g, or t
atgggcctccgcgtggtaaaaggggatggtacgcctgtgaaccccggcgcgtcatttctgcgtaacctgttacgtttcgcggatacctttatgtttctgtaccttatcgcttttatctgcattctggtcagcccgggcttcaggcgtttgggcgactgggtggcggatactttggtggtgtatgcggacaaggctcaaagcaggtttatctcccctgtcttaaaaaggcccgatatgccctggctttctgattttcccgcgctttccccttcgcggcgtcttgactacgaggaaaaacaagctgtcttaatgtttgcccgccgttaccctttactgggcaaagcgcgggccggcgaagtcgcgggaatatgggcggaggaattgcgcccggacggaaacgacgcgtcagctgaggctgttctccttggcattgcccgtagtatcgggggcggctga

SEQ ID NO: 27428 - protein, 151 aa, Unknown
  Obtained from environmental sample
  misc_feature (1)..(151): Xaa is any amino acid
MGLRVVKGDGTPVNPGASFLRNLLRFADTFMFLYLIAFICILVSPGFRRLGDWVADTLVVYADKAQSRFISPVLKRPDMPWLSDFPALSPSRRLDYEEKQAVLMFARRYPLLGKARAGEVAGIWAEELRPDGNDASAEAVLLGIARSIGGG

SEQ ID NO: 27429 - DNA, 825 bp, Unknown
  Obtained from environmental sample
  misc_feature (1)..(825): n is a, c, g, or t
atgaccgacgagcttaacaagcttaaacagcgtaaggctgaaattacgcaacttgagggtaagctgacaagcgttaggcggcttgaggatgaaattaacaacaagatgacaaggttccttaatgagcaaaggcgcatagaacaaatggaaaaagattttaacaatttaataaaaacttcccagtcggttaaagaaaagcttgaacaggtttcatcctccgacgatgttctcagcggcgtactggttcaaatacgcaaattggaagattcaatcaaggatgcgaatgaaaaattccagcgtatcgagaaaaagaacgaaatgcttgaacagaccaacgaaggcattgaccgcaactttaaaacccttcaaaaaacggaaaccgccattaagaacgccgagaaaaccatcacatcgcttgccggtcagtttgacattctgcgctcctcaatagaccttctcgcgtcgcaaagtgaaaaggcgaacaatgccgttgacaaagtagcctcccttgatgaatcgctcgcgcaaattgaaaaacgcattgaagacatgaacgtcgcgcgcgaatggctcgcccgcacggaaacggaacttatggcgcttgataaggacgcaaggtccctactaaaactaaccaaaggaataacggaaaaggaagggaaaaaaccgtcatcaaagggcgaaagtaccattactccgcaggagcgtgaaaacatactaagattgaaaggccagggctggacaaccgaagagatcgcgaaagccatgaaccgctccaggggtgaaattgatttattactggaacttgcttccagaggcacttaa

SEQ ID NO: 27430 - protein, 274 aa, Unknown
  Obtained from environmental sample
  misc_feature (1)..(274): Xaa is any amino acid
MTDELNKLKQRKAEITQLEGKLTSVRRLEDEINNKMTRFLNEQRRIEQMEKDFNNLIKTSQSVKEKLEQVSSSDDVLSGVLVQIRKLEDSIKDANEKFQRIEKKNEMLEQTNEGIDRNFKTLQKTETAIKNAEKTITSLAGQFDILRSSIDLLASQSEKANNAVDKVASLDESLAQIEKRIEDMNVAREWLARTETELMALDKDARSLLKLTKGITEKEGKKPSSKGESTITPQERENILRLKGQGWTTEEIAKAMNRSRGEIDLLLELASRGT

SEQ ID NO: 27431 - DNA, 714 bp, Unknown
  Obtained from environmental sample
  misc_feature (1)..(714): n is a, c, g, or t
gtggaagtttactctattgcatccggaataagaccgctttccataaggcaggaagcgacaaatcttactaccgttcatacaaaaagttcaagtttaattccaagcgacaaccagcaaatcagggcggcagtttatacgatattaaacagagaacaaaatccgtatctcaaagcaaaagccatatatgactggataataagaaatatgcagatttcagactcggcggcttcaacaaatattgttgaagcgttggaaaccagacgtggtgattcatacgccaccgccctgctttacaccgcaatgtcccgtgccgccggcgttccgtgtatccccgtcgccggagttttaataaaccaaaacgggcagacattacgccattattgggctgaattctggattgacggctttggctggctccctgtcgatcctgttatgggttccggagcggtaaaacttacggacagcgcaagccagcggtttgatgatgaaacggaaaaagactttgtaaatttttattttggcaatttagacaaccagcgcatagcgttttccagaggggaacttgtcctttcgcagatagaaagccgaggcaggcttgtttcgcgccctcaatcttattctctgcaaaatgtttgggaagaatccgtaggggggcttgaatcgtattccagcctttggagggatattacaatcagcggaatatatgtacaataa

SEQ ID NO: 27432 - protein, 237 aa, Unknown
  Obtained from environmental sample
  DOMAIN (86)...(144): Transglutaminase-like superfamily
  misc_feature (1)..(237): Xaa is any amino acid
MEVYSIASGIRPLSIRQEATNLTTVHTKSSSLIPSDNQQIRAAVYTILNREQNPYLKAKAIYDWIIRNMQISDSAASTNIVEALETRRGDSYATALLYTAMSRAAGVPCIPVAGVLINQNGQTLRHYWAEFWIDGFGWLPVDPVMGSGAVKLTDSASQRFDDETEKDFVNFYFGNLDNQRIAFSRGELVLSQIESRGRLVSRPQSYSLQNVWEESVGGLESYSSLWRDITISGIYVQ

SEQ ID NO: 27433 - DNA, 507 bp, Unknown
  Obtained from environmental sample
  misc_feature (1)..(507): n is a, c, g, or t
atgcctgagaccagctacgtgatagtgccccgcgtatccagtgagaagcgagcgtacatacccatcggctttctgccgcccactgttctgtccagcgattccgtccacataatcccctccgcctcactctggcacttcggcgtgctgacgtcctgtgtccacatggcatgggtccgcgccgtttgcggccggctggagatgcgctaccgctactccaaggacatcgtttacaacaacttcccgtggcctgaggcgacggtgaagcagagggccgacgtggagaaactggcgcaagccgtgctggacgctagggccgcacacccagaaagttccctggcggacctgtacgacccgctgactatgccccccaacctcctgaaggcccaccgcgcactggacgcggcggtgatgaagctgtacggctacgccaaggacacgccggaggcggagatggtggcggatttgatggagaggtacatgcggatggcgggtgggagttccaagtaa

SEQ ID NO: 27434 - protein, 168 aa, Unknown
  Obtained from environmental sample
  misc_feature (1)..(168): Xaa is any amino acid
MPETSYVIVPRVSSEKRAYIPIGFLPPTVLSSDSVHIIPSASLWHFGVLTSCVHMAWVRAVCGRLEMRYRYSKDIVYNNFPWPEATVKQRADVEKLAQAVLDARAAHPESSLADLYDPLTMPPNLLKAHRALDAAVMKLYGYAKDTPEAEMVADLMERYMRMAGGSSK

SEQ ID NO: 27435 - DNA, 552 bp, Unknown
  Obtained from environmental sample
  misc_feature (1)..(552): n is a, c, g, or t
atgagagtaaaaatacataaagttcaaaaacatttaattttcagtcaagcaaaacggagttttcaacccatatatagagaaccttcttttgaaggttcggtacaaatctatcttatggagttgtttatggagaatgtaaacagaaatcataagaacagcgtgttttcctcgctgttcagcgatccggaagttctgcgggaactatattcggctattgagggcatccctattccggcggatatgcccatcgatattaacacgctttcaaacgtgctttttatgaaacagataaacgatatctcctttttaatcgacaaacggcttgttgtcctgattgaacaccagtctacaataaatgaaaacttgccgcttcgtttgctggaatatataggacgggtatacgaaaaaattattgaaatagagaaaaagtatcaaaagctccttgtgaaaatcccaagaccggagttcatcgttctgtacaacgggacggacgaatatcccgattacaaagaattaaaactgtctgacgcattcatggacgttgaaggataa

SEQ ID NO: 27436 - protein, 183 aa, Unknown
  Obtained from environmental sample
  misc_feature (1)..(183): Xaa is any amino acid
MRVKIHKVQKHLIFSQAKRSFQPIYREPSFEGSVQIYLMELFMENVNRNHKNSVFSSLFSDPEVLRELYSAIEGIPIPADMPIDINTLSNVLFMKQINDISFLIDKRLVVLIEHQSTINENLPLRLLEYIGRVYEKIIEIEKKYQKLLVKIPRPEFIVLYNGTDEYPDYKELKLSDAFMDVEG

SEQ ID NO: 27437 - DNA, 732 bp, Unknown
  Obtained from environmental sample
  misc_feature (1)..(732): n is a, c, g, or t
atgacagggttcgctgagcgtatccttattacccggcggaccgaaacggtctttcttacagcggatgccgcgtgggacaaagaaattatcggcaagataaaacagagccttttgaacggaagcaaagtttttatctcaagcggactgtatgaaaaattggcaggcaagggaatagaggatatactcccgcttgaaattacaaacagaaaaataaccacggagctttttacaaacagtgcttttggcaggggcaactgcggttatgtaaaagccgcttctccgataaccctgtcccatgtcgcatacaatgaaaacgatatatggcctctttcagccgctattactccccattcaagccacgctatattgttatgcggcgcatacggcaagggcagtctctatgtactgacaattcccgacgcattcgccgatttgtataatttgcccgccgaaacgctggccctcttgcgcggtgaatttgatttgcccataacgctggaatgcgttggccgcgtgtctctgtttccgtatgacaacaacacctttattttgcagtcattccttgacagaccggaacgggtgcgcgtccgcattaaaaagccgaacatatcgcttgtgccgttgatgaaaccaagaatgcgcccgttcgatatagtccgttcaggagaggccgaaagcgtttttgatattcacataatgccgggacattacatggtgtttaaagttgaatga

SEQ ID NO: 27438 - protein, 243 aa, Unknown
  Obtained from environmental sample
  misc_feature (1)..(243): Xaa is any amino acid
MTGFAERILITRRTETVFLTADAAWDKEIIGKIKQSLLNGSKVFISSGLYEKLAGKGIEDILPLEITNRKITTELFTNSAFGRGNCGYVKAASPITLSHVAYNENDIWPLSAAITPHSSHAILLCGAYGKGSLYVLTIPDAFADLYNLPAETLALLRGEFDLPITLECVGRVSLFPYDNNTFILQSFLDRPERVRVRIKKPNISLVPLMKPRMRPFDIVRSGEAESVFDIHIMPGHYMVFKVE

SEQ ID NO: 27439 - DNA, 603 bp, Unknown
  Obtained from environmental sample
  misc_feature (1)..(603): n is a, c, g, or t
atgctggatcgttccaacgaggagaacatcgcctacgcaaagtcaaaaggtttgggcgttgtggtaatgggtcccgtaggcggcggcaggctgggtgcgccaagcgagaaaatacagagcttactgaaaaacaaatcgacaagcacagcggaaatggctatgcgattcgtctttgcaaacgaaaacatagacatggctctttccggcatgagcaatctggatatgttaaaagaaaattttgagatcgcttcccgcaccggccatttaacggaagaagaactgcgtcatgtgaaatccatgatggaagaaaacaaaaacctcgccaaactttactgcacaggctgtaattactgcaaaccctgtccacagggaatagacattccgtatctttttgaaataatgaaccgctaccgcgtctacgatttaaaagaacacgcaaaaagcgcatacaaggaaatgatggatggccagagttggataaaaagcgcggacgcttcaaagtgcgcagcatgcggcgcgtgcgaagaaaagtgcccgcaaaaactgccgattatcaagcagttggaagagacgcatcgtacccttgtacagacgacggcgtga

SEQ ID NO: 27440 - protein, 200 aa, Unknown
  Obtained from environmental sample
  DOMAIN (161)...(184): 4Fe-4S binding domain
  misc_feature (1)..(200): Xaa is any amino acid
MLDRSNEENIAYAKSKGLGVVVMGPVGGGRLGAPSEKIQSLLKNKSTSTAEMAMRFVFANENIDMALSGMSNLDMLKENFEIASRTGHLTEEELRHVKSMMEENKNLAKLYCTGCNYCKPCPQGIDIPYLFEIMNRYRVYDLKEHAKSAYKEMMDGQSWIKSADASKCAACGACEEKCPQKLPIIKQLEETHRTLVQTTA

SEQ ID NO: 27441 - DNA, 762 bp, Unknown
  Obtained from environmental sample
  misc_feature (1)..(762): n is a, c, g, or t
atgatcgaaatcactatagaccaaaaaccctgtacttgtgaaaagggagaaacaatttttgaagccgcggcgcgaatcggcatagaaatccccacgctttgctatcatgaagggctttgcgcccagggagcgtgccgggtatgcatggtggaaattgttgaaaataactggagccaaatggttgccgcgtgcatcttccctgtacaacgccccatttcggtactcaccaacagcgaaaaagcaaaaaaacaccgggcggctgtaatttcgctgctactcgcgcggacgcccggaagcgaatctattaaaaatctcgcaaaacgctataatgtactgccgcctgaacggttcataaaacaacaggaagaaaaatgtattgtctgcggcctgtgcgtgaaggcatgttccagccttggctcaggcgcgatcaacactataaaccgcggcataaccaaaaagatagcgacgccgtatgacgaaccgtccacggactgcataggctgttctgcctgtgtcaacgtatgtcccacagactgtatcaatgtggaagaatatgacggtgaacgtataatctggggcaaaaaattcgaaatgataagatgcgctgtttgcggaaaacactttatgcccaaagaacagttcgattatatccgtaaaaaaaccggatctgacaaacagccggagcgccctgtatgcgatagctgcagccggacggcgattgcagaaaaatggatgggaaacataaagtatgtcttcgattga

SEQ ID NO: 27442 - protein, 253 aa, Unknown
  Obtained from environmental sample
  DOMAIN (118)...(144): 4Fe-4S binding domain
  misc_feature (1)..(253): Xaa is any amino acid
MIEITIDQKPCTCEKGETIFEAAARIGIEIPTLCYHEGLCAQGACRVCMVEIVENNWSQMVAACIFPVQRPISVLTNSEKAKKHRAAVISLLLARTPGSESIKNLAKRYNVLPPERFIKQQEEKCIVCGLCVKACSSLGSGAINTINRGITKKIATPYDEPSTDCIGCSACVNVCPTDCINVEEYDGERIIWGKKFEMIRCAVCGKHFMPKEQFDYIRKKTGSDKQPERPVCDSCSRTAIAEKWMGNIKYVFD

SEQ ID NO: 27443 - DNA, 1170 bp, Unknown
  Obtained from environmental sample
  misc_feature (1)..(1170): n is a, c, g, or t
ttgaaaagctggactccgtgctgcaggtttacgaacaaagcaaagataaaaaaggaggatcggctgatgaaaaacactgattctcggacagtgctcctttgctgcggcaccggctgccttgccaacaagagcgcaaaggtgctttccgcttttaaagaaggaattgaaaagtcccggcttgaaaaagccgcagtttccgcagaattaaaaattctgccggagcttaaacccacaggctgcaacgggttttgtgagaacggcccaatcgtaacgattctgcctgacgaaatcagttattacaaagtccaggaaaaggatgtgcctgaaatcatcaacacaacacttgtaaaaggcgaactcgttacacgattactgtataaggcggacaacggttcttatataaccagccagaaagacaatccgttttacgcggggcagacaaaaatcgcgcttcgcaatattgggcgcattgatccggggctgattcaggactatatggatcgcggcggttatcaagcgctgaaaaaagcgctttcaatggaaccggacgcgatcatcaaagaaattgaggcttcagggctcagagggcgcggcggcgcgggattccccaccggacgaaaatggcgtcaggcggcttcttacgatcgtttcccaaagtacgccgtctgcaacggcgacgaaggcgatcccggcgcattcatggatcgctcggttctcgaaggggatccgcacagcgtgatcgaagggctctgcatcctcgccctcgccataggcgcccatgaaggttatatgtatatccgagacgaatacggcctggcgttaaagaacgtgaacaccgccctcgaagccgcgcgggagcgtggaatcctgggcaataaagtcatggggtcggattttgctttcgatatccgcgtggtgcgcgggggaggcgcgtttgtatgcggtgaatccaccgcgttgatggcttccatcgaaggccgtgtgggcgagccccgcgccaaatatatccgttctgtggaacgcgggctgttcgaccagcccaccgtgctgaacaacgtagagacacttgcgaatgtgccgtatatcatctcgcattccggcgccgaatacgcgaaaatcggcaccgaaaaaagcgccggaacaaaggtattcgccctggtggcaaggtaa

SEQ ID NO: 27444 - protein, 389 aa, Unknown
  Obtained from environmental sample
  DOMAIN (169)...(389): Respiratory-chain NADH dehydrogenase 51 Kd subunit
  misc_feature (1)..(389): Xaa is any amino acid
MKSWTPCCRFTNKAKIKKEDRLMKNTDSRTVLLCCGTGCLANKSAKVLSAFKEGIEKSRLEKAAVSAELKILPELKPTGCNGFCENGPIVTILPDEISYYKVQEKDVPEIINTTLVKGELVTRLLYKADNGSYITSQKDNPFYAGQTKIALRNIGRIDPGLIQDYMDRGGYQALKKALSMEPDAIIKEIEASGLRGRGGAGFPTGRKWRQAASYDRFPKYAVCNGDEGDPGAFMDRSVLEGDPHSVIEGLCILALAIGAHEGYMYIRDEYGLALKNVNTALEAARERGILGNKVMGSDFAFDIRVVRGGGAFVCGESTALMASIEGRVGEPRAKYIRSVERGLFDQPTVLNNVETLANVPYIISHSGAEYAKIGTEKSAGTKVFALVAR

SEQ ID NO: 27445 - DNA, 1224 bp, Unknown
  Obtained from environmental sample
  misc_feature (1)..(1224): n is a, c, g, or t
gtgcacgaatatattgccgattcagataaaatgacctgcgatagttcaaaatgcgtgaactgccatcgctgcgtatcactctgccccacacgggctttaaaaattgttaaatgcgataacacttacaaagagaatgtgaactggagcaataaaaccataaacgagctttataggcaagccgatactggcggcgtgttgctttcgggtatgggtaatccagaaaattatcctgtttattttgacaaaattttgataaatgcttcacaggtcacaaatccttcaatagaccctttgcgcgaacctatggaaacaaaggtttttctaggcacaaaatcaaaagatgttgagcgcgataaaaatgggcgcattatcaataacctgccaccacagcttttgctttcaatgccggttatgttctctgccatgagctatggctccataagctacaacgctcacgaaagtttagcacgtgcagcagaggaactgggcattttatacaacacaggcgaaggtggtttgcacgaagatttttaccgttggggaaagaataccatagttcaggtagcatctgggcgttttggtgttcatcctcaatatttgaatagcggagcggcgatagagataaagatagggcagggagcaaagcctggcattggagggcatttgcctgggacaaaaattgtgggtgatatttcacgcacaaggatgattcccgaaggcaccgatgctatatcgcccgctccgcaccacgatatttattccattgaagatttgcggcaattggttttctcgttaaaagaagcctccgattataaaaaaccagttatagtgaaaatcgcagctgttcacaatgttgttgccatagccagcggcattgccagaagcggagcagacataatcgccatagacggtttccgtggcggaacaggagcagctcccacacgcatacgcgaccacgttggcattcccatagaacttgcactcgcaggcgttgacaaacgtttgcgcgatgagggtattcgcgacaatgtatctatagttgtgggcggtagcattcgttctagtgcagatattgtaaaggctgttgcacttggcgcagacagcgtttatattgaaaacggcgcctcttttggctcttggctgccactgtcgaggagcgccacggcggcgtgggatcctctagagtcgacgtgcacggcacgcaatcttgatatatgcgagtga

SEQ ID NO: 27446 - protein, 407 aa, Unknown
  Obtained from environmental sample
  DOMAIN (11)...(34): 4Fe-4S binding domain
  misc_feature (1)..(407): Xaa is any amino acid
MHEYIADSDKMTCDSSKCVNCHRCVSLCPTRALKIVKCDNTYKENVNWSNKTINELYRQADTGGVLLSGMGNPENYPVYFDKILINASQVTNPSIDPLREPMETKVFLGTKSKDVERDKNGRIINNLPPQLLLSMPVMFSAMSYGSISYNAHESLARAAEELGILYNTGEGGLHEDFYRWGKNTIVQVASGRFGVHPQYLNSGAAIEIKIGQGAKPGIGGHLPGTKIVGDISRTRMIPEGTDAISPAPHHDIYSIEDLRQLVFSLKEASDYKKPVIVKIAAVHNVVAIASGIARSGADIIAIDGFRGGTGAAPTRIRDHVGIPIELALAGVDKRLRDEGIRDNVSIVVGGSIRSSADIVKAVALGADSVYIENGASFGSWLPLSRSATAAWDPLESTCTARNLDICE

SEQ ID NO: 27447 - DNA, 498 bp, Unknown
  Obtained from environmental sample
  misc_feature (1)..(498): n is a, c, g, or t
ttgatagaaaataaatgcgagaagttaggcgtaaacgccgttatttcgcaagtttgggaaaagggaagcgagggcggcattaatcttgccgtggaagtggcgcagctttgcgaacagccgaacaactttgaattttcctacgatgtaaatctctccataaatgaaaaaattgaagctatagcgaaaaaaatataccgcgccgacggcgttacatttttgagtaacgctcaaaaacagataacccaaattgaaaaaatgggattggataaagtcccaatatgcatagcaaagacccagtacagtttttccgatgacgcaacgcttttaggcgctcccaaagggtggcgtttaacagtgagggatgtaaaaatatcggcgggcgcaggcttcatagtggctctgacaggcgagataatgacaatgccgggactgccgtctgttccttccgcggagaagattgatattgatagtacggggaagatttcggggctgttttag

SEQ ID NO: 27448 - protein, 165 aa, Unknown
  Obtained from environmental sample
  misc_feature (1)..(165): Xaa is any amino acid
MIENKCEKLGVNAVISQVWEKGSEGGINLAVEVAQLCEQPNNFEFSYDVNLSINEKIEAIAKKIYRADGVTFLSNAQKQITQIEKMGLDKVPICIAKTQYSFSDDATLLGAPKGWRLTVRDVKISAGAGFIVALTGEIMTMPGLPSVPSAEKIDIDSTGKISGLF

SEQ ID NO: 27449 - DNA, 816 bp, Unknown
  Obtained from environmental sample
  misc_feature (1)..(816): n is a, c, g, or t
ttgatggccgaaaatacaggcgctttttggcagcgatattcaatgcagcttgattactgtacgccgtggggcgcgtcccgcaaagacagcgaaaaagcgcttgctattacggaacattggcttggcagagcaaaaaaaacatgggaggaagaagcggcgtgcggttatacgggaagcctttacagtattgttcagggcaattttttccccgatcttcgcaaaagaagcgtggaggcttgcgcgcaatcgggtacgcccggcatagccataggggggctttccgtaggagagccaactgaaatttttaacgaaactttggcgtatacaacagaggcgcttccttgggataaaccccgctatgttatgggaatcgggacaccccagtacattttaaccgcgattgagcatggaattgacatgtttgactgcgtgcttcttacaagagaggcccgaaacggcagggtatatacgcgaaaggggccgtttgcgctcaaaaagtgcgaaaacacccttgatttttcgccgatagataaggagtgcggatgtaaagtttgcagggagtattcccgcgcttatttgcgccacctttttaagacaaaggagattctttgttccatgttggcaagttaccataatttgtattttatcaatgaacttgttacaaacagccgtaacgcaattaaggaaggaaggtttttacaatataagagggaattcttgtccgcctacggggaggaaggggttatgaatagaataagatttgagttaaaatttcgtgtgcgtaccgaaggtacgagttcgtgcggttcgtggtaa

SEQ ID NO: 27450 - protein, 271 aa, Unknown
  Obtained from environmental sample
  DOMAIN (15)...(241): Queuine tRNA-ribosyltransferase
  misc_feature (1)..(271): Xaa is any amino acid
MMAENTGAFWQRYSMQLDYCTPWGASRKDSEKALAITEHWLGRAKKTWEEEAACGYTGSLYSIVQGNFFPDLRKRSVEACAQSGTPGIAIGGLSVGEPTEIFNETLAYTTEALPWDKPRYVMGIGTPQYILTAIEHGIDMFDCVLLTREARNGRVYTRKGPFALKKCENTLDFSPIDKECGCKVCREYSRAYLRHLFKTKEILCSMLASYHNLYFINELVTNSRNAIKEGRFLQYKREFLSAYGEEGVMNRIRFELKFRVRTEGTSSCGSW

SEQ ID NO: 27451 - DNA, 597 bp, Unknown
  Obtained from environmental sample
  misc_feature (1)..(597): n is a, c, g, or t
atgatgttttttgatggtacgccgctaatgtattttattcaacgctcattgttggaagtccatgaaattgatgatatttatgtattttgtagtgataaaaatattcgcaactattgtgtcgaaggagtaaagttccttgtccgcagtcctgatttaaatacagcgcaaactaccccagcaaacattatccgggcatttatggagaaaatcgaatcagatatttacattacggcgcatgccacatcgccgtttatttcttcctctgcgattttggattgcttaaaagctgttgtgagcggcgagtacgattcagcgttcacggcaaacagaatcaagaaacttctgtggaacgaacaacgaattgcttttaacttcgatcctgcgaacataccgcgaacacaggacttaccaccgttatttgcagaggtcagcgcagcgtatgtttttcgaaaggaagtattcgcttctactggcagacgaataggaattaatccttatatacgcgaggtcagcaatattgaggcaacggatattgattaccctgaagactttgaaatggcaaatcttatttacaaggagataattttgaaaagatga

SEQ ID NO: 27452 - protein, 198 aa, Unknown
  Obtained from environmental sample
  DOMAIN (1)...(195): Cytidylyltransferase
  misc_feature (1)..(198): Xaa is any amino acid
MMFFDGTPLMYFIQRSLLEVHEIDDIYVFCSDKNIRNYCVEGVKFLVRSPDLNTAQTTPANIIRAFMEKIESDIYITAHATSPFISSSAILDCLKAVVSGEYDSAFTANRIKKLLWNEQRIAFNFDPANIPRTQDLPPLFAEVSAAYVFRKEVFASTGRRIGINPYIREVSNIEATDIDYPEDFEMANLIYKEIILKR

SEQ ID NO: 27453 - DNA, 828 bp, Unknown
  Obtained from environmental sample
  misc_feature (1)..(828): n is a, c, g, or t
atgggacagcgcattttagacctttgggaaactcattccgtctttatattgtcgctctctaaaaatctggtttcagcggttgttatcattattttaggcatcagcctttctaaaggtgcgcgcaaacttatacataaagccaattcaaattggacgcaaagcgacgggacggcggttcccctgctgcaggcggttatccactactcaatcattattatctgtatcattatgatcctcaacattttcggggtaagcaccgcaagccttatcgccttgctgggagcggcaggcgtaactatcgctcttgcgctgaaggatactttgggaaatatcgcggcagggatagggcttcttattatggggactttacacaagggcgagtatattgaatttgattcctttaacggaacggtaaaagagataaatttatttaccacaattcttgaaacccccgacggtatttacatatccgctcccaattcccgcatttgggacgctcctttaaaaaattactcccgaaacggcaaacgcagaatggaaatttccgtcggcatcgcctactctgacccgattgacaccgcttttcaggtaatgcanaacattatcaacgctgaaaagcgatttttaaaagaccctgccccacaggttatccttcaatcttttgaagacagttcggtaaaaatcacaattcgcgcatgggcttcaattcaggattactggaacatctattgggaaatgaataaatctgttaaggcaaaaattgaagaggcgggactgcatattccgtttcctcagcgcgacgttcatattgtgcgtgaattatcttga

SEQ ID NO: 27454 - protein, 275 aa, Unknown
  Obtained from environmental sample
  DOMAIN (64)...(262): Mechanosensitive ion channel
  misc_feature (1)..(275): Xaa is any amino acid
MGQRILDLWETHSVFILSLSKNLVSAVVIIILGISLSKGARKLIHKANSNWTQSDGTAVPLLQAVIHYSIIIICIIMILNIFGVSTASLIALLGAAGVTIALALKDTLGNIAAGIGLLIMGTLHKGEYIEFDSFNGTVKEINLFTTILETPDGIYISAPNSRIWDAPLKNYSRNGKRRMEISVGIAYSDPIDTAFQVMXNIINAEKRFLKDPAPQVILQSFEDSSVKITIRAWASIQDYWNIYWEMNKSVKAKIEEAGLHIPFPQRDVHIVRELS

SEQ ID NO: 27455 - DNA, 606 bp, Unknown
  Obtained from environmental sample
  misc_feature (1)..(606): n is a, c, g, or t
atggcaaataaagatttagtagaaaaaacattacaaaagggagaaggcattttccgcttaaatcccaatttcataccccgccccttcggcgttgaaggcaggcggctaaggctccatccggatgattattttgcctacggccttgagcgcggttcaataaaagaaaggtggatgtcttccacaaacattgcccaaaacggtccgcttgccggccctcaggagggattgagctttgtcgcggttgattacggcactgacgaaaaattcagtttaaaagaagcggttgaaattctgggagcggcaatcataggcaaagagcttatcgaaaaatacaaaggcttcccggtcttttcaaaattctacgatcttaaaaccccgcttttccatcaccttcatcttgatatggaagccgccgcccgcgtaggcaaactcggcaaacccgagtgttattatttccctcggcagttcgcaagccacaccggggaaataaacgcgacctatttcggctacgacccggacacaaagcccgaagaagtaaagcagcgtctgcgcgattacaacaaaggcgataatcgcataacggaactttcccgcgcgggcgcatga

SEQ ID NO: 27456 - protein, 201 aa, Unknown
  Obtained from environmental sample
  misc_feature (1)..(201): Xaa is any amino acid
MANKDLVEKTLQKGEGIFRLNPNFIPRPFGVEGRRLRLHPDDYFAYGLERGSIKERWMSSTNIAQNGPLAGPQEGLSFVAVDYGTDEKFSLKEAVEILGAAIIGKELIEKYKGFPVFSKFYDLKTPLFHHLHLDMEAAARVGKLGKPECYYFPRQFASHTGEINATYFGYDPDTKPEEVKQRLRDYNKGDNRITELSRAGA

SEQ ID NO: 27457 - DNA, 1506 bp, Unknown
  Obtained from environmental sample
  misc_feature (1)..(1506): n is a, c, g, or t
gtggcggggagcatgggccccaccggaaaaagcgccggcctctcacccgatgttaacgatcccgcaaaacggagcatttattgggacgagcttgaggcggctttttatgacaacgcgcgcggccttttggacggcggcgcggacatactcattctggaaaccatttttgactcgcttaacgccaaggccgccctgttcgcaataagaaggctccttgacaagcgcaatatagatgtccccattattatttccgcgacgatcacgggcgattcgggaaggctcctttccggccagacactggaggctttttgcgcttcggtacttcacgcccagccctgggcaatgggccttaactgttcattcggcgctgaaaaattactgccccacatacgccgcctttccgcgattgtgccctgttttatcagttcccacccaaacgccgggcttccgaacaaatttggcgcctacgatgaaagccctgaatcaatggccgcctgtgtcgaaaattacttacaggaaggcttgttaaacgtaattggcggctgctgcggcaccacccccgcgcatatcgccgccatcgccgcaaaggccgcccaacacaaaccccgcccattaccgcaaaacccatcaccacggcctcttattctatctggcctggaattgctcattgctaattccccaaagcccgataccacaaatcctcagtccctaatcttaataggcgaacgcaccaatgtttccggaagcagaaaattcctgcgcctgatcagcgagggaaaatacaacgagacattggcctttgcccgaagcatgatcgaagacggcgcgaaaattatcaatgtgggcatggatgacgcaatgctggacgcggaaaaatcaatatgcgcctttcttgaccttgccctctccgatccggaaatcgccggagttcccgttatgatcgacagttcccgctggaacgtgatcgaggcgggcttaaaacggctgccgggaaaagggttggtaaattcaataaacctgaaagacggcgaggcggagtttctgcgcagagccttattgataaagcggtatggcgccgccgccgtggtaatgctcattgacgagaaagggcaggcggtaagctatgaacgcaagattgaaatcgccggtcgcgcctacaggcttcttgttgacgccggttttccgccggaaaacatagtgtttgatccgaatgtacttgcagtcgcgacggggataagcgagcatgactcctgcggggtagattttatccgcgcctgctcgtggattcgcgagaactgccccggagtaaatatatccggcggcatctcaaacctttcgtacagtttcaggggaaacaacaaggtgcgcgaagccatgcacagcgtttttctggtacacgcccaggcggcgggcctgtcaatggcaatcgtgaatccggctgcgcttattgcgtctaacacaattgaggaagacctccgcaatgccgtggaagacgtgctcccctaa

SEQ ID NO: 27458 - protein, 501 aa, Unknown
  Obtained from environmental sample
  DOMAIN (1)...(199): Homocysteine S-methyltransferase
  misc_feature (1)..(501): Xaa is any amino acid
MAGSMGPTGKSAGLSPDVNDPAKRSIYWDELEAAFYDNARGLLDGGADILILETIFDSLNAKAALFAIRRLLDKRNIDVPIIISATITGDSGRLLSGQTLEAFCASVLHAQPWAMGLNCSFGAEKLLPHIRRLSAIVPCFISSHPNAGLPNKFGAYDESPESMAACVENYLQEGLLNVIGGCCGTTPAHIAAIAAKAAQHKPRPLPQNPSPRPLILSGLELLIANSPKPDTTNPQSLILIGERTNVSGSRKFLRLISEGKYNETLAFARSMIEDGAKIINVGMDDAMLDAEKSICAFLDLALSDPEIAGVPVMIDSSRWNVIEAGLKRLPGKGLVNSINLKDGEAEFLRRALLIKRYGAAAVVMLIDEKGQAVSYERKIEIAGRAYRLLVDAGFPPENIVFDPNVLAVATGISEHDSCGVDFIRACSWIRENCPGVNISGGISNLSYSFRGNNKVREAMHSVFLVHAQAAGLSMAIVNPAALIASNTIEEDLRNAVEDVLP

SEQ ID NO: 27459 - DNA, 444 bp, Unknown
  Obtained from environmental sample
  misc_feature (1)..(444): n is a, c, g, or t
atgttattaagcgaaatccttccaaaagcttggaactttgaaattcttgccagcgatatttcactgaaatgtttaatgacggcaaaagagggcttttacgacataaacagaatcgtcggtatccccgataactatcttgcgaaatattttgacaaagtagaaggcggatacaaggttcatgctgatattcaagcaaaaatcaaattcgactatcataacctgaaaaacgattctctgcaaagaaacttcgatgttgttttttgccgtaacgtaattatttattttgatgatgtcgcgcaaacagtggttatggggcatttttgggacgctatgacgcctaaatctttcctatttattggtcattcggaatctttgtttggaatgaagacaaaattcgaattcttaaaaacagaatgggcgacactctattgtaaaaaagaataa

SEQ ID NO: 27460 - protein, 147 aa, Unknown
  Obtained from environmental sample
  DOMAIN (1)...(142): CheR methyltransferase, SAM binding domain
  misc_feature (1)..(147): Xaa is any amino acid
MLLSEILPKAWNFEILASDISLKCLMTAKEGFYDINRIVGIPDNYLAKYFDKVEGGYKVHADIQAKIKFDYHNLKNDSLQRNFDVVFCRNVIIYFDDVAQTVVMGHFWDAMTPKSFLFIGHSESLFGMKTKFEFLKTEWATLYCKKE

SEQ ID NO: 27461 - DNA, 360 bp, Unknown
  Obtained from environmental sample
  misc_feature (1)..(360): n is a, c, g, or t
atggcagatgaaatatcagtattagttgtagatgattcggcgttaatgcgcaacttaatcagccgcatgatcgaagacacaccgggtttgaccgttgctgaaaaagcaatgaacggtatttttgccctgcaaaaaatcccccgtgtcgagccggatgttatttgtcttgatcttgaaatgccggaaatgaacggtattgaatttttaaaggaacgaaaaaacagaggtatcgatatccctgttgtaatactttcttccgttgccgcccgcggcgcggctattaccatggaagctctggatcttggagcagcgactttatacaaaagccttccggggcagtatcagaagatatccatatag

SEQ ID NO: 27462 - protein, 119 aa, Unknown
  Obtained from environmental sample
  DOMAIN (5)...(111): Response regulator receiver domain
  misc_feature (1)..(119): Xaa is any amino acid
MADEISVLVVDDSALMRNLISRMIEDTPGLTVAEKAMNGIFALQKIPRVEPDVICLDLEMPEMNGIEFLKERKNRGIDIPVVILSSVAARGAAITMEALDLGAATLYKSLPGQYQKISI

SEQ ID NO: 27463 - DNA, 1029 bp, Unknown
  Obtained from environmental sample
  misc_feature (1)..(1029): n is a, c, g, or t
atgagctttctcccctgctgtttccatcacgaatggaggtcccggctgatgaaattgcccatgccctgcatgacattgcaaaacggtattataatggctaaccgggacaactgtaatttctttgaaaagaaccttcaactgctctccatgaaagatccggggctttgttcaaggctttcaaccgcccagacaacgcttggaaactatacattcattgagtccagaacgcacagggtagtgcccgccattgtagactcaggcgggggaacccatgcccttcattcgacagtagacccggaaagagaggcccaaagactggctgcaaccctgaatgaaggctgggttgaacccggttttacggtgtttctgggccttggcgcggcttacgcggcggccgcggctttaagcagtggaaacgcgtcccatatccttgtgatagaattcgacattaacggcatcgccgaacttttaagcgcgcttatatacgacgtgttaggcgatccgcgttttaccctgcttgtggatcctgactcaaatctcatacaaaaaacaatactcgatctgtacaacccttgtctttgcggcggtatcagggcgctgcccttgaggggcagggtcgagcaggacaaagaaaaattcgccatggccggggaagcggtacagcgggcaatagaaaaagtctcggcggattattccgtgcaggctcattttggaatgcgctggttttccaatataatccgcaacatcggtatcgcgcggtctctgaacccgggcgcgccccatattaacaccgctgccatcagcgacgtggccatctgcgcagcaggtccttcgcttaacgcccagatcccgcttctgcgaacgcggcgccgaacaggcctgtttataattgccgccgatacctctttgcccgcgttgctggcagggggcataaaacctgacgcggtagtcagcatagactgccagcatatcagttactatcattttatcgggactgcctgcgctgatatcccgttattccttacatag

SEQ ID NO: 27464 - protein, 342 aa, Unknown
  Obtained from environmental sample
  misc_feature (1)..(342): Xaa is any amino acid
MSFLPCCFHHEWRSRLMKLPMPCMTLQNGIIMANRDNCNFFEKNLQLLSMKDPGLCSRLSTAQTTLGNYTFIESRTHRVVPAIVDSGGGTHALHSTVDPEREAQRLAATLNEGWVEPGFTVFLGLGAAYAAAAALSSGNASHILVIEFDINGIAELLSALIYDVLGDPRFTLLVDPDSNLIQKTILDLYNPCLCGGIRALPLRGRVEQDKEKFAMAGEAVQRAIEKVSADYSVQAHFGMRWFSNIIRNIGIARSLNPGAPHINTAAISDVAICAAGPSLNAQIPLLRTRRRTGLFIIAADTSLPALLAGGIKPDAVVSIDCQHISYYHFIGTACADIPLFLT

SEQ ID NO: 27465 - DNA, 1656 bp, Unknown
  Obtained from environmental sample
  misc_feature (1)..(1656): n is a, c, g, or t
atggacagaccgatgacaagctgtggttgttttgaagctatctgcgcctatgtgcctgagtgcaacggcgtaatggtcgtcaaccgcgagtttttgggagacactcccattggaatgacattctcaacattggcaggttctgtcggcggaggccagcagactccgggcttcttcggttgcggaaaagtatttcttacaagcagaaagttcctctacgctgaaggcggttatgccagaatcgtgtggatgaccaaagatttaaaagatcttttgcgtaacgatttgttaagacgttttgatgaacaaaaattaccgggatttatcgaccaaattgccgatgaaactgtcgccgtgaccgctgaagatgtgcgaaagttcatggaaaaagttaagcacccagcgttgaaaatggaagatatgactcattttgcgcagagcgaacaggcaggggaggccgaagcgaagagtgacgctgttaaaaaagacgcgccatcaggcgaatccgcgtctgcgaaaactgaagaagcggggagtattccggcgaacatagacattgccgccatcacagaaaagataaaagccgatgtaactaaggaagttataaccggtataatcgacattttaagtgagcgttttttaggcaaggctccttcctcggcaaattcggatatcaaaacagaatcagctaacgttataaagacaccaagaatatcagcctctgatcgtatttctgcgattaagagtttcgctcttccggtagatagcgcaagttgttcaatatattccgtaaaactgggtaatttaaaatcggaaggcggtacgcgcggtaaaacttatacggtcggcggagcggactgtatgccgtttcacttctgggaagggaaaatgccgaacaaaccgttagtcgccatggaagtctttgacagcgtaagtgaaaagtaccccgatattcttcgtaaagcctacggagatgttttaaatgatcccgtgaaaatggcgaaactctgcgtggaaaaatacagtgctgaactaatcagcgttaatcttgacggcactcatcccgagcgtgaaaaccgaagcggtaaacaaagcgtggaacttgttaaatcaattcttaaagcggtcgatgttccgctgattatcaccggcacaagccactatgataaaaacaacgaggtaatgaaggcaatcgctcaaagttgcgaaggggagaatcttctctttaactgggtagagcaggataattacaggaccatcgcgggagcggctatggcttacggccacactcttgtagcccaggcccctatcgacgttaatatcagcaaacagttgaatattctgcttaccaatatgggtttggctcccgataaaataataatagacccgatgactagcacgattggttacggtatcgaatatacttattccgtaatggagcgtattcgcctaacgggtctcggcggggataatatgcttttaagtcctatgattgtctctgtcggcatggaatgttccaagattaaagaatttaaagcgcttgaatcaaactttccggagtggggcgatctcgcgaaacgagccgcttattgngaaatcgctacagcgacaacgctgttatacgctggcgctgacatattgattctttataatccctga

SEQ ID NO: 27466 - protein, 551 aa, Unknown
  Obtained from environmental sample
  DOMAIN (1)...(141): CO dehydrogenase/acetyl-CoA synthase complex beta subunit
  misc_feature (1)..(551): Xaa is any amino acid
MDRPMTSCGCFEAICAYVPECNGVMVVNREFLGDTPIGMTFSTLAGSVGGGQQTPGFFGCGKVFLTSRKFLYAEGGYARIVWMTKDLKDLLRNDLLRRFDEQKLPGFIDQIADETVAVTAEDVRKFMEKVKHPALKMEDMTHFAQSEQAGEAEAKSDAVKKDAPSGESASAKTEEAGSIPANIDIAAITEKIKADVTKEVITGIIDILSERFLGKAPSSANSDIKTESANVIKTPRISASDRISAIKSFALPVDSASCSIYSVKLGNLKSEGGTRGKTYTVGGADCMPFHFWEGKMPNKPLVAMEVFDSVSEKYPDILRKAYGDVLNDPVKMAKLCVEKYSAELISVNLDGTHPERENRSGKQSVELVKSILKAVDVPLIITGTSHYDKNNEVMKAIAQSCEGENLLFNWVEQDNYRTIAGAAMAYGHTLVAQAPIDVNISKQLNILLTNMGLAPDKIIIDPMTSTIGYGIEYTYSVMERIRLTGLGGDNMLLSPMIVSVGMECSKIKEFKALESNFPEWGDLAKRAAYXEIATATTLLYAGADILILYNP

SEQ ID NO: 27467 - DNA, 435 bp, Unknown
  Obtained from environmental sample
  misc_feature (1)..(435): n is a, c, g, or t
atgaataatataccgtcaatgccgaaagggatggtgctgcgcaagataatagcgcgcgatccggaaacgaagaaacgggtagtgctattaacgaataatctgaagtggtcggcagagacagtggcaggggtatataaggaacgctggcagatagaattattttttaaagcgataaaacaaaacttgaagataaagaggttttatgggaactcaaggaacgcggtaatgacgcagatatggatagcgatgatagcgtatctgttgttttatctgttgaaagtgaagtcaaagaatttagaactgtcatttaccaattttatttctgtgataaagacaatgttgtttcagagattttctcttattgattttttatgtggcacaagccatcctccaggatctaatgcaactttagaatgtcagccggagtccgtatga

SEQ ID NO: 27468 - protein, 144 aa, Unknown
  Obtained from environmental sample
  misc_feature (1)..(144): Xaa is any amino acid
MNNIPSMPKGMVLRKIIARDPETKKRVVLLTNNLKWSAETVAGVYKERWQIELFFKAIKQNLKIKRFYGNSRNAVMTQIWIAMIAYLLFYLLKVKSKNLELSFTNFISVIKTMLFQRFSLIDFLCGTSHPPGSNATLECQPESV

SEQ ID NO: 27469 - DNA, 636 bp, Unknown
  Obtained from environmental sample
  misc_feature (1)..(636): n is a, c, g, or t
atgggtcagaattcggcacgagatccatgcgaaccaataatccatgggtttaaggcaataggttcggattttgtatacgaaggtttccttgccgcgcgtttggctgaccccggcgcgattttatattacaatgactacaataccgacaaccgaagtaaagccgcaattatccgcgatatggtaaaggaagtaaatgaacgatataaaaaagcatatccaaatgaaacgcggctgttaatcgaaggcataggaatgcaggaacatcacaatacaggcgtatcggcaagctcagttagaaatacattgaatatgtttaagccgctgggagtgaaaatatcagtcagcgagcttgatgttttgatagtaacgtatcaggaatttgcgccttacggtcatggacctaacaaacaaaattcaataaaagggtctacaagaaccggcggattaaaagagcaagcgaagctatacggtcaattcttcaaggtatatctggaattcagcgacatcattgaacgtgtatcattttggggcgttactgataatcaaagctggcgatctgccgcattacctcttttatttgactcggacggaaacgccaaagacgcctattacagcgtaattgaatcgttaaaataa

SEQ ID NO: 27470 - protein, 211 aa, Unknown
  Obtained from environmental sample
  DOMAIN (2)...(210): Glycosyl hydrolase family 10
  misc_feature (1)..(211): Xaa is any amino acid
MGQNSARDPCEPIIHGFKAIGSDFVYEGFLAARLADPGAILYYNDYNTDNRSKAAIIRDMVKEVNERYKKAYPNETRLLIEGIGMQEHHNTGVSASSVRNTLNMFKPLGVKISVSELDVLIVTYQEFAPYGHGPNKQNSIKGSTRTGGLKEQAKLYGQFFKVYLEFSDIIERVSFWGVTDNQSWRSAALPLLFDSDGNAKDAYYSVIESLK

SEQ ID NO: 27471 - DNA, 495 bp, Unknown
  Obtained from environmental sample
  misc_feature (1)..(495): n is a, c, g, or t
ttgatggccgagaggcccaagaaaagcgaacccagacgtgtattggctgcccaaacctgccgctcaatagtggacgctttgtttgcagagaacccgaatgccaacattatagttatgggcgaccttaatgacgatccgacaaaccgcagcgtttatgaggtgcttaatgcgccaaaagtcaccgaccccgaaaaactgaaaagcggacagttatttaacccgttttacaagatatttgcgaaagatggagttggtactcttgcgtatcgcggcaactggaatctttttgaccagattattgtttcgcaaaatcttttaggcaaagaccgttcgcacgtaaaaatgcttggtgcgcgtgctttcaatgacgagatgcttaaagcgcaggatggtcagtataaaggttatcccttacgcaccactgccggcggcgtgtggcttaacggttttagcgatcacttcccaacctatctgataatgattaaggaaaagtag

SEQ ID NO: 27472 - protein, 164 aa, Unknown
  Obtained from environmental sample
  misc_feature (1)..(164): Xaa is any amino acid
MMAERPKKSEPRRVLAAQTCRSIVDALFAENPNANIIVMGDLNDDPTNRSVYEVLNAPKVTDPEKLKSGQLFNPFYKIFAKDGVGTLAYRGNWNLFDQIIVSQNLLGKDRSHVKMLGARAFNDEMLKAQDGQYKGYPLRTTAGGVWLNGFSDHFPTYLIMIKEK

SEQ ID NO: 27473 - DNA, 327 bp, Unknown
  Obtained from environmental sample
  misc_feature (1)..(327): n is a, c, g, or t
atgacagagccaaaggtgaaaattttttcgggtcgcgcatcccgctatcttgcggagaaaatcgctgccgcttacggagcggaactcggtaaatcggatgttataacatttgcggatggggagtttcagacatcttttgaagacaatgtgcgcggggacgatatttttatcgttcaatcaacatttactcctatcgagaatttgtttgagttgcttatgatgatagatgccgccaaaagggcgtctgcgcggaaaattatagcggttattccgtattttggttttgggcgtcaagaccgcaaggacaagccgctcgtgccgatctga

SEQ ID NO: 27474 - protein, 108 aa, Unknown
  Obtained from environmental sample
  misc_feature (1)..(108): Xaa is any amino acid
MTEPKVKIFSGRASRYLAEKIAAAYGAELGKSDVITFADGEFQTSFEDNVRGDDIFIVQSTFTPIENLFELLMMIDAAKRASARKIIAVIPYFGFGRQDRKDKPLVPI

SEQ ID NO: 27475 - DNA, 504 bp, Unknown
  Obtained from environmental sample
  misc_feature (1)..(504): n is a, c, g, or t
atgggcagcaaagaagtttacgattttatagacgataatccgggcgtgttgatgatggatgtccgctacaccaacagcgaatttaacatcgcaaaaaacaccaaagtaacggcaataaattccgcgcttcaaatagacattacaggtcaggtntgcgccgattcgcttggtacgaaattcttttcaggcgtgggcggacaggtggattttgtaagaggtgcatctttgagcgaaggcggaaaggcgattatagcaatgccgtcggcaaccgacaaaggcgtgagcaaaatagcgcctgtactcaatatgggtgccggggttgttacaaccagaagccacgtacattgggtagtgacggaatacggcgcagtaaatctctatggaaaaacgttgcaggacagagccaaactgctgatttcaattgcacatccggaccatcgtgaagagcttgacaaagcggcattcgaacgctttggcccgcacttccactttgtaaagaagtag

SEQ ID NO: 27476 - protein, 167 aa, Unknown
  Obtained from environmental sample
  misc_feature (1)..(167): Xaa is any amino acid
MGSKEVYDFIDDNPGVLMMDVRYTNSEFNIAKNTKVTAINSALQIDITGQVCADSLGTKFFSGVGGQVDFVRGASLSEGGKAIIAMPSATDKGVSKIAPVLNMGAGVVTTRSHVHWVVTEYGAVNLYGKTLQDRAKLLISIAHPDHREELDKAAFERFGPHFHFVKK

SEQ ID NO: 27477 - DNA, 894 bp, Unknown
  Obtained from environmental sample
  misc_feature (1)..(894): n is a, c, g, or t
atggattcgcaggaacttgaggatgtaatgcgccgtttattcacggcgggtttccatgtacttgtatcgactacgattatcgagaacgggattgatattccaaacgtaaacacaatcatcatagaccgcgccgatatgtacggcgtatcgcagttataccagttaaggggcagggtaggaaggtcggatcgcgtagcgtacgcctatcttttctatcccgaacaaaaagcgctttccgaaatcgccatgaagcgtttgcagacaatttccgattttacggaacttggctccggttttaagatagccatgaaagatatggaaatccggggagcgggaaatcttttgggcagggaacaatcaggcgacatttattccgtgggcttcgatttatatgttaaacttttagaagaagccgtaaagcgtcttgaagactccaattacgagtcggaaacagagacccttcttgaacttgaatacacaggtttcattcccgattcatacatcgactcgccacagcagaaaatggaagtttacaaaatgatagccgcaatacgcgacaaagaagacttggagcgcgtatactcggaattgttagaccgcttcggtccgctccccgatgaagccgcgtctttgctagctctagccgaaatcaggattatatgccgccaattaacagtctcggtactcaaggaagggtccggcgttgtgcggatagagttcgccaaggcggcgcgcgtaaatgtagagcgtcttatacgcatgatgcagcaatccgccggcaaggtgaaacttgatccaaagaaagcgaacgtaatccttcttacaacgggcagtatcggcttgaaagaaaagagcgaatttatccgcgaaaaactgtcgtcactcgcgggctag

SEQ ID NO: 27478 - protein, 297 aa, Unknown
  Obtained from environmental sample
  DOMAIN (1)...(63): Helicase conserved C-terminal domain
  misc_feature (1)..(297): Xaa is any amino acid
MDSQELEDVMRRLFTAGFHVLVSTTIIENGIDIPNVNTIIIDRADMYGVSQLYQLRGRVGRSDRVAYAYLFYPEQKALSEIAMKRLQTISDFTELGSGFKIAMKDMEIRGAGNLLGREQSGDIYSVGFDLYVKLLEEAVKRLEDSNYESETETLLELEYTGFIPDSYIDSPQQKMEVYKMIAAIRDKEDLERVYSELLDRFGPLPDEAASLLALAEIRIICRQLTVSVLKEGSGVVRIEFAKAARVNVERLIRMMQQSAGKVKLDPKKANVILLTTGSIGLKEKSEFIREKLSSLAG

SEQ ID NO: 27479 - DNA, 495 bp, Unknown
  Obtained from environmental sample
  misc_feature (1)..(495): n is a, c, g, or t
ttgccgatatacttgccaaatatatttttatttcccgtatatctggttttggtaacattttttggcggcggacaggaagaagttggctggaatgggtatatatatccttttcttgaaaaaaggtttggctgtatgttggctccgttaattatgggagtaatatggtcagtttggcatctgccattgtggtttataccggaatcaattcaaagttatatgaactttttttgctttacattgatggtaataggatatgcgtattttcatacatggatagtagaagcgtcaggttatcgttctttatcaggattgatttctcatggaacagccaacgcatatgcagccctttttccgtatttggatatgaaagaaaatgttccacaaactcgtttctggttatatgccattatcacgcttttaattgggctaataatcggaatttataggcatagaaaatctaaagaaacaatgagaaccagcccaaacttcacatga

SEQ ID NO: 27480 - protein, 164 aa, Unknown
  Obtained from environmental sample
  DOMAIN (13)...(118): CAAX amino terminal protease family
  misc_feature (1)..(164): Xaa is any amino acid
MPIYLPNIFLFPVYLVLVTFFGGGQEEVGWNGYIYPFLEKRFGCMLAPLIMGVIWSVWHLPLWFIPESIQSYMNFFCFTLMVIGYAYFHTWIVEASGYRSLSGLISHGTANAYAALFPYLDMKENVPQTRFWLYAIITLLIGLIIGIYRHRKSKETMRTSPNFT

SEQ ID NO: 27481 - DNA, 411 bp, Unknown
  Obtained from environmental sample
  misc_feature (1)..(411): n is a, c, g, or t
gtggtcgagtcacacggattaccggtaggtataatcgtcagcggagccaacacacatgacataaaactgctggaagggacgctgcaatctattataaccgcccatcctgaggggagcaacatctgtcttgatgccggatatgtcggggcgcgaacgctggtagaagaaatggggtatgtggcgcatattcgcggtcggggggaagagaagcaggaaaaggaacgggagccagggttcaaagcgcggcggtgggtagttgaggtgtgccattcctggctaaaccgttttaaaaagcttttgatccggtatgagaaaaaagacgtgaattatctggcgttgctgcaatttgcctgtgccattatcgtctggcgacagatcattccggtccatccaggacttattcccggataa

SEQ ID NO: 27482 - protein, 136 aa, Unknown
  Obtained from environmental sample
  misc_feature (1)..(136): Xaa is any amino acid
MVESHGLPVGIIVSGANTHDIKLLEGTLQSIITAHPEGSNICLDAGYVGARTLVEEMGYVAHIRGRGEEKQEKEREPGFKARRWVVEVCHSWLNRFKKLLIRYEKKDVNYLALLQFACAIIVWRQIIPVHPGLIPG

SEQ ID NO: 27483 - DNA, 432 bp, Unknown
  Obtained from environmental sample
  misc_feature (1)..(432): n is a, c, g, or t
atgaaagtgggaaacaaggagcattatgaacaaagctacgacacgcaggcggcagtggacacggaaggaagcatgctgatactgggcgggtatgtaacgcaaaacgtgaacgacaaaaaggagatggaacccttagtagcgagcgttgataaagaagtgcgggaaataaatacaatatgtttggacacgggattttacagtgaagaggcggtagctgcggtagaaaataaaaatgaagaaggggagcgggaagggccggaagtattttgtgcggtagaaaaagggcatcacgggaagacagtggaagatttgaaagagaagggacctaaggggcggccgctggacataagcaagtatttcgacacgatagaccacaagcttttgagggggatgttcagacggcgggttagcgatggagtgataacgcggtaa

SEQ ID NO: 27484 - protein, 143 aa, Unknown
  Obtained from environmental sample
  misc_feature (1)..(143): Xaa is any amino acid
MKVGNKEHYEQSYDTQAAVDTEGSMLILGGYVTQNVNDKKEMEPLVASVDKEVREINTICLDTGFYSEEAVAAVENKNEEGEREGPEVFCAVEKGHHGKTVEDLKEKGPKGRPLDISKYFDTIDHKLLRGMFRRRVSDGVITR

SEQ ID NO: 27485 - DNA, 738 bp, Unknown
  Obtained from environmental sample
  misc_feature (1)..(738): n is a, c, g, or t
atgagcgaaagatttgtaaatatagaccgggaaacaccgatgctgtttcccgtggacatgagggactggctgcccgaggatcatttggtatatttcatcatagaggcgatagagcagataggggtggcggggtttaaagtaaaccggcgcggcaccgggagcgagcagtacccgcctgagatgatgctggcgttgctggtgtacagttacgtgacagggcggttcggctcaaggacgatagaagcggcgacatatacggacgtggcgctcagatatatatgcggaggacaagcgcatccggatcatacggtgatatgcgcgttccgcaaggataacaaggaagtgtttgaagaaacattcaccaagatactggtattagccaaacagatgaaaaaactgaaacacgtgggcggggccagcggcgacgggacaaaaattcatgcgaacgcgagcaagcacaatgcggtaagctacaagcgggccggagaaatcataaaagagttgaaggaagaagtgaaacagctgacgcggacagcggaagaggcggacgggaaagcggagaaaccggtgataaacataccggaagaaataaagctgaggaaagagcggaagaaagcgctggaagaagcgaaggccgagatggaaaagctgtacgaagcggcgcaggaagaaggggctagaacacgaaaaaacaggatgaataccagcataatttcactgataaggacagccggataa

SEQ ID NO: 27486 - protein, 245 aa, Unknown
  Obtained from environmental sample
  misc_feature (1)..(245): Xaa is any amino acid
MSERFVNIDRETPMLFPVDMRDWLPEDHLVYFIIEAIEQIGVAGFKVNRRGTGSEQYPPEMMLALLVYSYVTGRFGSRTIEAATYTDVALRYICGGQAHPDHTVICAFRKDNKEVFEETFTKILVLAKQMKKLKHVGGASGDGTKIHANASKHNAVSYKRAGEIIKELKEEVKQLTRTAEEADGKAEKPVINIPEEIKLRKERKKALEEAKAEMEKLYEAAQEEGARTRKNRMNTSIISLIRTAG

SEQ ID NO: 27487 - DNA, 663 bp, Unknown
  Obtained from environmental sample
  misc_feature (1)..(663): n is a, c, g, or t
ttgaaagcggtaaagttgactgggcgtgccacgccgacgacgcaggacgcggcaataaatgatgtacttgcaatggatgacgcaattagagtcgcacttgaatttgcgcagaagcatcctaaggaaacgcttattatcgttacaggcgaccatgaaacaggcggtatgacaataggtttcgctggaactcagtatgataccttttttaataaagtcgccctgcaaacaaaatcttatgtcgcttttgacgatgaagttctgaaaccatacaaagcgaaaactcaaatcgccaacgcgaaacttgccgaccttcttccggcaataaaagaatcattcggcattgattttaattcgctttccgatttccaaaaacagcaagttgaattttcttttcagcgttcaatgggtaatgaacaagaacgttcctatgccgaagacagatatttactttacggaggttatgaacctctgactgtaaaactgacgcacataatgaaccagaccgcaggtatcggctggacaagttattcacacacaggcgttcccgttcccgttttcgctaaaggcgttcatcaggaaattttcggcggctactatgacaacacggatttattttacaaacttgccggcgtaatgaacttgaacgtgccggcaaaactataa

SEQ ID NO: 27488 - protein, 220 aa, Unknown
  Obtained from environmental sample
  misc_feature (1)..(220): Xaa is any amino acid
MKAVKLTGRATPTTQDAAINDVLAMDDAIRVALEFAQKHPKETLIIVTGDHETGGMTIGFAGTQYDTFFNKVALQTKSYVAFDDEVLKPYKAKTQIANAKLADLLPAIKESFGIDFNSLSDFQKQQVEFSFQRSMGNEQERSYAEDRYLLYGGYEPLTVKLTHIMNQTAGIGWTSYSHTGVPVPVFAKGVHQEIFGGYYDNTDLFYKLAGVMNLNVPAKL

SEQ ID NO: 27489 - DNA, 645 bp, Unknown
  Obtained from environmental sample
  misc_feature (1)..(645): n is a, c, g, or t
atgccggatttgcagactatcttttctacttcggaatttagtacccggattagccgggtgctttcggggatttttgccccaagacagagcatacacggggttttggtggaagtttacggccttggaatccttatcctgggggattcgggggtcggaaaaagtgaaacagccctggagcttatcatggacaaccaacgcctggtagccgacgatgtggtggaacttcactgcgtgaacggcaatgtcttgatgggcacaggggccaacaagataatagcccatcacatggaaatccgcggtatagggataatcaacattacccatcttttcggggtcggcgccatcagggatcgcaagcaaatagaacttgtggttaccctggccgagtgggattccaaaaagaattacgaccgcatcggcctggaggaacagcacatggaattcctgggcgttactattcccagcctggagattcccgtaaggccgggacggaatatcccaaccattatcaagaccgccgccatgaacgaaaggctaaaaaaaatgggttacaacgcggcaaaggagttcaaccagaacatactcaagtggcttgagagcgataccgccagggcggtttatttcggaagtgaggacataatttaa

SEQ ID NO: 27490 - protein, 214 aa, Unknown
  Obtained from environmental sample
  DOMAIN (23)...(204): HPr Serine kinase C-terminus
  misc_feature (1)..(214): Xaa is any amino acid
MPDLQTIFSTSEFSTRISRVLSGIFAPRQSIHGVLVEVYGLGILILGDSGVGKSETALELIMDNQRLVADDVVELHCVNGNVLMGTGANKIIAHHMEIRGIGIINITHLFGVGAIRDRKQIELVVTLAEWDSKKNYDRIGLEEQHMEFLGVTIPSLEIPVRPGRNIPTIIKTAAMNERLKKMGYNAAKEFNQNILKWLESDTARAVYFGSEDII

SEQ ID NO: 27491 - DNA, 504 bp, Unknown
  Obtained from environmental sample
  misc_feature (1)..(504): n is a, c, g, or t
gtgccgaatatattaagagatttaaagagagttccgcatgaaaaacgcatatacgttgacgaatgcggtataaacacatatttacagcgcgaatatgctcgtgctccccgaggggaaatagtcgaagatgtcaggcccgggcaaaagttcgaacggtcaaatgtcatcggggctctttgcgaaggaaaccattttggggttgaatgctacaacccttcgacaaacagcgcatttttcgaagactggtttaaaaattgttttataaaagagatacccaaggggtacacagcaataatggataacgcaagctttcataataaaaaaagattgcgaaagcttgcgaggggaaaggtgcggctattatttctcccgccatattcacccgactataaccagatagagaaatcatggtcaaacatgaaacgctttctccgtaattttgcaaagaattaccaatccatcggcgatgcaatatatggctattttaatggttcagttaattaa

SEQ ID NO: 27492 - protein, 167 aa, Unknown
  Obtained from environmental sample
  misc_feature (1)..(167): Xaa is any amino acid
MPNILRDLKRVPHEKRIYVDECGINTYLQREYARAPRGEIVEDVRPGQKFERSNVIGALCEGNHFGVECYNPSTNSAFFEDWFKNCFIKEIPKGYTAIMDNASFHNKKRLRKLARGKVRLLFLPPYSPDYNQIEKSWSNMKRFLRNFAKNYQSIGDAIYGYFNGSVN

SEQ ID NO: 27493 - DNA, 546 bp, Unknown
  Obtained from environmental sample
  misc_feature (1)..(546): n is a, c, g, or t
gtgataaaaagccaccataatgtagcaagcccgcttgtagacgcgaagcgaaaagcgggaaaaattatcgagccgctggatcgtttgtacaaagacgaagtgcgcaaactggggcgcattatcggcgtagacgaagaaattgtcaggcgccatccgtttccggggccaggtcttgcggtgcgcatacttggggaagtaacaagggaaaaatgcgacatcctgcgcgaagcggacgctatttatatagaagaattaaaaaaccgccgcggcccgtccgggaagagcctgtacgacgagatatggcaggcgtttgctatccttttaccgatacgctccgtcggcgtggccggcgacgttcgcaaatacggctgggttctcgcgttacgcgctatcacaagttctgacggcatgaccgcggatgtctacccgtttgaaacccgcgatcttttggaaatatctacgcgcattaccaactccgtaaaagagattggacgcgtgacatacgacatatcaagcaagccgccggctacgattgagtgggaatag

SEQ ID NO: 27494 - protein, 181 aa, Unknown
  Obtained from environmental sample
  DOMAIN (82)...(180): GMP synthase C terminal domain
  misc_feature (1)..(181): Xaa is any amino acid
MIKSHHNVASPLVDAKRKAGKIIEPLDRLYKDEVRKLGRIIGVDEEIVRRHPFPGPGLAVRILGEVTREKCDILREADAIYIEELKNRRGPSGKSLYDEIWQAFAILLPIRSVGVAGDVRKYGWVLALRAITSSDGMTADVYPFETRDLLEISTRITNSVKEIGRVTYDISSKPPATIEWE

SEQ ID NO: 27495 - DNA, 618 bp, Unknown
  Obtained from environmental sample
  misc_feature (1)..(618): n is a, c, g, or t
atgggacatgccctgcgtccgcccggttccgggagatgtttccagcgtttttgggggacagagggtgttcaacggccagccgcgctcgcgtcaccgcggtttggatctgcgcggcgacacggggcagccgattctggccatggccgggggcagggtggttctggcggaagaacactatttttccggcaatgtggtgtttatcgatcacggtttggggcttataagcatgtatgcgcacttgagcgcctttcgcgtggccgaaggcgacatggttcgggcggggcaggagatcggcctgatcggcgccactggccgcgtgaccggcccccatctgcactggggcgtgaacatttttggaaaagccgtggatccgctcagtcttttatgaaagcaacaatgacgtttgaagaacgcctgcaacggctgcaggaaatcgtcgccggcctggaaagcggcgcgttgccgcttgaggagagcgttgccttgtacaaggaaggcctgaccttgagcaaactgtgcaaagagcaattggaaaaagcccgcaacgaagtgagcctgttgagcgacggcgcattcaagccgtttgacgtggaagcccccgaatgccgcgaggaatga

SEQ ID NO: 27496 - protein, 205 aa, Unknown
  Obtained from environmental sample
  DOMAIN (133)...(194): Exonuclease VII small subunit
  misc_feature (1)..(205): Xaa is any amino acid
MGHALRPPGSGRCFQRFWGTEGVQRPAALASPRFGSARRHGAADSGHGRGQGGSGGRTLFFRQCGVYRSRFGAYKHVCALERLSRGRRRHGSGGAGDRPDRRHWPRDRPPSALGREHFWKSRGSAQSFMKATMTFEERLQRLQEIVAGLESGALPLEESVALYKEGLTLSKLCKEQLEKARNEVSLLSDGAFKPFDVEAPECREE

SEQ ID NO: 27497 - DNA, 426 bp, Unknown
  Obtained from environmental sample
  misc_feature (1)..(426): n is a, c, g, or t
gtgcgggccgtctttgcgcgggtcggtcccgagcgcttatgggacatgccctgcgtccgcccggttccgggagatgtttccagcgtttttgggggacagagggtgttcaacggccagccgcgctcgcgtcaccgcggtttggatctgcgcggcgacacggggcagccgattctggccatggccgggggcagggtggttctggcggaagaacactatttttccggcaatgtggtgtttatcgatcacggtttggggcttataagcatgtatgcgcacttgagcgcctttcgcgtggccgaaggcgacatggttcgggcggggcaggagatcggcctgatcggcgccactggccgcgtgaccggcccccatctgcactggggcgtgaacatttttggaaaagccgtggatccgctcagtcttttatga

SEQ ID NO: 27498 - protein, 141 aa, Unknown
  Obtained from environmental sample
  DOMAIN (42)...(137): Peptidase family M23
  misc_feature (1)..(141): Xaa is any amino acid
MRAVFARVGPERLWDMPCVRPVPGDVSSVFGGQRVFNGQPRSRHRGLDLRGDTGQPILAMAGGRVVLAEEHYFSGNVVFIDHGLGLISMYAHLSAFRVAEGDMVRAGQEIGLIGATGRVTGPHLHWGVNIFGKAVDPLSLL

SEQ ID NO: 27499 - DNA, 696 bp, Unknown
  Obtained from environmental sample
  misc_feature (1)..(696): n is a, c, g, or t
atgtttccacgccttgggaacatcacgcctgtgcatgagatggtacgcgtcgcgcatcatcacggagcgcgaattttagtagacggcgcgcagtccgtggcgcataccccgcttaatgtgcgcgaactggacgcggattttttcgtgttttcggggcataagatattcggcccaacgggaataggcgcggtgtacggcaaggcggacgctctggaagaggcaaagccgtatcagggcggcggcaatatgattaaggatgtaacctttgagcgcacaatctataatcccgccccgggcaaatttgaggccggcacaggcaatattgccgacgccattgggctcggcgccgcgctggattatgtcgcgcaaatcgggttagccggcatcagcgcgtacgaacacgaattgcttgactacgccacacgcgaactgagccgcatacccgggctgcgtctcattggtacggcaaaggaaaaggcaagcgtgctttcttttgtgctggacggcgcaagcacagagcaggtgggcaaacatctcgcggggcatggcatagccgttcgcgccgggcaccactgcgcccagcccatattgcggcattacggtctggagtcaacggtgcgcccaacgctggcgttttataataccgcaggcgagatagacgccttggtgcgcgcggttggagaactcgcaaaataa

SEQ ID NO: 27500 - protein, 231 aa, Unknown
  Obtained from environmental sample
  DOMAIN (2)...(222): Aminotransferase class-V
  misc_feature (1)..(231): Xaa is any amino acid
MFPRLGNITPVHEMVRVAHHHGARILVDGAQSVAHTPLNVRELDADFFVFSGHKIFGPTGIGAVYGKADALEEAKPYQGGGNMIKDVTFERTIYNPAPGKFEAGTGNIADAIGLGAALDYVAQIGLAGISAYEHELLDYATRELSRIPGLRLIGTAKEKASVLSFVLDGASTEQVGKHLAGHGIAVRAGHHCAQPILRHYGLESTVRPTLAFYNTAGEIDALVRAVGELAK

SEQ ID NO: 27501 - DNA, 525 bp, Unknown
  Obtained from environmental sample
  misc_feature (1)..(525): n is a, c, g, or t
ttgaaacggtttgcatttttatcaatgctggtgttattggggctgctttgcgcttgcacggcagcaaacaaaaaagttattgagttgcttgaaagcggtaaaaaagcttttgacaggggcgattacgataaagccattgccgattataccgaagcaatacggattgaaccgaaaaacgcggaagcatactttaggcgcggtgattcctattaccgcaagggcgacgaatggaagggtatacatattccccggtgggatgatgaggcgatgccgcctcccttgcggtatgcacaggcgatacagcctgaaccgaacaatataagagcatggaaatggcgcggtttcacttacgatatgattagcaacaatgacagagcgattgcggactacagcagggcgatcctgttaaatccaaagttagatgaagcctactataaccgtggaaatgcgtatagtaaaaaaggagaccatgacagggctattgaggatttcaacagaccgatcttgcttaaaaaaaataagtaa

SEQ ID NO: 27502 - protein, 174 aa, Unknown
  Obtained from environmental sample
  SIGNAL (1)...(24)
  DOMAIN (107)...(140): Tetratricopeptide repeat
  misc_feature (1)..(174): Xaa is any amino acid
MKRFAFLSMLVLLGLLCACTAANKKVIELLESGKKAFDRGDYDKAIADYTEAIRIEPKNAEAYFRRGDSYYRKGDEWKGIHIPRWDDEAMPPPLRYAQAIQPEPNNIRAWKWRGFTYDMISNNDRAIADYSRAILLNPKLDEAYYNRGNAYSKKGDHDRAIEDFNRPILLKKNK

SEQ ID NO: 27503 - DNA, 519 bp, Unknown
  Obtained from environmental sample
  misc_feature (1)..(519): n is a, c, g, or t
atgaaaaagacaacagctattctgtttgttctgttggctgtgtgtttcacagctcaggtttatgccaccggttcttcgcaaagtcagacgcagacaggtccggtaaccattgagttgtggtatggattggcaatgtccgagcagccaccacccccagcggactggaaggcttttcagattatcagggataaactcaacatcaatctggttttaaatgccctgcctaccaatccaaacgatgaggctctcaaagtgagcgcggcggcggcggccaataacttgccggacctggcaatggtgtcttcgttgatttttaaagatattgtcagaacaggtactatagctccggtggatgacttgtataagctgatgcccacaaggacgaaacagatgtatgatgccgacagcatcgcttatactacggtcaacggtaaatcttatgggcttgctactcccggcagtattatcaaaaacgaaggcgtgttgatccgaaaagactggcttgacagctgggcctga

SEQ ID NO: 27504 - protein, 172 aa, Unknown
  Obtained from environmental sample
  SIGNAL (1)...(22)
  misc_feature (1)..(172): Xaa is any amino acid
MKKTTAILFVLLAVCFTAQVYATGSSQSQTQTGPVTIELWYGLAMSEQPPPPADWKAFQIIRDKLNINLVLNALPTNPNDEALKVSAAAAANNLPDLAMVSSLIFKDIVRTGTIAPVDDLYKLMPTRTKQMYDADSIAYTTVNGKSYGLATPGSIIKNEGVLIRKDWLDSWA

SEQ ID NO: 27505 - DNA, 780 bp, Unknown
  Obtained from environmental sample
  misc_feature (1)..(780): n is a, c, g, or t
atgcgcgtaataagctggaatgttaacggaataagatcggttgaaaaaaaggactttgcctcctggatgaataaagaatccgcggattttgtatgtattcaggagactaaggcaaggccggagcagcttgcgccgggactgcttgaaataaaggataaaaacgggaagccatattatgcctattgggcaagcgccaaaaggcccggttattcaggcgtggggatttattcgaaaacagagccgcttaatgtaaagaattttggtatagaagaatttgacaacgagggcagggtgctgcaggccgaatacaaagatttcacgctcatttccgcttattttcccaattcccaggatgaaagaaaaaggctggactacaaactcaggttttgcgccgccattatggaactctgtaacacattccgcaaagaaaatcgtcattttgttttatccggtgattacaatatcgcgcacacgccgattgatttggcaaggccgaaacaaaacgaggatagtcccggatacttgccggaagaaagagcctggatggatgcctttacgaaagaaggatttattgatactttccggcattttcatccgggtgaaaaagaccattacacctggtggtcttacagaatgaacgcgcgtgagcacaatgtagggtggaggctcgattaccattgtgttgatccggcgtttcttccggcggtcaagtcatcgatcatacgccccgaggtgcctggttccgatcactgtccggtggagctagttctggagctttag

SEQ ID NO: 27506 - protein, 259 aa, Unknown
  Obtained from environmental sample
  DOMAIN (1)...(257): Endonuclease/Exonuclease/phosphatase family
  misc_feature (1)..(259): Xaa is any amino acid
MRVISWNVNGIRSVEKKDFASWMNKESADFVCIQETKARPEQLAPGLLEIKDKNGKPYYAYWASAKRPGYSGVGIYSKTEPLNVKNFGIEEFDNEGRVLQAEYKDFTLISAYFPNSQDERKRLDYKLRFCAAIMELCNTFRKENRHFVLSGDYNIAHTPIDLARPKQNEDSPGYLPEERAWMDAFTKEGFIDTFRHFHPGEKDHYTWWSYRMNAREHNVGWRLDYHCVDPAFLPAVKSSIIRPEVPGSDHCPVELVLEL

SEQ ID NO: 27507 - DNA, 1107 bp, Unknown
  Obtained from environmental sample
  misc_feature (1)..(1107): n is a, c, g, or t
atgggttattttcccgttaagctggaaagcggcgcgcagacggtgtactattcaatgattgggcattgcagcgacgttgataatatagacagcgcggcagcaatactttcacataacggtttttttgaaacaaaagaaaaagaaaacgctgatcttataaacgatatcgcgttttgcgcgtataccaaatcggcatatccgcaatttgacacctactgtaaacagaattttattgataacgctttgcgaggcggctttcccgtaactatcggaaaaaatactacttattacgcctattcccgggttcacggcgacatggaacgcgaatacaacgattttaccgttcttgatgaatatttttcccagggaaacggcaattatcgggatgtaaaccaaaacagaagatgcgatgtcttttttaaccgggatataggcgatgacaatatccgtttcttcatgaatcttattcaaagcgacggttttaacccgcttaaagtgcttggtgtcagttttatgtttgaaaccactgaaaacagacaacgttttattgatgaagaatttgcctctaacgcgcttaatataaaagagtaccctgactttattgaaaagctgtcattctttatgtcaagtccttttactttaggcagtctgtttcattttattgaagaaaacaaaataaatctttccgacaggaagaacctgcttgcgtcgcttttaaaatacgctaaaaaaataagccttgcggaacacggtgaagggtactggtcggatcattggcattacaataccgatttaatcgaaaattacctcgctgtttttcccgaccgttttaaacagctcctcttggaatcccgcaattatactttctttgacgactgttattttgtagaatctcgcaacgtaaaatatgttctgttccgcggaatgccccgacaaatccgcgctgtacgccgcgaccctgaaaaagccgctcttatagcatctcgcgcgcagaatcccaacgtactgcggacagattttggttcaggtgaagagtactatacaaaccttttaggtaagctgctttgcttgattgcaaataaatacgcctcacctcggccgatctga

SEQ ID NO: 27508 - protein, 368 aa, Unknown
  Obtained from environmental sample
  misc_feature (1)..(368): Xaa is any amino acid
MGYFPVKLESGAQTVYYSMIGHCSDVDNIDSAAAILSHNGFFETKEKENADLINDIAFCAYTKSAYPQFDTYCKQNFIDNALRGGFPVTIGKNTTYYAYSRVHGDMEREYNDFTVLDEYFSQGNGNYRDVNQNRRCDVFFNRDIGDDNIRFFMNLIQSDGFNPLKVLGVSFMFETTENRQRFIDEEFASNALNIKEYPDFIEKLSFFMSSPFTLGSLFHFIEENKINLSDRKNLLASLLKYAKKISLAEHGEGYWSDHWHYNTDLIENYLAVFPDRFKQLLLESRNYTFFDDCYFVESRNVKYVLFRGMPRQIRAVRRDPEKAALIASRAQNPNVLRTDFGSGEEYYTNLLGKLLCLIANKYASPRPI

SEQ ID NO: 27509 - DNA, 747 bp, Unknown
  Obtained from environmental sample
  misc_feature (1)..(747): n is a, c, g, or t
atgtcacgacagggatatacgaaaatattaatgaaatgctcaacaatttcaattgacggattgatcctcgaaccattgtattcaggttttgacagtaaggaaacaaggctggtttcattactggaaaagcttaccatccccgtggttttaataaataatgatattccttcatttgaatgttcaaaagtaatgcaggatgatgagggtggaggccggttaattacggaacatcttttggaacatggtcataagcgtatcgcttttatttataatgataaaataagcacgggctttgaaaggcggaaaggttaccgctgcgctctggctgcggcgggtattgaatatgacagcagacttgagattgcgtataacgatgaagaaggaatagtatatcccgggtacgttattaccaaacaattgctcgaaaatcccaaactgggagttacggcgattttttattataacgatgaccttgcttttcaggggcttgtagctatacaaagtttaaatttgaaagtaccgaatgacatttccattgtgggctacgatgacgttcctcgttcaagccttgatggaatatggctgacaaccgcttctcaccccaaaacactgatgggaacatgggcggcgtcattgcttcttgaacagtttgatcagatcaacaaacccatataccggaaaatggtagtacattctcctataataaaacgcggctcagtagcttctccctctatcaggcaagactga

SEQ ID NO: 27510 - protein, 248 aa, Unknown
  Obtained from environmental sample
  DOMAIN (3)...(233): Periplasmic binding proteins and sugar binding domain of the LacI family
  misc_feature (1)..(248): Xaa is any amino acid
MSRQGYTKILMKCSTISIDGLILEPLYSGFDSKETRLVSLLEKLTIPVVLINNDIPSFECSKVMQDDEGGGRLITEHLLEHGHKRIAFIYNDKISTGFERRKGYRCALAAAGIEYDSRLEIAYNDEEGIVYPGYVITKQLLENPKLGVTAIFYYNDDLAFQGLVAIQSLNLKVPNDISIVGYDDVPRSSLDGIWLTTASHPKTLMGTWAASLLLEQFDQINKPIYRKMVVHSPIIKRGSVASPSIRQD

SEQ ID NO: 27511 - DNA, 741 bp, Unknown
  Obtained from environmental sample
  misc_feature (1)..(741): n is a, c, g, or t
gtgcattatctgcgcctttgtcctggaaaatctgtcgcgcgaaaattccacaaggatatgctcttaagccccctttatgatcaaaaattgcgtatgattaaagtaaacgcgcctattgcgtccgccggtcaggatatcggtcgtataactgtttttacgcgcggctggcttgaaaacgagtcaatttggctacacatggaatacaaatacctgcttgaacttttacgtaacggcctcgcggaagaattcttcagtatcgcaaaaacagctcttattcctttcgttgatcccaacgcatacggacgcagtatttttgaaaattcttcatttttggcaagctcggcgcatcctgacgaagctttgcacggtcagggttttaccgcgcgtctttcaggcgctaccgccgaatttatctcaatgtggatagcgatgacaagcggtcttaaacctttttccctgcatgacggcgaactgcgcctcactttaaatccgtgcctgcccgttgatttctttaccgccgcgaatacttttacctttaatttccttggcggctgcgaagttatttatcacaatgaatcccgctctgatactttcggcgcgcagagcgtaaaagcgcgtgaatatcgcataacgtacgccgatggcggctctgaaacaattacaggagactttattcagggaaagagcgctcttgccgtccgcaaaggaaaagcgcggcggattgatgtcagtcttgcctga

SEQ ID NO: 27512 - protein, 246 aa, Unknown
  Obtained from environmental sample
  misc_feature (1)..(246): Xaa is any amino acid
MHYLRLCPGKSVARKFHKDMLLSPLYDQKLRMIKVNAPIASAGQDIGRITVFTRGWLENESIWLHMEYKYLLELLRNGLAEEFFSIAKTALIPFVDPNAYGRSIFENSSFLASSAHPDEALHGQGFTARLSGATAEFISMWIAMTSGLKPFSLHDGELRLTLNPCLPVDFFTAANTFTFNFLGGCEVIYHNESRSDTFGAQSVKAREYRITYADGGSETITGDFIQGKSALAVRKGKARRIDVSLA

SEQ ID NO: 27513 - DNA, 795 bp, Unknown
  Obtained from environmental sample
  misc_feature (1)..(795): n is a, c, g, or t
atggaagttggagccgctttgggctctgttgtcttttgctttgttgtgtttcagcttattacaaagcgttaccataaacaccagcttgggcgcattgcctttggtttcctctacacctacatcggcctcgtgctttttttgacgggtgtaaacgtgggctttttcccggtaggcgagcttttgggatcgcagttggcatcatcgccttttaagtgggttctaattccacttggggcaatagtaggttactttattgtggcggcggagccggctgtacacgtgctcaacaagcaggttgaagagatatcatccggcgctattacacaaaagatgatgaacaggggacttgccatcggtatggcttcggccctgactcttacaatggcccgcattctttttcatatcccgattatgtggattttgattcccggttatgtctttgcgctggccctgactttttttgtaccgcggatttttaccggcattgcctttgactctggcggcgtatgctccggccccatgagttccacattccttctgcctttcgcgatgggaacctgcgaaggcgcaaagggagatattttaatagacgctttcggcattgtggctatggttgccatgactcctttaatcgttattcagatgatgggccttatctatcagtacagaaacagacaagccgtagcaatggccaaagaacaggcagcagccatcggtattgccgctcccgacagaaagatcaactggggaggcattactgtgtttgagaacgaaacgtccgaggatattctttaa

SEQ ID NO: 27514 - protein, 264 aa, Unknown
  Obtained from environmental sample
  DOMAIN (6)...(221): Protein of unknown function (DUF1538)
  misc_feature (1)..(264): Xaa is any amino acid
MEVGAALGSVVFCFVVFQLITKRYHKHQLGRIAFGFLYTYIGLVLFLTGVNVGFFPVGELLGSQLASSPFKWVLIPLGAIVGYFIVAAEPAVHVLNKQVEEISSGAITQKMMNRGLAIGMASALTLTMARILFHIPIMWILIPGYVFALALTFFVPRIFTGIAFDSGGVCSGPMSSTFLLPFAMGTCEGAKGDILIDAFGIVAMVAMTPLIVIQMMGLIYQYRNRQAVAMAKEQAAAIGIAAPDRKINWGGITVFENETSEDIL

SEQ ID NO: 27515 - DNA, 564 bp, Unknown
  Obtained from environmental sample
  misc_feature (1)..(564): n is a, c, g, or t
ttgtgtctattggcattcaggcgagtatgtataaacagcttgctggaaatacttaataggattgttgattttttctcttttatcacctactctgctagtatggctttcgccttttacaacacacttggccgtgaaaaacagccttttaagcctctgcaagagggaaaagtaggtttttatggatgcggaccgacagtttataactacgctcatatcggcaacttacgcgcctatgtacatcatgacattttagttcggtctttgcgccgcgcgggttttgacgtaaaccatgtaatgaatattaccgatgtcggccatctttccgacgacgcggacgacggcgaagataaaatggtaaaaagcgcggaagaacggggaaaaagtgttcttgaaatagcggacttttatacaaaggcattttttaacgatactgaaagaatgaacattacgcgcccttcggttgtctgcaaagcaaccgagcatatcggcgaaatgatcgcgttgattcaacgaatagaaaaaaacggctttacttattttgcccggtggcaatctatattttga

SEQ ID NO: 27516 - protein, 187 aa, Unknown
  Obtained from environmental sample
  DOMAIN (48)...(187): tRNA synthetases class I (C) catalytic domain
  misc_feature (1)..(187): Xaa is any amino acid
MCLLAFRRVCINSLLEILNRIVDFFSFITYSASMAFAFYNTLGREKQPFKPLQEGKVGFYGCGPTVYNYAHIGNLRAYVHHDILVRSLRRAGFDVNHVMNITDVGHLSDDADDGEDKMVKSAEERGKSVLEIADFYTKAFFNDTERMNITRPSVVCKATEHIGEMIALIQRIEKNGFTYFARWQSIF

SEQ ID NO: 27517 - DNA, 309 bp, Unknown
  Obtained from environmental sample
  misc_feature (1)..(309): n is a, c, g, or t
ttgggcgaattgtggggtttattgaaggaaggagcggctgagactgaaacacttgcggcaatttttgatatggacagggttttagggattggacttgaaaacgcctgcaaaaccgaagcccaaatcggcggaaaaagcgaagatgacgctttttcgcgggaaattgaagaacttatcgtaaaaagagcggaggcaaaaaaagctaaaaactttgtcgccgcggacagtataagacaaagtttaaaagaacgcggtataatactggaggacggacctgccggaaccacatggcggaaaagcgcattgtaa

SEQ ID NO: 27518 - protein, 102 aa, Unknown
  Obtained from environmental sample
  misc_feature (1)..(102): Xaa is any amino acid
MGELWGLLKEGAAETETLAAIFDMDRVLGIGLENACKTEAQIGGKSEDDAFSREIEELIVKRAEAKKAKNFVAADSIRQSLKERGIILEDGPAGTTWRKSAL

SEQ ID NO: 27519 - DNA, 417 bp, Unknown
  Obtained from environmental sample
  misc_feature (1)..(417): n is a, c, g, or t
atgagctcttcaaaagaaaagaatagacgcatcctggttatcgacgacgaggcggacgtccttgagtttttgaggatctaccttgagacgatgggctgggaggtgacggccgtgcccacggtggcggccgctttcgaagccttggccaatgccccgtacttcttggtcatcaccgacatcgccatgcccgaaatggacgggtatgaacttgtcgacgcggtgaaggaacgaggctaccaatgccgcttcgccctcatgaccggtttcgggtacaaccccaaacacacaatcataaagatcaataaaacaataaaattcccgtgcctcttcaaacctttcaaccgagaaaaggttatggacgcggtaaacgaggcattttccatttatcacagcgatatcagcgatactgcaaattaa

SEQ ID NO: 27520 - protein, 138 aa, Unknown
  Obtained from environmental sample
  DOMAIN (9)...(123): Response regulator receiver domain
  misc_feature (1)..(138): Xaa is any amino acid
MSSSKEKNRRILVIDDEADVLEFLRIYLETMGWEVTAVPTVAAAFEALANAPYFLVITDIAMPEMDGYELVDAVKERGYQCRFALMTGFGYNPKHTIIKINKTIKFPCLFKPFNREKVMDAVNEAFSIYHSDISDTAN

SEQ ID NO: 27521 - DNA, 378 bp, Unknown
  Obtained from environmental sample
  misc_feature (1)..(378): n is a, c, g, or t
atgaaaaagaaaatcttggttatcgaggacgacagcgacatcgccgacctcgtcaagctcgtactcgagaccgacatgttcgaggtgcaagcggttcttgaaccggaatcggccctcagcaaggtcaaagagtataggccggacgccatacttttggatatttgtatgccgaaattggacggttgggcggtgttcaaacagatccgcgggtgcgacgagtttaaaaacgtcccaatcgcgatcttatccggcaagagccagcagttggaccacatggtggggttgcacataatgaacgcggacgcgtatataacaaaaccgttcggaaaaaaagaactgatagacaaaacgtatgagctcttcaaaagaaaagaatag

SEQ ID NO: 27522 - protein, 125 aa, Unknown
  Obtained from environmental sample
  DOMAIN (3)...(118): Response regulator receiver domain
  misc_feature (1)..(125): Xaa is any amino acid
MKKKILVIEDDSDIADLVKLVLETDMFEVQAVLEPESALSKVKEYRPDAILLDICMPKLDGWAVFKQIRGCDEFKNVPIAILSGKSQQLDHMVGLHIMNADAYITKPFGKKELIDKTYELFKRKE

SEQ ID NO: 27523 - DNA, 783 bp, Unknown
  Obtained from environmental sample
  misc_feature (1)..(783): n is a, c, g, or t
atgatggcgaatatcggttcggttaccaacacgctggtcaataacgcggccaacgtgaataccttgaaggaagcctcggaagtaggccgcgccggactgcaggacgtggcgacggacattcaggaaatagcccgtgaatccgagggtttactggaaatcaactcggtaatggaaaatatagccagccagaccaatctgctttccatgaacgcggcgatagaggcggcgcacgccggagaggcgggcaaggggttcgccgtcgtcgctgatgagatacgcaaactggccgtgaattccagcgaacagtcaaaaacgataggtaccgttttgaaaaagataaagggttcaatcgacaaaataataaaatctaccgaaaacgtgctaaacaaattcgaggcgattgactcgagcgtaaaaaccgtcgcggatcaggaggaaaatatccgcaactcaatggaagaacagactacgggaagcaaacaggtacttcaaggcgtaagcgaagtgaacgagattacgcagaaggtaaaaaccgcgtcccagcagatgcttgacggggcgaaggaagtgatacaggagagccttagtctggataaagcgacccaggagataaccggcggcatgaacgagatggcttccggcgcggggcaggtcaataatgcggtaaaccacgtcaatgagataagcggcaaaaaccgcgaaggcattgagatcttgatgcgggaggtttcagggttaaagtgtagtaacgaaacgcttcgcataaaggatccccatgagtaa

SEQ ID NO: 27524 - protein, 260 aa, Unknown
  Obtained from environmental sample
  DOMAIN (3)...(205): Methyl-accepting chemotaxis protein (MCP) signaling domain
  misc_feature (1)..(260): Xaa is any amino acid
MMANIGSVTNTLVNNAANVNTLKEASEVGRAGLQDVATDIQEIARESEGLLEINSVMENIASQTNLLSMNAAIEAAHAGEAGKGFAVVADEIRKLAVNSSEQSKTIGTVLKKIKGSIDKIIKSTENVLNKFEAIDSSVKTVADQEENIRNSMEEQTTGSKQVLQGVSEVNEITQKVKTASQQMLDGAKEVIQESLSLDKATQEITGGMNEMASGAGQVNNAVNHVNEISGKNREGIEILMREVSGLKCSNETLRIKDPHE

SEQ ID NO: 27525 - DNA, 933 bp, Unknown
  Obtained from environmental sample
  misc_feature (1)..(933): n is a, c, g, or t
ttgacattaaattttcaaagggtattatttccagccacgataatctttcgggcttttctctcggtatttgatacaaacgaaccaagaaaagcatttctggttcttaaagacattcatcattattttaggaatggagatccgcgatacaatccggaaattatcgcccgtataaaatccatcgctcaaaggacaatgttccgtgatgacgtgtatacaacaatttttctggtatgctccgaactggaaattccggctgaactggaaaaaatgattaccgtgtttgatattccgcttcccgataatagcgaaattgagaggattatcaccgattatgcgaaagactttcaaattcccctgacagatgaagttctcaacgagcttattgtgtcattcaagggcttaagtgattttgagatacgccagatactgaaccttgcatatcagcagtcgggaacaattgacgctaaagataaagagcttattcttcaggagaaggaacagattatcaaaaaatcaggtattcttgaaatacttactgttaattcttcaatggatgaagtaggcggtttggtaaatttaaaaaaatacctggataacaagtcattaatttttaataatttaggcgaagcccgtaaattcggtattgatttacccaaaggtatattaatcgttgggatgccaggctgcgggaaaagccttaccgccaaagcgacagcggctaaatttaatgtcccgcttctgcgccttgatattggcaagctcatgggaaaatatgtgggggaaagcgagggcaatttaagacgtgccataaaaacggcggaagccgttgccccttgcgtgttgtggatagacgagctggaaaaagcatttgccggtatcggcgggcaaggcggcggaagtgacattaccacgcggttattcggacaattttaa

SEQ ID NO: 27526 - protein, 310 aa, Unknown
  Obtained from environmental sample
  misc_feature (1)..(310): Xaa is any amino acid
MTLNFQRVLFPATIIFRAFLSVFDTNEPRKAFLVLKDIHHYFRNGDPRYNPEIIARIKSIAQRTMFRDDVYTTIFLVCSELEIPAELEKMITVFDIPLPDNSEIERIITDYAKDFQIPLTDEVLNELIVSFKGLSDFEIRQILNLAYQQSGTIDAKDKELILQEKEQIIKKSGILEILTVNSSMDEVGGLVNLKKYLDNKSLIFNNLGEARKFGIDLPKGILIVGMPGCGKSLTAKATAAKFNVPLLRLDIGKLMGKYVGESEGNLRRAIKTAEAVAPCVLWIDELEKAFAGIGGQGGGSDITTRLFGQF

SEQ ID NO: 27527 - DNA, 582 bp, Unknown
  Obtained from environmental sample
  misc_feature (1)..(582): n is a, c, g, or t
atggaggtagattaccttaccatatccgcgcataaaatttacgggccgaaaggaatcggcgccctgtatgtacgcaagggagcgcccctgtttccgcttatccacggcggacatcaggaagacggtctacgggccgggacatacaacaatctgggcattatcggctttggcagggcggcggcaatcgccgcagacgaaattacgcaatacggcggaaaaatcgcccccctccgcgaccgtctgcgcgacgggttgatcgcggcaattcccaacgtaaaaatcaacggtcacccaacggacgtattgcccaatactttgaatgtttcatttcccggcgcggaaggcgaggcaattctcctttccatggatatgttgggaatagaagcgtcaaccggatcggcctgcgcgtcgggaagccttgagccgtcccatgtgcttatggcgataggagtgggaccggaactggcccacggttcgatacgctttagtctgggctggggaatcagcgcggatgatattgattatatcgttgcgactctgccgcacattatcgcccgtctgcgggcaatggcgtccatgtaa

SEQ ID NO: 27528 - protein, 193 aa, Unknown
  Obtained from environmental sample
  DOMAIN (1)...(176): Aminotransferase class-V
  misc_feature (1)..(193): Xaa is any amino acid
MEVDYLTISAHKIYGPKGIGALYVRKGAPLFPLIHGGHQEDGLRAGTYNNLGIIGFGRAAAIAADEITQYGGKIAPLRDRLRDGLIAAIPNVKINGHPTDVLPNTLNVSFPGAEGEAILLSMDMLGIEASTGSACASGSLEPSHVLMAIGVGPELAHGSIRFSLGWGISADDIDYIVATLPHIIARLRAMASM

SEQ ID NO: 27529 - DNA, 675 bp, Unknown
  Obtained from environmental sample
  misc_feature (1)..(675): n is a, c, g, or t
atgatattgattatatcgttgcgactctgccgcacattatcgcccgtctgcgggcaatggcgtccatgtaaaggagttattatgcctgattggttatattcagatacggttaaagaacattttaccagcccccggaatgtccttatggaagacgagtccgtttttgccgccnatgccagagggcagacgggaaacatcaaatgcggggatcaaatgttaatgctcctcaaaattgacaatgacattatcactgatgtgcgttggaaaacctacggctgcgccagcgccattgcctctaccagtatgctctccgagacaataaagggaatgaagctggaagacgcttataaaatcaaacccgaagaccttgtagccaaactcggcgggcttccgagttttaagatacactgttccgtgttaggcgacaaagctcttagggcggcgatagacgattatcttgcaaagacgggacggcaagggctttttgtggaagagaccgttgttatctgccattgcgtaggaattaccgataaagatatagaaaacgcttttcataacggagcgagaaattgggaacagcttcagcaggcgacaaaaataggcactgtctgcggcggctgtaaagaaaaagccgaggatttactccacggctttgaacatatttacggtaattaa

SEQ ID NO: 27530 - protein, 224 aa, Unknown
  Obtained from environmental sample
  DOMAIN (167)...(219): BFD-like [2Fe-2S] binding domain
  misc_feature (1)..(224): Xaa is any amino acid
MILIISLRLCRTLSPVCGQWRPCKGVIMPDWLYSDTVKEHFTSPRNVLMEDESVFAAXARGQTGNIKCGDQMLMLLKIDNDIITDVRWKTYGCASAIASTSMLSETIKGMKLEDAYKIKPEDLVAKLGGLPSFKIHCSVLGDKALRAAIDDYLAKTGRQGLFVEETVVICHCVGITDKDIENAFHNGARNWEQLQQATKIGTVCGGCKEKAEDLLHGFEHIYGN

SEQ ID NO: 27531 - DNA, 984 bp, Unknown
  Obtained from environmental sample
  misc_feature (1)..(984): n is a, c, g, or t
atggacaagccattagaaaagcttattgaagtaaaaaatctgaagctgtactaccatacgtctaacggcgctgtccgggctttggatgatgttagttttgacgtgtataagggagaaactctgggccttgtgggagaatcaggctgcggaaagacaaccacgggagccggcctcctaaagatgccttcgcctcccgggcgcatagaagagggttcatcagttctgataaacggccgtgatataatcccgctttcggacagggaaattcgaaaaactgtccgctggacggaagtcgctatggtattccagggcgcaatgaactgcctgacgccggtgtatacaatcggcaaacagatgatggaaacgctcaaagtgcataccgaaattgaaaaggaggaggcgcaggctttaattaaggaatacttgggttatgtcggccttccacccgaagttaccggacgctatccccacgagctttccggaggaatgaaacagcgcgtagtaatcgcgacggccctgttcctcaagccgaaactgattatacttgacgaaccgacaacggcgctcgatgtaatagttcaggcgcaaattatcaatttattgaaaaccctgaaaaaatctttcgacctgtcgtttatatttattacccatgatctagcgcttgaggccgaggtaagcgacaggatctgcgtgatgtacgcgggaaaaatcgcggaacttggcagcaacgagcagatttacgggaaaaagggtgtcttgcatccgtataccgaaaaactgcttagcgcgactcctttgctcggcaaaaaagtcgattcgctttcgtacattcccggagcgccgcccgatctcatagatccgccaaaaggctgccgctttcatccgcgctgccacgttgcggaagagcggtgcagactggaagaaccgccgcttgccgaaacggaagagggccactgggtttcatgttggaggtgcggaaaatga

SEQ ID NO: 27532 - protein, 327 aa, Unknown
  Obtained from environmental sample
  DOMAIN (238)...(304): Oligopeptide/dipeptide transporter, C-terminal region
  misc_feature (1)..(327): Xaa is any amino acid
MDKPLEKLIEVKNLKLYYHTSNGAVRALDDVSFDVYKGETLGLVGESGCGKTTTGAGLLKMPSPPGRIEEGSSVLINGRDIIPLSDREIRKTVRWTEVAMVFQGAMNCLTPVYTIGKQMMETLKVHTEIEKEEAQALIKEYLGYVGLPPEVTGRYPHELSGGMKQRVVIATALFLKPKLIILDEPTTALDVIVQAQIINLLKTLKKSFDLSFIFITHDLALEAEVSDRICVMYAGKIAELGSNEQIYGKKGVLHPYTEKLLSATPLLGKKVDSLSYIPGAPPDLIDPPKGCRFHPRCHVAEERCRLEEPPLAETEEGHWVSCWRCGK

SEQ ID NO: 27533 - DNA, 489 bp, Unknown
  Obtained from environmental sample
  misc_feature (1)..(489): n is a, c, g, or t
gtgcagactggaagaaccgccgcttgccgaaacggaagagggccactgggtttcatgttggaggtgcggaaaatgagcgatgccagtgataacccaatgagtaattcaatggtagtaattcttaaactgtcggatttgaagaagcatttttccccgcatacaaatctgctggaggtggtcggcggcaaggtgaaaaacccaatcaaagccgttgacggcgtaagttttgaaatcaggcgcggcgagatattcggcctgataggcgaatcgggttcgggaaaaactacgataggcaagcttgtaatgaagctgcttgatcccacaagcgggacaattcattttaacggcgaagacgttacaaagaccgatgcggaacgaacgcaaagctaccgccgccaggttcagatgatctttcaggacccttacgcttccatgaatccgcgttttaaggtgcgcgacgttcttgaggaaccgcttantcatccataa

SEQ ID NO: 27534 - protein, 162 aa, Unknown
  Obtained from environmental sample
  misc_feature (1)..(162): Xaa is any amino acid
MQTGRTAACRNGRGPLGFMLEVRKMSDASDNPMSNSMVVILKLSDLKKHFSPHTNLLEVVGGKVKNPIKAVDGVSFEIRRGEIFGLIGESGSGKTTIGKLVMKLLDPTSGTIHFNGEDVTKTDAERTQSYRRQVQMIFQDPYASMNPRFKVRDVLEEPLXHP

SEQ ID NO: 27535 - DNA, 813 bp, Unknown
  Obtained from environmental sample
  misc_feature (1)..(813): n is a, c, g, or t
atgagggaactcgcgaaagacgaactaaaggaactggaagcaaaactgcgggactctgaggaaaaattgaaattcctccttatcccaaaagacccgttggatgaaaaaaacatcatcatggaaataagagccggtacgggcggagaggaagcggccctgttcgcctcggatatgtaccgcctgtattcccgcttcgcggaaacaaagggctggaaattcgagataatgaattccaacgaaaccgagcttggcggcattaaggaaattgttttttcgatcagcggcaataacgtgtacgagaacctccgctacgaatccggcgttcaccgcgtacagcgggttcccgcaaccgagtcctcaggcagaatccacacgtcggcggtgacggtggcggtgctgcccgaggcggatgaaaccgaaatcgacatcaagccggacgatcttcgcattgacgtaatgcgcgcgggcggcccgggcggccagtgcgtcaacaccacggattccgcagtgcgtataacccatctcccgtccggcattaccgtccattgccaggacgaaaaaagccagattaaaaacaaggccaaggcgatgcgcattctgcgggcgcgtatctacgaaatggaagaggcgaaagccgccgctgaacgcgccgaagcccgaaaatcccaggttggtacaggcgaccgctccgagagaatcaggacttacaatttccccgacaaccgcgtcaccgaccaccgcatcggcctgaccctttacaaacttgaccgcatcatggaaggcgaaatcgccgaggtctttgacgccccttaa

SEQ ID NO: 27536 - protein, 270 aa, Unknown
  Obtained from environmental sample
  DOMAIN (1)...(105): PCRF domain
  misc_feature (1)..(270): Xaa is any amino acid
MRELAKDELKELEAKLRDSEEKLKFLLIPKDPLDEKNIIMEIRAGTGGEEAALFASDMYRLYSRFAETKGWKFEIMNSNETELGGIKEIVFSISGNNVYENLRYESGVHRVQRVPATESSGRIHTSAVTVAVLPEADETEIDIKPDDLRIDVMRAGGPGGQCVNTTDSAVRITHLPSGITVHCQDEKSQIKNKAKAMRILRARIYEMEEAKAAAERAEARKSQVGTGDRSERIRTYNFPDNRVTDHRIGLTLYKLDRIMEGEIAEVFDAP

SEQ ID NO: 27537 - DNA, 381 bp, Unknown
  Obtained from environmental sample
  misc_feature (1)..(381): n is a, c, g, or t
gtggtcggtgacgcggttgtcggggaaattgtaagtcctgattctctcggagcggtcgcctgtaccaacctgggattttcgggcttcggcgcgttcagcggcggctttcgcctcttccatttcgtagatacgcgcccgcagaatgcgcatcgccttggccttgtttttaatctggcttttttcgtcctggcaatggacggtaatgccggacgggagatgggttatacgcactgcggaatccgtggtgttgacgcactggccgcccgggccgcccgcgcgcattacgtcaatgcgaagatcgtccggcttgatgtcgatttcggtttcatccgcctcgggcagcaccgccaccgtcaccgccgacgtgtggattctgcctga

SEQ ID NO: 27538 - protein, 126 aa, Unknown
  Obtained from environmental sample
  misc_feature (1)..(126): Xaa is any amino acid
MVGDAVVGEIVSPDSLGAVACTNLGFSGFGAFSGGFRLFHFVDTRPQNAHRLGLVFNLAFFVLAMDGNAGREMGYTHCGIRGVDALAARAARAHYVNAKIVRLDVDFGFIRLGQHRHRHRRRVDSA

SEQ ID NO: 27539 - DNA, 603 bp, Unknown
  Obtained from environmental sample
  misc_feature (1)..(603): n is a, c, g, or t
atgtctttaatttgttgttataaaggaggaaatatgaaagcgtattatgattacgaagacggatcattctgggctatccgcacggaaggaaaagactgttttacagctaacggaagcaagtaccgcgatttttatcccgaatatatgctgaaagccggaagcgaaaaagaaaaaaatcggcgtatactgccaaactcggcaaaaatctcttgtgagagcgcggaagcggcggaagcctctgcggcaaaaatggctgaagaaaaaagcatatcggctcttaaacaggacgcggaattctggcgtatcgccatagagatcaattcctacctgctcttttttgttcccgacgaatacaagacaaaagaattatgtacgcttgccgttataagaaatggcgcagcgcttatgtacgttccgcctcaaattaaagattatgaactttgcagaaaggcggtaaataataattaccacgcgcttaaatatgttgacgacgaactaaaaacaaaagaaatgtgcgaggcggcggttaaatcatgcgggagcgtacttgaatatgtgccgcagaaatttataacagaggaattatgccggaagcgcgattaa

SEQ ID NO: 27540 - protein, 200 aa, Unknown
  Obtained from environmental sample
  misc_feature (1)..(200): Xaa is any amino acid
MSLICCYKGGNMKAYYDYEDGSFWAIRTEGKDCFTANGSKYRDFYPEYMLKAGSEKEKNRRILPNSAKISCESAEAAEASAAKMAEEKSISALKQDAEFWRIAIEINSYLLFFVPDEYKTKELCTLAVIRNGAALMYVPPQIKDYELCRKAVNNNYHALKYVDDELKTKEMCEAAVKSCGSVLEYVPQKFITEELCRKRD

SEQ ID NO: 27541 - DNA, 579 bp, Unknown
  Obtained from environmental sample
  misc_feature (1)..(579): n is a, c, g, or t
atggaaattaaacgggctacagattttggagacaatattaaagaaaaattagctgaattatacgttaatgcgttttatgatgacgtattaaaatatttctcaagaaataaaactaaactaataaaagtatttgcctgcggttttttgcttgattgtttctatgtagcaataatagataatgaaattatcggaatgcttgcctgtatgggtaaaggtgaagtttgtattaaattggatttgaaaacaattgttaaatatatagggccattaaggggattaattataaatttttatttaaaacagtttttaaaaggatttccagaactcaatgaaaaaacagcattaattgaatatctggctattgatacaaaacatctaagaaaaggcattgcttcaacacttgtcaaatcattatttaaattaactgaatatgaaaattatatattggaggtaataggaacaaataaaaaagctattaaattgtatgacaaattaggttttaaagttgtagatataaaaccatattttccaagtgtatatttctgcatggaatatacaaaagaagaaaaaattgaataa

SEQ ID NO: 27542 - protein, 192 aa, Unknown
  Obtained from environmental sample
  DOMAIN (54)...(168): Acetyltransferase (GNAT) family
  misc_feature (1)..(192): Xaa is any amino acid
MEIKRATDFGDNIKEKLAELYVNAFYDDVLKYFSRNKTKLIKVFACGFLLDCFYVAIIDNEIIGMLACMGKGEVCIKLDLKTIVKYIGPLRGLIINFYLKQFLKGFPELNEKTALIEYLAIDTKHLRKGIASTLVKSLFKLTEYENYILEVIGTNKKAIKLYDKLGFKVVDIKPYFPSVYFCMEYTKEEKIE

SEQ ID NO: 27543 - DNA, 993 bp, Unknown
  Obtained from environmental sample
  misc_feature (1)..(993): n is a, c, g, or t
atgatggccgaggaaagggcttgtcagtttcgagaaggcaaagcccagttggagcgcgacgtgcgcaaggcgtatcacaacatgctgctgctgcaggaaaacatcaacctgcttcgcggaagttttgaaaacgcggggcgtcaggtgcaaatggcgcaggcaaattataacgcgggactcgcgccggagcttacttttttacaggcgcaggtggcaagggaaaaccttagacccgtaatcgatcaggcggaaaacggtttaaaactttctatggcgcaatttgccatgttcctgggcttggattacaacacgccttttgaccttgaacctgtaaaaggaaacacaaactttattcccattgacgtggcgcagatgatttcaaaggcggcttcgggaaaaccggacattcaggaattaagacaggacattttaacattaaacagcgttaaaaagtccacatggtacagattgtacacgccgaccctttctttaagctggagcgccgatcccactttccaaaaagatccatggaaagactcatggttcggcgataaggacaattggaaacagcagtcgggaagcttcaggatttctgtgggattcaggttaaacgggcttataccttacacttccgaacatcagggattaaaaactctggatgatcaaatatcgataattacccttggattaacgcagatgattcgcggaacggaaattgaaatttacaatacagtgctcgcgctggaaagagcgcgtatcagcgcgcaggctcaggctcagactgtaaaccttgcggaacagtcctaccgtcttacggagcaggcttatcaggcgggcttgcaggattatttccaggttcaaaacgcggaacaatccctgcggcaggcgcgcgttcaactgcttgagcagcagtttaattatcttaacggtcttatcgatcttgaatattcaattggagtcccgtttggaactctttcaggaaggagcaaataa

SEQ ID NO: 27544 - protein, 330 aa, Unknown
  Obtained from environmental sample
  DOMAIN (122)...(319): Outer membrane efflux protein
  misc_feature (1)..(330): Xaa is any amino acid
MMAEERACQFREGKAQLERDVRKAYHNMLLLQENINLLRGSFENAGRQVQMAQANYNAGLAPELTFLQAQVARENLRPVIDQAENGLKLSMAQFAMFLGLDYNTPFDLEPVKGNTNFIPIDVAQMISKAASGKPDIQELRQDILTLNSVKKSTWYRLYTPTLSLSWSADPTFQKDPWKDSWFGDKDNWKQQSGSFRISVGFRLNGLIPYTSEHQGLKTLDDQISIITLGLTQMIRGTEIEIYNTVLALERARISAQAQAQTVNLAEQSYRLTEQAYQAGLQDYFQVQNAEQSLRQARVQLLEQQFNYLNGLIDLEYSIGVPFGTLSGRSK

SEQ ID NO: 27545 - DNA, 702 bp, Unknown
  Obtained from environmental sample
  misc_feature (1)..(702): n is a, c, g, or t
atgaaaacaaatatttcacgtaacaaaaaaatatacggaatctgcggagtaattctgttattaatactggcatcctcattttccggatgcaaaaaagataaaaaggcggcggaaagggcaagggaagttccggtattcgcagttaataccactcttgcggttaaaggacaaatacaggattacctgacattttcaggcgacattgtagctggttctacaatagacgtttatcccgaagcggtgggaaaagtaacggaagtttttgtgtccgtaggcgacagggtaagcaggggcagtcaaattgcgtccgtcgatccttcacgcccgggaatgacattccgccagaacatagcgacatccccgattagcggcactgtcgtcatgattcctgcccaagtgggaatgaccgtaagtcaagcggtgcctctggcgcgcatatcangcggaggcgcgcttganattaaattgaatatcgcagaaagatttatttcaagaatagcgatgaatcagtcatgtgaaattacgcttgacgcgtggcccggcgacatattccgcgggaacataagcgaagtatcgcccaccgtcgatttggcgtcacgcacaatggaagcgcgggtaaacgtaagggactcaagttccaaattaaaaccgggaatggtcccaaaggtgcgcgttatacggaacgaaaaagcaatgttgtaa

SEQ ID NO: 27546 - protein, 233 aa, Unknown
  Obtained from environmental sample
  SIGNAL (1)...(24)
  DOMAIN (66)...(146): Biotin-requiring enzyme
  misc_feature (1)..(233): Xaa is any amino acid
MKTNISRNKKIYGICGVILLLILASSFSGCKKDKKAAERAREVPVFAVNTTLAVKGQIQDYLTFSGDIVAGSTIDVYPEAVGKVTEVFVSVGDRVSRGSQIASVDPSRPGMTFRQNIATSPISGTVVMIPAQVGMTVSQAVPLARISXGGALXIKLNIAERFISRIAMNQSCEITLDAWPGDIFRGNISEVSPTVDLASRTMEARVNVRDSSSKLKPGMVPKVRVIRNEKAML

SEQ ID NO: 27547 - DNA, 447 bp, Unknown
  Obtained from environmental sample
  misc_feature (1)..(447): n is a, c, g, or t
atggacatggacagcgccattgagtcattcttgcggtacgcgcgttccaggataaccaagccaatttcccttgacatttacggcgccaacggctggtatcgtaccggagcaagaaccggccaggaagttgaaatactttacaaatacgtagacgttatctgcccgatgtactacccaagccactttgaacagaccttccttgcgcaaaacccgcctgaagagcgcccctacaggatctattatttgggaacaagaagaactcttattattgccaggggacgggtaatagttcgcccttgggcgcaggctttttaccttaacgtttcctatgaccggaaatattacaacaacgactatgtacgcctgcaactggatggagtacgcgccgccggcaagggcggccttacctactggaataacagcggccgttacgacgatattccatag

SEQ ID NO: 27548 - protein, 148 aa, Unknown
  Obtained from environmental sample
  misc_feature (1)..(148): Xaa is any amino acid
MDMDSAIESFLRYARSRITKPISLDIYGANGWYRTGARTGQEVEILYKYVDVICPMYYPSHFEQTFLAQNPPEERPYRIYYLGTRRTLIIARGRVIVRPWAQAFYLNVSYDRKYYNNDYVRLQLDGVRAAGKGGLTYWNNSGRYDDIP

SEQ ID NO: 27549 - DNA, 351 bp, Unknown
  Obtained from environmental sample
  misc_feature (1)..(351): n is a, c, g, or t
atgcagggtatttccaaagaaatggaagaagccgccgaaattgacggttgcggtaaattcctgacttttttcaggatattgttccctctttcaaaatcgggacttgcgaccctggccatttataacggggttgtaatttggaatgaatttgtatttgcctcggtgctaaccaattcccaggcatcccagacgctgccgctggcaatttataattaccaggggcaatattcgataaatataccgttaatcatgaccttgctggttctttcttccctgccagtcattatattgtacattttcggccaggacaaactggtcaaaggtatgatggccggcgccgtgaagggctaa

SEQ ID NO: 27550 - protein, 116 aa, Unknown
  Obtained from environmental sample
  misc_feature (1)..(116): Xaa is any amino acid
MQGISKEMEEAAEIDGCGKFLTFFRILFPLSKSGLATLAIYNGVVIWNEFVFASVLTNSQASQTLPLAIYNYQGQYSINIPLIMTLLVLSSLPVIILYIFGQDKLVKGMMAGAVKG

SEQ ID NO: 27551 - DNA, 864 bp, Unknown
  Obtained from environmental sample
  misc_feature (1)..(864): n is a, c, g, or t
ttggaggtcaaattgattagaggatggtatactgccgcaagcggaatgcgcgcgcaacaatggcggctggacgcggtggcgaacaatcttgccaatgtgaacaccgacggctacaaacgcgatgtggcggctttcaaggcctttcctgaactgctcatacgcagacaggacgatgacggtgtctatcagcatcccttcggttcagccgatgccgctcccatcgttggaaaaatgggcaccggcgttgagttaaacgagctttacaccgcttttgaacagggctccttcaaagaaacccagaacgattttgacattgccctggacggaaaaggtttttttgccgtttccacgccctggggcgagcgctatacccgcaatggctctttccagcttggcaaagaaggttaccttgaaaccaaagaaggttatccggtacttggggaatacggtccgataagggtaaaagccaataattttcagatagacaaggacggcaggatatgggtaaacgcggcaatcagcgatgatcccgatgtaatggtaagcatcacaagcaataattgggaagaccaggtacagcttgataccctcaaattggtcgaattcgagcttgaccgctaccttgaaaaacagggctccagcctgtaccgcgaaagtgacacctcaggccccgcaaggataattgaacagggcaaacggccaaaggttgtacagggctttgtcgaagcggcgaatgttgaccccgtggccgagatggtgcagatgatcgaggtgaaccgctcatacgaggcgaaccaaaaaataatccaggttgaagaagccgcccttggcactttaatcaaccaggtaatgaaattcggctga

SEQ ID NO: 27552 - protein, 287 aa, Unknown
  Obtained from environmental sample
  DOMAIN (244)...(282): Domain of unknown function (DUF1078)
  misc_feature (1)..(287): Xaa is any amino acid
MEVKLIRGWYTAASGMRAQQWRLDAVANNLANVNTDGYKRDVAAFKAFPELLIRRQDDDGVYQHPFGSADAAPIVGKMGTGVELNELYTAFEQGSFKETQNDFDIALDGKGFFAVSTPWGERYTRNGSFQLGKEGYLETKEGYPVLGEYGPIRVKANNFQIDKDGRIWVNAAISDDPDVMVSITSNNWEDQVQLDTLKLVEFELDRYLEKQGSSLYRESDTSGPARIIEQGKRPKVVQGFVEAANVDPVAEMVQMIEVNRSYEANQKIIQVEEAALGTLINQVMKFG

SEQ ID NO: 27553 - DNA, 816 bp, Unknown
  Obtained from environmental sample
  misc_feature (1)..(816): n is a, c, g, or t
ttgtttatgccgcttgcccaaagcgctgaagccgccccgtggacagaaacgctaacgtcattagaaaaaatgaaggttcctgtttttgtttggaacgatgaaaattcaaatattgtcattaattcagatatcataatcgacggtatttccggaaccggcatttcggggcctcttcgcggggctgccctggaaatggttaacgcgataaactctcaaaaaacaaacaagcctttagttgtttcagtggatatcccgtcgggaaactcagacgagtggaagccgggtatgcctatagtccaggcagaccttactttggcaattgaacctcaaaagagctgtatctataatcctgcggcccggccttacgcggggataattttgcccgtaaacggaatctttccaaaggaaatcatcgttcgatactgcgaagttaaacgcggcgcggaattgcttgattgggaaagcgcctgcttaaaaatttctaaagtaaaagcgtacgcccataaatacgaaaggggatgcgtggaaatccgcgcaggttccgctggaactacgggggccgccttaatcgcggcgcggggcgcacaggcggcgggggcggggcttatccgccttgtcctggatgacgatatctaccccatacttgcctcagtcgccggcggagtcatgatttccccggtatccggcgagactaaggattttgagggaaaatttacgcccgacgcgatacttcttgggccgggctggggcagggcggaaaaccgcgctaaggttctggaaagggctctgcaaaaggaaaaacaggaacgcccttaa

SEQ ID NO: 27554 - protein, 271 aa, Unknown
  Obtained from environmental sample
  DOMAIN (1)...(113): YjeF-related protein N-terminus
  misc_feature (1)..(271): Xaa is any amino acid
MFMPLAQSAEAAPWTETLTSLEKMKVPVFVWNDENSNIVINSDIIIDGISGTGISGPLRGAALEMVNAINSQKTNKPLVVSVDIPSGNSDEWKPGMPIVQADLTLAIEPQKSCIYNPAARPYAGIILPVNGIFPKEIIVRYCEVKRGAELLDWESACLKISKVKAYAHKYERGCVEIRAGSAGTTGAALIAARGAQAAGAGLIRLVLDDDIYPILASVAGGVMISPVSGETKDFEGKFTPDAILLGPGWGRAENRAKVLERALQKEKQERP

SEQ ID NO: 27555 - DNA, 771 bp, Unknown
  Obtained from environmental sample
  misc_feature (1)..(771): n is a, c, g, or t
gtggagatccggggatgggtcaggacaaggcgggagatgaaaaaccttgtctttgtagagatgaacgacggctcctgcctcgcgggtatacagtgtacctttgaccggggtagcggtacaatcccggatgaaactgaaaaggccctcgcgaatgtaagcacaggcgcggcggctgttataaaagggaagcttgttccttctccggcttccggccaggcggtggaagtgtccgccgtatccctgacgatactcggggatgctccggcggaaaaccgagataattatcccggctatccgttacagaaaaaacggcactcgatggaattcctgcgggagatcgcccatttaaggcccaggacgaacaccttcggcgcgacattgaggcttcgcagccgtatggcattcgccatccacgagtattttaccggacacggctttcaatacattcacacgccgattattacggccggtgacgccgaaggcgcgggcgcaatgttccaggtgacgacgcttgaccttgaggcgctggcaaaagcggggaacgctcatgccctcagctacgacaaagacttctttggcaaaaaaacattccttaccgtttccggccagcttgaggctgaaacctgcgccacggccctttcccgcgtatatacattcggcccgacattccgcgcggaaaattccaataccacccggcatcttgccgagttctggatggttgagcctgaaatcgcctttgccgatcttggcgacgatatggcgttagcctga

SEQ ID NO: 27556 - protein, 256 aa, Unknown
  Obtained from environmental sample
  DOMAIN (106)...(256): tRNA synthetases class II (D, K and N)
  misc_feature (1)..(256): Xaa is any amino acid
MEIRGWVRTRREMKNLVFVEMNDGSCLAGIQCTFDRGSGTIPDETEKALANVSTGAAAVIKGKLVPSPASGQAVEVSAVSLTILGDAPAENRDNYPGYPLQKKRHSMEFLREIAHLRPRTNTFGATLRLRSRMAFAIHEYFTGHGFQYIHTPIITAGDAEGAGAMFQVTTLDLEALAKAGNAHALSYDKDFFGKKTFLTVSGQLEAETCATALSRVYTFGPTFRAENSNTTRHLAEFWMVEPEIAFADLGDDMALA

SEQ ID NO: 27557 - DNA, 534 bp, Unknown
  Obtained from environmental sample
  misc_feature (1)..(534): n is a, c, g, or t
gtggaaaagggcgttattgacaccttgacgcatgtggtgaattcaaaattcgcccatatgagttacacggacgccattgccgagctggaaanagcggtaaaagccggaactgtttttgaattcaatccttgctggggatctgatttacagagcgaacatgagaagtaccttaccgagaaggtcgccgcaggcccggttatcgttacggattacccgaaaaacatcaaggctttttatatgaagcaaaacgacgacggcaggaccgtcagggctatggacgtgctggttccccgtctaggcgaaattatcggcggctcccagcgcgaggagaaccttgaaaaactcatcttccgcatgacggaaatgggaatgaatgtcaatgattattcctggtatctggatctgcgccgttacggctccgtcccccatgcgggatttggacttggttttgagcggctgattcaatatataaccggaatggcaaacatcagggacgttattcccttcccccgagccgtaggacagatcaaataa

SEQ ID NO: 27558 - protein, 177 aa, Unknown
  Obtained from environmental sample
  DOMAIN (1)...(174): tRNA synthetases class II (D, K and N)
  misc_feature (1)..(177): Xaa is any amino acid
MEKGVIDTLTHVVNSKFAHMSYTDAIAELEXAVKAGTVFEFNPCWGSDLQSEHEKYLTEKVAAGPVIVTDYPKNIKAFYMKQNDDGRTVRAMDVLVPRLGEIIGGSQREENLEKLIFRMTEMGMNVNDYSWYLDLRRYGSVPHAGFGLGFERLIQYITGMANIRDVIPFPRAVGQIK

SEQ ID NO: 27559 - DNA, 597 bp, Unknown
  Obtained from environmental sample
  misc_feature (1)..(597): n is a, c, g, or t
ttgccagagacttttccagcaaaatcaagaattttgcagttgctaatagaagcaaacaaaaccacaaacctagtttcaaaaaatgacgagcaaaaacttctancaaggcacgttgcagattccnttatatttgcaacacaccccgccgtcattgtatgcgcacccctacaatgggcagacataggctctggtgcagggtttcccgttattccccttagcctttattttccgcaaataaaattttatgccacagaaagtcgcaaaaaaagatgcgattttttaaaatttgcaaagcaaaatttaaatttgtcaaatttggaagtaattcaaggtaaagcggagaattgtggattaaaaaatatggattttgtctcttgccgtgcggttggctctttggacgaagattttgagagggcaaaaaaaatcctaaaaaaaaatggacattttttaacggtaaagtcaaaacgattggctgacgagatgagaacaaaaaataataagctgctaaaatgcgcaaaaataatgaattaccgcttgccagaggaagaaatggaatatatttttctaagttttgctataggagaacttttattatga

SEQ ID NO: 27560 - protein, 198 aa, Unknown
  Obtained from environmental sample
  DOMAIN (4)...(184): Glucose inhibited division protein
  misc_feature (1)..(198): Xaa is any amino acid
MPETFPAKSRILQLLIEANKTTNLVSKNDEQKLLXRHVADSXIFATHPAVIVCAPLQWADIGSGAGFPVIPLSLYFPQIKFYATESRKKRCDFLKFAKQNLNLSNLEVIQGKAENCGLKNMDFVSCRAVGSLDEDFERAKKILKKNGHFLTVKSKRLADEMRTKNNKLLKCAKIMNYRLPEEEMEYIFLSFAIGELLL

SEQ ID NO: 27561 - DNA, 888 bp, Unknown
  Obtained from environmental sample
  misc_feature (1)..(888): n is a, c, g, or t
atggaaacaacagaatcgaccagtctcttataccgggacataataggggtacaaaccccatgggcaataacaggcgtagagaaggatgagcggctgaggagaataaccgtaaagattgaacatgcccgggaaaacacaataccatgtcccgcatgcggcggggaaacaaaagtatatgaccaccggataagggtgttaagatatttggacacatgccaatatgaaacattccttgaggtgcacatacccagggtgaagtgtgaagaagacggggtgcaacaaatagaaataccgtttgcggagaaacattcgcagtttaccagccgttttgagatggccgtgctggtatggctggaaagcagcccgatatcaaaagtagccgggaacttcaatttgagttgggatgaagcggacgggataatgcaaagagcggtgcaacgggggcttgcccggcgggaacaggagaaagttggcaacatcgggatagacgagacgtcatatcagaaaaggcataagtatgtaacggtaatactggacaaagaccgggactgtgtaataggcgtgcttgacgaccggaaggcggaaacggtggaaacatggcttaatacgcaggaaagcgtcgatttaagcgaattagagagcgtttccatggatatgtgggatccgtatataaaagcggtacgggcggcgatacccgaagcggaccggaagatagcgttcgaccggtttcatgtgagcaagcatataaacgaggcgctggataaagtaaggcggagggaacaccgcgcgttcatggaacaggcaggagaaagcccgttaagtaaaagccggttccaatggctgacaaactcaaaccggactgataaccgcagcgggaagcgttcatga

SEQ ID NO: 27562 - protein, 295 aa, Unknown
  Obtained from environmental sample
  DOMAIN (159)...(260): Transposase
  misc_feature (1)..(295): Xaa is any amino acid
METTESTSLLYRDIIGVQTPWAITGVEKDERLRRITVKIEHARENTIPCPACGGETKVYDHRIRVLRYLDTCQYETFLEVHIPRVKCEEDGVQQIEIPFAEKHSQFTSRFEMAVLVWLESSPISKVAGNFNLSWDEADGIMQRAVQRGLARREQEKVGNIGIDETSYQKRHKYVTVILDKDRDCVIGVLDDRKAETVETWLNTQESVDLSELESVSMDMWDPYIKAVRAAIPEADRKIAFDRFHVSKHINEALDKVRRREHRAFMEQAGESPLSKSRFQWLTNSNRTDNRSGKRS

SEQ ID NO: 27563 - DNA, 624 bp, Unknown
  Obtained from environmental sample
  misc_feature (1)..(624): n is a, c, g, or t
atggcggatttaaaaagcgattcgataaaaaacgccaaaaagggcagttatacgattatcggttacctaaaatcgcttagggaatttaaagataaaaatgataatgatatggctttcggaacattgcaggattttgagggtgacattgatcttgttttcttttccagagtttattccgaatgccgtacccttttgaatcttgatgaaattatcgcctttagagggaatatcgatcccgaaaacgagcgtgatccgcaaaaggtaagttttaaggtttccagtatagccgattttgcccaactgacgcgcatcgcggcgcgcaaagccgcgtcgggggaagcgcccccctcgcgtactatcgaagaacgcaagccgacggaagaaaagcaggatgaaattcacataaaattaattgagggagccgcggacaatgaagaaaacctgattccgttacgcgactatcttgcggaaaataccggttcttgtgtaatatatcttcatgttccggtatccgggaaagaaaaagtaatacgcgcgttttcaggcgttgaaatttccggtaacaatgatgttatagaagaattaaaaaaatgcaaatgcgtaagcatggtatggaggaagtga

SEQ ID NO: 27564 - protein, 207 aa, Unknown
  Obtained from environmental sample
  DOMAIN (17)...(98): OB-fold nucleic acid binding domain
  misc_feature (1)..(207): Xaa is any amino acid
MADLKSDSIKNAKKGSYTIIGYLKSLREFKDKNDNDMAFGTLQDFEGDIDLVFFSRVYSECRTLLNLDEIIAFRGNIDPENERDPQKVSFKVSSIADFAQLTRIAARKAASGEAPPSRTIEERKPTEEKQDEIHIKLIEGAADNEENLIPLRDYLAENTGSCVIYLHVPVSGKEKVIRAFSGVEISGNNDVIEELKKCKCVSMVWRK

SEQ ID NO: 27565 - DNA, 909 bp, Unknown
  Obtained from environmental sample
  misc_feature (1)..(909): n is a, c, g, or t
atgctgcctgaatggagtttcggcctgtggctttcaacttcatttacgacttcgtacgatgaaaaaacggttatgagttttatcaacggcatggaagaacataaaatccccctttctgtttttcattttgactgtttctggatgaaagggtttaactggtgcgactttacctgggataaggaagtttttcctgacccggcaggaatgttatcgcggattaaggcaaaggggataaaaatctgcgtatggattaatccgtacatagcgcagaggtcttgtctttttgaggaaggaaagaaaggcggctattttttaaaacaaaagaacggttctgtataccaaacagatcaatggcaggcaggaatggctattgtggatttttccaatccaggcgctgttaaatggtatttaagttatttggaaaaactattggatatgggagttgattgttttaagacagacttcggcgagcgtattccggaagatgcggttttttttgacggaggcgacccggagcgtcatcataatttttatacatatctgtacaataaaagcgtatttgagcttttggaaaaaaagcgagggaatggggaggcgtgcctttttgcccgttccgccgccgccggctgccagaaatttcctttgcattggggaggcgactgcgaatcaacatttgaggcaatggcggaaactttacgcggcgggctttctctgggactttcaggttttggtttttggagccatgatatcggcggttttgaaggaatgcgaacgccgcgcttttcaaacgctggcttgcctntgggctgctttcatcccattcgcggctgcacggcagcacttcctaccgtgttccgtggagcgtggacgaagaatccgtcgaagtctgccgcttttttaccgaactga

SEQ ID NO: 27566 - protein, 302 aa, Unknown
  Obtained from environmental sample
  DOMAIN (1)...(298): Glycosyl hydrolases family 31
  misc_feature (1)..(302): Xaa is any amino acid
MLPEWSFGLWLSTSFTTSYDEKTVMSFINGMEEHKIPLSVFHFDCFWMKGFNWCDFTWDKEVFPDPAGMLSRIKAKGIKICVWINPYIAQRSCLFEEGKKGGYFLKQKNGSVYQTDQWQAGMAIVDFSNPGAVKWYLSYLEKLLDMGVDCFKTDFGERIPEDAVFFDGGDPERHHNFYTYLYNKSVFELLEKKRGNGEACLFARSAAAGCQKFPLHWGGDCESTFEAMAETLRGGLSLGLSGFGFWSHDIGGFEGMRTPRFSNAGLPXGCFHPIRGCTAALPTVFRGAWTKNPSKSAAFLPN

SEQ ID NO: 27567 - DNA, 369 bp, Unknown
  Obtained from environmental sample
  misc_feature (1)..(369): n is a, c, g, or t
gtggacgaagaatccgtcgaagtctgccgcttttttaccgaactgaagctccgccttaaaccgtatattctgcaatgcgcgcgtgaagcgcacgagaaaggcgtcccggtactgcgggccatgttcattgaattccccgacgatccggcctgcgcctaccttgaccgccagtatatgctggggccggacctgctcgtcgcgccggtgttcagtgaaaacggggaagttacctattatctgcccgaaggcgaatggacgggcctcctctcaggtgagacagtcaaaggcggctgctggaaaaccgaaaaacacggcttcctaagcctgcccctttggaaacgaccccgatccctggtccccagtccctga

SEQ ID NO: 27568 - protein, 122 aa, Unknown
  Obtained from environmental sample
  misc_feature (1)..(122): Xaa is any amino acid
MDEESVEVCRFFTELKLRLKPYILQCAREAHEKGVPVLRAMFIEFPDDPACAYLDRQYMLGPDLLVAPVFSENGEVTYYLPEGEWTGLLSGETVKGGCWKTEKHGFLSLPLWKRPRSLVPSP

SEQ ID NO: 27569 - DNA, 972 bp, Unknown
  Obtained from environmental sample
  misc_feature (1)..(972): n is a, c, g, or t
atgactcttcgccccaagtatctgtccgaatttatcgggcagaagataatgaaggaaaatctttcggtatttattacaaccgccaaacagcgcggcgaaagccttgatcatctgtttttaatagggcctccgggtttgggcaagaccactcttgcgcaggtagtcgcgaatgagcttgaaacgggctttgtgcaaacatccgctcccgctctggacaagcctaaagacctggtggggttattaacaaatctaaaaaaaggcgatgttttttttatagatgaaatacacaggctaaaacccgctattgaggaattgctgtatatcgccatggaagactacggaattgactgggtagtggggcaggggcctatggcaaggacattaagaatcgccattaacccgtttacgcttgtgggcgcgactacaaaagcgggaattgtctccggccctttaataagccgtttcggaattacctgccgtttttctttttacgaacaggaagacatggaagccatagtgcgccgctccgcagggcttttggatataaaaattcaaaacgacgccgcttctttattggcgaaatcttccaggggtactccgcgcgtagtgaacaggcttttacggcgtatgcgggatttcgcccagtattcgggagaaaaatcaatcacactgtctgtggttcagtcgggactgtcacggctggaaattgacgctctcgggcttgagaaacaggacagggatattcttaaaattattattgagcgttataaaggcgggcctgtaggcgcggatacgcttgccatttccataggtgagtctgttgagactctggaagattactacgagccctaccttattcaagccggccttttgcagcgaagcccgcgcggaagaatggtaacaagccttgcttacggccatttggggcttgcgtcccccgcangcgtaaacggcgaaggttctctcttttaa

SEQ ID NO: 27570 - protein, 323 aa, Unknown
  Obtained from environmental sample
  DOMAIN (3)...(217): Bacterial  dnaA  protein
  misc_feature (1)..(323): Xaa is any amino acid
MTLRPKYLSEFIGQKIMKENLSVFITTAKQRGESLDHLFLIGPPGLGKTTLAQVVANELETGFVQTSAPALDKPKDLVGLLTNLKKGDVFFIDEIHRLKPAIEELLYIAMEDYGIDWVVGQGPMARTLRIAINPFTLVGATTKAGIVSGPLISRFGITCRFSFYEQEDMEAIVRRSAGLLDIKIQNDAASLLAKSSRGTPRVVNRLLRRMRDFAQYSGEKSITLSVVQSGLSRLEIDALGLEKQDRDILKIIIERYKGGPVGADTLAISIGESVETLEDYYEPYLIQAGLLQRSPRGRMVTSLAYGHLGLASPAXVNGEGSLF

SEQ ID NO: 27571 - DNA, 588 bp, Unknown
  Obtained from environmental sample
  misc_feature (1)..(588): n is a, c, g, or t
atgctccagttcctgggtctgccggccaatggcctccaagagccgatggtgttcctcggcataatcccggaaatgttcggtgcgtgcatgtatggcccgaagcttggccgcggccaccatgttcatggccttggtcagtttttgagtctgcttgacagcgcgaatctggcgcttgatgtctttgagcgaggccataaaatattaccccttgaaaattcagacgcccggggtgaaaaccgaggcgaactcggtcagggcttccttgatgcgggcgtccagatcaggggaaatatctttgagttcccgaagctctttcagaattcccgggtgggtggcctctatgaactcaaacatctctctttcatattcggccacggccgaaaccggataggggtccagaaagccccgggtgccggcgaagagggtgagaacctccttttccgcggacatgggttgatattgcggctgcttcaatatttcaaccatgcgctggccgcggttcagctgggccagggtggctttgtccaagtcggagccgaattggctgaaagcggcaagttcgcggtattgggccaagtccagttttag

SEQ ID NO: 27572 - protein, 195 aa, Unknown
  Obtained from environmental sample
  misc_feature (1)..(195): Xaa is any amino acid
MLQFLGLPANGLQEPMVFLGIIPEMFGACMYGPKLGRGHHVHGLGQFLSLLDSANLALDVFERGHKILPLENSDARGENRGELGQGFLDAGVQIRGNIFEFPKLFQNSRVGGLYELKHLSFIFGHGRNRIGVQKAPGAGEEGENLLFRGHGLILRLLQYFNHALAAVQLGQGGFVQVGAELAESGKFAVLGQVQF

SEQ ID NO: 27573 - DNA, 804 bp, Unknown
  Obtained from environmental sample
  misc_feature (1)..(804): n is a, c, g, or t
atgtggcatggcaccaacgggcagccagcgggaaagacaaccccgggccaaaacgcgctctgcatctatgacgacctttccaagcaggccgcagcctaccgcgagatttcgcttttgatgaggcgcccaccagggcgcgaggcttaccccggcgatgttttttaccttcacagccgcctactcgagcgcgctgccaagctgagccccgaaagagggggcggctcgatgaccgccctgcctataatcgaaacgcaggctggcgacatttccgcatacatccccaccaacgtcatctccatcacggacggccaattgttccttgaagccgacctatttaactcaaacgtccgcccagccatcaacgtcggcatatccgtcagtcgcgtcggcggcgccgcccaattgaaggccatgaagcaagtgtctggctcgctaaaactggacttggcccaataccgcgaacttgccgctttcagccaattcggctccgacttggacaaagccaccctggcccagctgaaccgcggccagcgcatggttgaaatattgaagcagccgcaatatcaacccatgtccgcggaaaaggaggttctcaccctcttcgccggcacccggggctttctggacccctatccggtttcggccgtggccgaatatgaaagagagatgtttgagttcatagaggccacccacccgggaattctgaaagagcttcgggaactcaaagatatttcccctgatctggacgcccgcatcaaggaagccctgaccgagttcgcctcggttttcaccccgggcgtctga

SEQ ID NO: 27574 - protein, 267 aa, Unknown
  Obtained from environmental sample
  DOMAIN (7)...(127): ATP synthase alpha/beta family, nucleotide-binding domain
  misc_feature (1)..(267): Xaa is any amino acid
MWHGTNGQPAGKTTPGQNALCIYDDLSKQAAAYREISLLMRRPPGREAYPGDVFYLHSRLLERAAKLSPERGGGSMTALPIIETQAGDISAYIPTNVISITDGQLFLEADLFNSNVRPAINVGISVSRVGGAAQLKAMKQVSGSLKLDLAQYRELAAFSQFGSDLDKATLAQLNRGQRMVEILKQPQYQPMSAEKEVLTLFAGTRGFLDPYPVSAVAEYEREMFEFIEATHPGILKELRELKDISPDLDARIKEALTEFASVFTPGV

SEQ ID NO: 27575 - DNA, 546 bp, Unknown
  Obtained from environmental sample
  misc_feature (1)..(546): n is a, c, g, or t
atgaaaaatcaaaccattgtcaaccgttacgcgcgcgctctactgagcctgggtctggctgacgggcagtatgaccgctatggcctggaactcaaggaactggccggagccttggccgacttgggcgaagaggctaaaatcctggtttcgcccggttacccggccggactccgccgttcgatactggaattgattctggccaaggcggccttgagccctttggtggccaatttcgttctgcttttgctggacaaaggccacctgagccgcttaagcgaggtggccgccacctacaatgccttggccgatgctgaaaaaggtttggtccgggccagcctgaccagcgcctctcctttgagcggggcggaaatagaggcgctcaaaacctccctaagccgcttctccggccgccaggttgaactgaccgccgaccaggagccgggtctcatcggcggattggtggttcgcttgggagatttgattattgatggcagcgtccgcacccagctcggccgcatggccgcccgcctggagaggctcgcttga

SEQ ID NO: 27576 - protein, 181 aa, Unknown
  Obtained from environmental sample
  DOMAIN (6)...(177): ATP synthase delta (OSCP) subunit
  misc_feature (1)..(181): Xaa is any amino acid
MKNQTIVNRYARALLSLGLADGQYDRYGLELKELAGALADLGEEAKILVSPGYPAGLRRSILELILAKAALSPLVANFVLLLLDKGHLSRLSEVAATYNALADAEKGLVRASLTSASPLSGAEIEALKTSLSRFSGRQVELTADQEPGLIGGLVVRLGDLIIDGSVRTQLGRMAARLERLA

SEQ ID NO: 27577 - DNA, 1020 bp, Unknown
  Obtained from environmental sample
  misc_feature (1)..(1020): n is a, c, g, or t
ttgatggcagcgtccgcacccagctcggccgcatggccgcccgcctggagaggctcgcttgaggcgccgcccagaaaaaatcgcaattacgatcacgaaggagctgtcatgcccataagagcggaagagataagcgaaatcatcaggtcgcaaatcaaggattacggacgccaggtggaactggctgaaaccggcaccgttctgtccgtcggcgatggcgtggccaaggtttacggcgtggccaaggccatggccatggaactattggaattccctcatggaattctgggcatggtcctcaacctggaagaggataacgtgggcgtggcggtcttgggcgatgtggagcatatcaaggaaggggatttggtcaagcgtaccggccgcatagcccaagtgcccgtgggcgacgcccttctgggccgggtggtggacggcgtgggccagcccctggacggcaaggggcccattgaagccaaggaattcggtctcattgaagtggtggccccgggcatcatctcccgcaagggtgtccatgaacccatgtacaccggcataaaggccatagacgccatgacccccatcggccggggccagcgggaactcatcatcggcgaccgccagatcggcaaaaccgccatcggcgtggacgccataatcaaccagaagggccaggaggtcatctgcatttacgtggccgtgggccagaaaaaatccacggtggcccaggtgatctccaacttggaaaaacacggggccatggactacaccatcgtggtctgcgccgcggcttccgacccggccaccctgcaatacatcgcgccctttgccggcaccaccatgggtgaatactaccgcgaccggggccggcacgccctcattatttatgatgacttgtccaaacaggcggtggcctatcgccaggtttccctgcttctgcgccggccgccgggccgcgaagcctacccgggcgatattttctataaccattcccggctgttgggacgggcctccaattga

SEQ ID NO: 27578 - protein, 339 aa, Unknown
  Obtained from environmental sample
  DOMAIN (60)...(128): ATP synthase alpha/beta family, beta-barrel domain
  misc_feature (1)..(339): Xaa is any amino acid
MMAASAPSSAAWPPAWRGSLEAPPRKNRNYDHEGAVMPIRAEEISEIIRSQIKDYGRQVELAETGTVLSVGDGVAKVYGVAKAMAMELLEFPHGILGMVLNLEEDNVGVAVLGDVEHIKEGDLVKRTGRIAQVPVGDALLGRVVDGVGQPLDGKGPIEAKEFGLIEVVAPGIISRKGVHEPMYTGIKAIDAMTPIGRGQRELIIGDRQIGKTAIGVDAIINQKGQEVICIYVAVGQKKSTVAQVISNLEKHGAMDYTIVVCAAASDPATLQYIAPFAGTTMGEYYRDRGRHALIIYDDLSKQAVAYRQVSLLLRRPPGREAYPGDIFYNHSRLLGRASN

SEQ ID NO: 27579 - DNA, 729 bp, Unknown
  Obtained from environmental sample
  misc_feature (1)..(729): n is a, c, g, or t
atggttatagaaaatatcgcccgggtaggcttcgcggcccggcggccggcgcagaagcagggaaacctggcgataggccaccgcctgtttggacaagtcatcataaataatgagggcgtgccggccccggtcgcggtagtattcacccatggtggtgccggcaaagggcgcgatgtattgcagggtggccgggtcggaagccgcggcgcagaccacgatggtgtagtccatggccccgtgtttttccaagttggagatcacctgggccaccgtggattttttctggcccacggccacgtaaatgcagatgacctcctggcccttctggttgattatggcgtccacgccgatggcggttttgccgatctggcggtcgccgatgatgagttcccgctggccccggccgatgggggtcatggcgtctatggcctttatgccggtgtacatgggttcatggacacccttgcgggagatgatgcccggggccaccacttcaatgagaccgaattccttggcttcaatgggccccttgccgtccaggggctggcccacgccgtccaccacccggcccagaagggcgtcgcccacgggcacttgggctatgcggccggtacgcttgaccaaatccccttccttgatatgctccacatcgcccaagaccgccacgcccacgttatcctcttccaggttgaggaccatgcccagaattccatgagggaattccaatag

SEQ ID NO: 27580 - protein, 242 aa, Unknown
  Obtained from environmental sample
  misc_feature (1)..(242): Xaa is any amino acid
MVIENIARVGFAARRPAQKQGNLAIGHRLFGQVIINNEGVPAPVAVVFTHGGAGKGRDVLQGGRVGSRGADHDGVVHGPVFFQVGDHLGHRGFFLAHGHVNADDLLALLVDYGVHADGGFADLAVADDEFPLAPADGGHGVYGLYAGVHGFMDTLAGDDARGHHFNETEFLGFNGPLAVQGLAHAVHHPAQKGVAHGHLGYAAGTLDQIPFLDMLHIAQDRHAHVILFQVEDHAQNSMREFQ

SEQ ID NO: 27581 - DNA, 792 bp, Unknown
  Obtained from environmental sample
  misc_feature (1)..(792): n is a, c, g, or t
ttgccggacagttgtgtagaaacggcaatgctcacttttgtttcaaggatcgaaaaagtttcagcagggtttcagcttacgcttgtaaacagggacggcgtattaaagagcgaatgtaaaagcattgtgtttgcctgcggctgccgtgagcgaacatcgcgccagattgggattcacggcagacattccgccggagtgttaacggcggggacagcccagtattacacaaatattttgggcaagatgccggcaagacgctgcgtggttctcggctcaggcgacatcgggcttatcatggcgaggcggcttaagcttgagggagcggaagttatcggcgtttttgaagcaaagcccaccgcaagcggacttatgcgcaatgtttaccagtgtcttgaagattttgatattccgctccacacaagcaaaaccgtaactcgcatcttcggcgaagggcgtattaacgttgttgaggtgtcttctgtcgatgccaacatgatgccgattgccggtactgaacaaataatcgaatgcgacgcccttattctgtctgtcggtttgatccccgaaaacgaacttgccgagagtcttggagttccattggacaaccgcacaaagggacctattgccgatcaaaactacatgacaatggcggacggtgttttcacctgcggcaacgctctgcacgttaacgatcttgtcgattatgtttctgaaagcggcgaaaccgcagggcaggcggcggctaaatgggcagtttcaccttctgcgtacaaacgagctttgccgaaataa

SEQ ID NO: 27582 - protein, 263 aa, Unknown
  Obtained from environmental sample
  DOMAIN (86)...(185): Pyridine nucleotide-disulphide oxidoreductase
  misc_feature (1)..(263): Xaa is any amino acid
MPDSCVETAMLTFVSRIEKVSAGFQLTLVNRDGVLKSECKSIVFACGCRERTSRQIGIHGRHSAGVLTAGTAQYYTNILGKMPARRCVVLGSGDIGLIMARRLKLEGAEVIGVFEAKPTASGLMRNVYQCLEDFDIPLHTSKTVTRIFGEGRINVVEVSSVDANMMPIAGTEQIIECDALILSVGLIPENELAESLGVPLDNRTKGPIADQNYMTMADGVFTCGNALHVNDLVDYVSESGETAGQAAAKWAVSPSAYKRALPK

SEQ ID NO: 27583 - DNA, 987 bp, Unknown
  Obtained from environmental sample
  misc_feature (1)..(987): n is a, c, g, or t
atgatatttttaacaaaaaacacgaaaaatatagtaatttatcaaaagacatggtataagtgttccatgcctataaaaatcccaagagagttacccgctttccaagccttatccgacgagcgggtctttgtaatgactgccgaccgcgctgaaaaacaggatataaggccgctaaaagtaggcattgtaaaccttatgcccactacaattgacacggaaacccagttactgcgccttttgggccacagcccgctgcaagtggatattacttttttaaatatgggcagtcatacgtcaaaaaacgccccgcccgggcaccttgaaaaattttatataagcgcgcaggaaattgtcagcatgaaagcccgttttgacgggcttattataaccggcgcccctgttgagaccctcccttttgaagaagtcgattattgggacgaacttgccgaaataattgattattccgaaaaaaacgttttttcctgcatgcacatctgctggggcgcgcaagccggtctttaccacagatacaatatcccaaaagtgccgcttgaaaagaaaattttcggtgtctttcctcacgcggttaacgaacagcaccatttcctgttccgaggttttgacgatatatttctcgccccccagtcgcggcatacaacctgcgaccgtaacgccatagcaaacaatccgcatcttaagattcaatccgaatctgatgaatccggcgtttttatcgctactgccagggacggccgggagatatacgtaacagggcatcttgaatacgatgccctcacccttgaccgggaataccgccgggatctgggtaagggccttcccatagaagttcccataaactactaccccggcgatgatccctcccaggagcccctggtacgctggcgggcccatgcccaccttttcttttccaactggcttaactacgtgtaccaggagactccctatgaccttgcgaccttaaaatga

SEQ ID NO: 27584 - protein, 328 aa, Unknown
  Obtained from environmental sample
  DOMAIN (24)...(322): Homoserine O-succinyltransferase
  misc_feature (1)..(328): Xaa is any amino acid
MIFLTKNTKNIVIYQKTWYKCSMPIKIPRELPAFQALSDERVFVMTADRAEKQDIRPLKVGIVNLMPTTIDTETQLLRLLGHSPLQVDITFLNMGSHTSKNAPPGHLEKFYISAQEIVSMKARFDGLIITGAPVETLPFEEVDYWDELAEIIDYSEKNVFSCMHICWGAQAGLYHRYNIPKVPLEKKIFGVFPHAVNEQHHFLFRGFDDIFLAPQSRHTTCDRNAIANNPHLKIQSESDESGVFIATARDGREIYVTGHLEYDALTLDREYRRDLGKGLPIEVPINYYPGDDPSQEPLVRWRAHAHLFFSNWLNYVYQETPYDLATLK

SEQ ID NO: 27585 - DNA, 600 bp, Unknown
  Obtained from environmental sample
  misc_feature (1)..(600): n is a, c, g, or t
atgatcagatggccgagtcggttcttcggggcagggaagacgacactctgctcccttatccccaggttttatgagccgagggccgggaaaatcctcctggacggcaaagacattcgtgaaatggatcttgagactttgcggcgaaacataggcgtggttgcccaagacgtgtacctctttaacgggacagtcatggaaaacatcgcttacggaaaaccgggcgctacaggggatgaaatactccaggccgccaaaatggcaaaagcccacgacttcatcatggaactgcccaagggctatgaaacggaaatcggccagcggggcatccgcctttccgggggccagcgccagcgcctttcaattgcccgggctttcctgaaagacccgccggtgcttatccttgacgaggcaaccagcgccctggactatgaaaacgaaagggccatccacgagagtcttgacggctttatgaaaaacaggaccgtcctgataatcgcgcaccggctctctacggtgaagaaagccgggaaggttttttctgtttcagggcgcagtattgaggaaacgactataatccctgacgaagtgccctcattttaa

SEQ ID NO: 27586 - protein, 199 aa, Unknown
  Obtained from environmental sample
  DOMAIN (10)...(184): ABC transporter
  misc_feature (1)..(199): Xaa is any amino acid
MIRWPSRFFGAGKTTLCSLIPRFYEPRAGKILLDGKDIREMDLETLRRNIGVVAQDVYLFNGTVMENIAYGKPGATGDEILQAAKMAKAHDFIMELPKGYETEIGQRGIRLSGGQRQRLSIARAFLKDPPVLILDEATSALDYENERAIHESLDGFMKNRTVLIIAHRLSTVKKAGKVFSVSGRSIEETTIIPDEVPSF

SEQ ID NO: 27587 - DNA, 915 bp, Unknown
  Obtained from environmental sample
  misc_feature (1)..(915): n is a, c, g, or t
atggactgccgccgcgatacaataattgaggctttgcgtgaagttgtaacgatagtaaaaacttcggacgctgaaaacggcgctccgccaggcgaatcataccccgcggcgtttatcccggacggctccctttgcggcatcttcgataaatccgccacccatgtccgcgagctggaagggcttccgttacgcgaagatgcggtatttggaacttttcccgaaggcggcattgttatttttgaaggcaaatcgccaggcgatctgccgggcggcttgccctttatcgtagacccgccgcagggtcagaagaccggattttttctggatcagcgggacaatcatctgcttgcgtcccaatacgccgccatgctgcaaaaagagtcagggaaggaattgcgcattttggatgcctgttcgtataccgggggattcggctttcacgcgctgcgcgagactggaaaacttaccctgatggatacatcggcggctgcgcttgagacggcgcggaaaaacgccgcgctttccggagttgaagaccgggtaacggcaattgaagccaatgtttttgacgaactgcgcaatttagtccggcgcaaagaacaatttgacatagttatactcgaccctccggctttcgcgaagtcgcgaaattctcttgaagaggcgctgcgcggctacaaggaaataaatttacgcgctataaaacttgtccgccccggcggcatatttatcacttgttcatgcagtcaggcggtagacgaaattttatttaagcgtgtgattaacgaagccgccgcagacgcggagcgccgtctggttcaggttgatttccgttttcaggcgcaggatcatcccatattggcggggtatgacgagtctttgtatttaaagtgcggatttttccgcgtgctgtga

SEQ ID NO: 27588 - protein, 304 aa, Unknown
  Obtained from environmental sample
  DOMAIN (113)...(274): Conserved hypothetical protein 95
  misc_feature (1)..(304): Xaa is any amino acid
MDCRRDTIIEALREVVTIVKTSDAENGAPPGESYPAAFIPDGSLCGIFDKSATHVRELEGLPLREDAVFGTFPEGGIVIFEGKSPGDLPGGLPFIVDPPQGQKTGFFLDQRDNHLLASQYAAMLQKESGKELRILDACSYTGGFGFHALRETGKLTLMDTSAAALETARKNAALSGVEDRVTAIEANVFDELRNLVRRKEQFDIVILDPPAFAKSRNSLEEALRGYKEINLRAIKLVRPGGIFITCSCSQAVDEILFKRVINEAAADAERRLVQVDFRFQAQDHPILAGYDESLYLKCGFFRVL

SEQ ID NO: 27589 - DNA, 1200 bp, Unknown
  Obtained from environmental sample
  misc_feature (1)..(1200): n is a, c, g, or t
atgaaaagaaaagttaatttatttatgttaaatttcagaaagagaattattcttttctttcaatatttccgctccggccccgttcttttcagctttgtgctttttcttgccgcggcctttgttataataataagcgaaaacaacgattcaataatcgacataagcgattttgaggcgggcaaagttgccgacagggacattacctcagggtttaccatatcttttattgacgaagaagcgacaaggacgcggactgaagccgccgcaaaacatgtcaacgcagttttccgcacgtcaacggaaatcaacaaacaaatactggattcatggaacactttctgcgaatttaccgaaaaacacgccggcagcagcaaggcccaggcggtacaggcgatagaaacggaatatcccggctttttttcaaatgaaacgcttaacacctatttgtccgccgtcgggcgctcttccttcagggagtacggcatagaaactttgaacattctccttaacaggggaatcttttcgtttaaccgcgatgacataaggtttttcagccccgatatagcggaactgcagcattcgtcatccgccatggaaagagaatatatttcgtataacaatataatcactccggcgaatgtccgcgtcgttttaggcgatattatcaaatccatggacactcctattttattcaagtccgtcgcccttgaccttttggcgccttttataagggaaaacacttttttttcattcagcgaaacccaaaagcgcattgaagaggcgaaaaacacgataacgcccgtgtacagaaccattgaaaaaggcaacagaattataagaaaaggctttattatcacagaagaagaaatggaggatttgacggtccttcataagtccatgccgaaaagggatccgcgaagcatcatcggggttgttttggtaatgcttctgctttatatgctgtttaacattttattcgggcgtatcgttatagggaaaaaaataaacaacagcgaacattacctgttggcttctatttccgggttttacattataggatcggtattgctgtttaatttcctgccgggtcagaacaattttccggtatcgcttttaatgcccaccgccctctttataatgctgcttgccgtttttatgggaacgcgtccggccatgattatggcgctcgctcttccttag

SEQ ID NO: 27590 - protein, 399 aa, Unknown
  Obtained from environmental sample
  DOMAIN (57)...(304): 7TM-HD extracellular
  misc_feature (1)..(399): Xaa is any amino acid
MKRKVNLFMLNFRKRIILFFQYFRSGPVLFSFVLFLAAAFVIIISENNDSIIDISDFEAGKVADRDITSGFTISFIDEEATRTRTEAAAKHVNAVFRTSTEINKQILDSWNTFCEFTEKHAGSSKAQAVQAIETEYPGFFSNETLNTYLSAVGRSSFREYGIETLNILLNRGIFSFNRDDIRFFSPDIAELQHSSSAMEREYISYNNIITPANVRVVLGDIIKSMDTPILFKSVALDLLAPFIRENTFFSFSETQKRIEEAKNTITPVYRTIEKGNRIIRKGFIITEEEMEDLTVLHKSMPKRDPRSIIGVVLVMLLLYMLFNILFGRIVIGKKINNSEHYLLASISGFYIIGSVLLFNFLPGQNNFPVSLLMPTALFIMLLAVFMGTRPAMIMALALP

SEQ ID NO: 27591 - DNA, 756 bp, Unknown
  Obtained from environmental sample
  misc_feature (1)..(756): n is a, c, g, or t
gtgtatcctgttatctcaaggcgagccaaggggctttccataggcataaactgcacaccaaacggggcttgttcttatgattgcgtttattgccaagtgaatagaaaaaacacctctgcgaaaattccatctgtggatgaaattatctctgaattgagagagatactgtctatataccataatacaaaattggctgaacatttcccaaacatcgaagaaaaaaacagggtgttaagggacgtcgctttaagcggggatggtgaacctactctttacccgtattttgccgagctttgcgagcgtttaaaagaaatttcggaaattccaaaattggtgctgataacaaatgcaactcaattggaaaaaattcaaaatttcaatggggaaatatggggaaaattggacgctggcacagatgaatggctcaactttataaacaggcccgcaaaagggatagacatcgcttcaatagagagaaaccttaaatttgccatttctaaatttcccttgcgcattcaaaccatgctttgcgaggtacagggcaaaaccgccaacgaaatggagattgaaaactatacccagattgtccaaagaatttatgaaaccaacccaaaaaatctgctaagcgttcaaatttattccgttgctcgcccggtagccaaagataccgtacagccgctacctatggaatttttagagaatgttaagaaaaaagtggaggaaaaaaattctaacttaacggtagagattttttaa

SEQ ID NO: 27592 - protein, 251 aa, Unknown
  Obtained from environmental sample
  DOMAIN (18)...(196): Radical SAM superfamily
  misc_feature (1)..(251): Xaa is any amino acid
MYPVISRRAKGLSIGINCTPNGACSYDCVYCQVNRKNTSAKIPSVDEIISELREILSIYHNTKLAEHFPNIEEKNRVLRDVALSGDGEPTLYPYFAELCERLKEISEIPKLVLITNATQLEKIQNFNGEIWGKLDAGTDEWLNFINRPAKGIDIASIERNLKFAISKFPLRIQTMLCEVQGKTANEMEIENYTQIVQRIYETNPKNLLSVQIYSVARPVAKDTVQPLPMEFLENVKKKVEEKNSNLTVEIF

SEQ ID NO: 27593 - DNA, 972 bp, Unknown
  Obtained from environmental sample
  misc_feature (1)..(972): n is a, c, g, or t
atgataatgactatgagaaccgcaatgaatccccatactaacggcttaatccttctccacaagccccccggcctgacctcctttgatgcgttacgcgacatcaaacggattctcagcacgggcaaagtcgggcacaccggcaccctggataaattcgccgagggcctgctgctggtacttgtgggcagggcgttaaaactcagccagtggtttacccattgcgataaacaatacgagggcacaatatgttttggcgctgaaaccgatacccttgatcccgaaggcgcatttcttgcaaacgcccccctgccttcccgtgaaactgtggaacaggttattccccaatttttgggtaaaatcgaacaggcgcccccggcttattcagcgatacacattgacggggagcgggcttcagcgcttgcccgacgaggcgaagccccggaaatgcacaagcgtccggtgacaattttcaagctggaacttctttcctgggagccgccttttgccaaaattttcgtccactgttcgagtggaacctatatccgttcgctagccagagacatagcccttgccgccggcagccgcgcacatttaacagcgctgattaggacgcaggtcggagggtttaatttacagggaacagggaacagggaacagggagcaattaggaatgaggaattaggaattaggaataaagaattccctttacgccctttggataaagatgtctttaattgccttggaattccctgctttgatgtagctccgccggatgtatcaaaaatcatacagggaaagcctctggcgcagatactaaaagatactccggtttccgcgggtgaaaaccccgccggagtgaactccaacggggtgaatcccgcagctgcgctcttttcagacggcgaatttatcgcaatgatagaaagacaggacaataaatggaattatgggtatgtctatgcgcgtgattaa

SEQ ID NO: 27594 - protein, 323 aa, Unknown
  Obtained from environmental sample
  DOMAIN (35)...(181): TruB family pseudouridylate synthase (N terminal domain)
  misc_feature (1)..(323): Xaa is any amino acid
MIMTMRTAMNPHTNGLILLHKPPGLTSFDALRDIKRILSTGKVGHTGTLDKFAEGLLLVLVGRALKLSQWFTHCDKQYEGTICFGAETDTLDPEGAFLANAPLPSRETVEQVIPQFLGKIEQAPPAYSAIHIDGERASALARRGEAPEMHKRPVTIFKLELLSWEPPFAKIFVHCSSGTYIRSLARDIALAAGSRAHLTALIRTQVGGFNLQGTGNREQGAIRNEELGIRNKEFPLRPLDKDVFNCLGIPCFDVAPPDVSKIIQGKPLAQILKDTPVSAGENPAGVNSNGVNPAAALFSDGEFIAMIERQDNKWNYGYVYARD

SEQ ID NO: 27595 - DNA, 666 bp, Unknown
  Obtained from environmental sample
  misc_feature (1)..(666): n is a, c, g, or t
atggatcagaaccttggcggattttcccgttttacacgggtattccaaagcgatgaaataatctttagcgagcatgaacccggggatactttctacgttatacagtccggaaaggtaaagctgttgaaaaacgacggggaatttgagcggaccatagatatcatgcaggctccggatatgttcggtgaaatggcgatactggaaggcgcgccgcgcagcgccaccgccattgccctggacgaagtgaaggctctggaattcaacgcgcagaattttgaaatcctcatgaccggaaacccgcagattggccttaacctgctgcggatttttgcaaaaaggatttacgattcaaaacggcgttttatgatccttgccctgcaaagcccccaggcaaagatagccgacgtattccttatgcttgatgaaacaacgacggatattgacagaaaaaccgacgcccgtgaattccaggccactattgaagatatcgcccattgggccggaatgagcgtcactgaggcaagagacgtacttcatacctttgtcgtacagaaccgcctggagatgtactccacccgcatggtagttaaaaatatcaacgatttttcccgtatggtcaactcccgtcgcaaactggaaaagaatccgaccggaataaaaacctga

SEQ ID NO: 27596 - protein, 221 aa, Unknown
  Obtained from environmental sample
  DOMAIN (12)...(101): Cyclic nucleotide-binding domain
  misc_feature (1)..(221): Xaa is any amino acid
MDQNLGGFSRFTRVFQSDEIIFSEHEPGDTFYVIQSGKVKLLKNDGEFERTIDIMQAPDMFGEMAILEGAPRSATAIALDEVKALEFNAQNFEILMTGNPQIGLNLLRIFAKRIYDSKRRFMILALQSPQAKIADVFLMLDETTTDIDRKTDAREFQATIEDIAHWAGMSVTEARDVLHTFVVQNRLEMYSTRMVVKNINDFSRMVNSRRKLEKNPTGIKT

SEQ ID NO: 27597 - DNA, 645 bp, Unknown
  Obtained from environmental sample
  misc_feature (1)..(645): n is a, c, g, or t
atgttaaaggtattttccatccaattgcggcgtgttcacgcccagattgcaagattaacgacaagcgaaacggtaaacccggacgaaggtcttttcgccatcggggacaaataccttaaactcaagcgttacgcccacgcgaaatacattttcaaaagttatctgactcattacccctcaggcgcgcaggcggcccaggccgctaaaaacctcaaggctgccgaaaccgccattgcgaatactcccgttaagcctcagccaaaagggccatctgttgattatcgtaacgcgataagccttatctcaagtcaaaaatacgaagaggcaattgcggctttcacaaaaatcattgacacatgcaaagaagaagaatgggtttccaaaagcgaattcgcgattggtaactgtctgcttcttcaggaaaaatttgaggattgcatcagacactttttagaactgctttcaaaaaactccgggcatcccgaggcaaaggaggcgatgttctgcataggacaggcttacgagaaagccggcaacaaggcgcaggccgcgtcctggtataacaaaatcctggcattacccaacctggaagccggcgggataagagcaagggtaaaacaggcgcttaagggaatggaggcataa

SEQ ID NO: 27598 - protein, 214 aa, Unknown
  Obtained from environmental sample
  misc_feature (1)..(214): Xaa is any amino acid
MLKVFSIQLRRVHAQIARLTTSETVNPDEGLFAIGDKYLKLKRYAHAKYIFKSYLTHYPSGAQAAQAAKNLKAAETAIANTPVKPQPKGPSVDYRNAISLISSQKYEEAIAAFTKIIDTCKEEEWVSKSEFAIGNCLLLQEKFEDCIRHFLELLSKNSGHPEAKEAMFCIGQAYEKAGNKAQAASWYNKILALPNLEAGGIRARVKQALKGMEA

SEQ ID NO: 27599 - DNA, 831 bp, Unknown
  Obtained from environmental sample
  misc_feature (1)..(831): n is a, c, g, or t
gtgactaccgtcaatgaccatttcccgcaaaagatcaacagtgagattctgcctaccttgccgatccgggcatttcttgaatacggtcttgcccatgaatgttcttcgtatgatctcaaatggggcgacgggatagagattgagcatgaacgggcagtaaaaaacaagtggcctttcataacccacctttgcgagggttttgacgaagaagcgatgcacggcatccagacgcttgaaaaattaaacgtgctggacagccactgtcttcttgttcactgtatcgcttttagcgatgccgatataaaaacagtggcaaaggccggggcaagcgtttcgtggtgcggcttttcaaatatgtctatgttcaatgtcaccgcaaaaatacgcaagatgatcaaagccggggtaaatgtcaccatcggaacggattcatcggcaagcggctcggcaaacctgcttgccgaacttaaatatgaccgggaactgtaccgttccatgtacggcgaggatctgccggcaaaaaaaatgttcgagatggttacgtataatgcggcaaaggctttctggatggaagacaggattggaacgctggacgagggaaaactgggcgatattctgatactgaaagccaggcatgacgatccttacgaaaaccttgtaaacgcctccatgaaggacattgagcttctggtactggcaggcgcgcccatttacggcgaaacacgttttacggatatttttggaggcgtgctgcccgggggcgaaccgcccggaggcagactgccccttggatattcacaaattaaagtaggcggccgggttatgttgtaa

SEQ ID NO: 27600 - protein, 276 aa, Unknown
  Obtained from environmental sample
  DOMAIN (7)...(209): Amidohydrolase family
  misc_feature (1)..(276): Xaa is any amino acid
MTTVNDHFPQKINSEILPTLPIRAFLEYGLAHECSSYDLKWGDGIEIEHERAVKNKWPFITHLCEGFDEEAMHGIQTLEKLNVLDSHCLLVHCIAFSDADIKTVAKAGASVSWCGFSNMSMFNVTAKIRKMIKAGVNVTIGTDSSASGSANLLAELKYDRELYRSMYGEDLPAKKMFEMVTYNAAKAFWMEDRIGTLDEGKLGDILILKARHDDPYENLVNASMKDIELLVLAGAPIYGETRFTDIFGGVLPGGEPPGGRLPLGYSQIKVGGRVML

SEQ ID NO: 27601 - DNA, 678 bp, Unknown
  Obtained from environmental sample
  misc_feature (1)..(678): n is a, c, g, or t
ttgaccctgatttttaaagtaggaatattatttatgccaaaaacccatcaatattttaccggttcgatgatttatgcgcagggagatgaggcgaacaaactttttatactccaaagcggaaaggtaagtttagtcactgtagactctgagcctgcaacagatatacgcgatctggtgtcgccgggtgaattcttcggcgtaaaatccgcgcttgggcacttcccgcgcgaagaaaacgccattgcggtagcggactctaccgcgctggtgttcacggttcccgaatttgaagcgtttgccatgtcaaatcccaaaatcattattaaaatgctcaaggtattttccaatcagatgcggcgcgttcacgcccagattgcaaaattcagggaacacgaagaagtaaaaccggacgaagggcttttcagcatcggggtaaaatacctgaaactcaaacgttaccaccacgcaaaatacattttcagccgttacctgtttcattacccctcaggcgcgcaggcggcccttgccgtaaaaaacctcaagactgccgagaacggcattgcaactaccgtcgtcaagaaccagcaaaaaggaacggcaaaagaatatcgtgaagcgataagcctaatctcgcgccatgaatacgaaaaggcaattcaggctttaaaagcatcctga

SEQ ID NO: 27602 - protein, 225 aa, Unknown
  Obtained from environmental sample
  DOMAIN (15)...(105): Cyclic nucleotide-binding domain
  misc_feature (1)..(225): Xaa is any amino acid
MTLIFKVGILFMPKTHQYFTGSMIYAQGDEANKLFILQSGKVSLVTVDSEPATDIRDLVSPGEFFGVKSALGHFPREENAIAVADSTALVFTVPEFEAFAMSNPKIIIKMLKVFSNQMRRVHAQIAKFREHEEVKPDEGLFSIGVKYLKLKRYHHAKYIFSRYLFHYPSGAQAALAVKNLKTAENGIATTVVKNQQKGTAKEYREAISLISRHEYEKAIQALKAS

SEQ ID NO: 27603 - DNA, 1275 bp, Unknown
  Obtained from environmental sample
  misc_feature (1)..(1275): n is a, c, g, or t
gtgcaagacggggaagttcaaattgtcgatgaattcacggggcgtattctgcacggcagacgttattccgacggacttcatcaggcgatagaagccaaagaacggattaaaatcgcccagcgcaacaggactttggcgacaattacttttcaaaattatttcaggttgtataaaaaaatctcaggcatgacgggaaccgcagacaccgaggccgttgagtttgataaaatttacaaactttccgttgtggttgttccaacaaacagacctgtcgcgcgtaatgacgaggacgatgtaatctaccttgatgaatccgataaatttaaagcgttgtgcgatgaaatagccgaagcgaacaaaaaaggccagcccatgcttgtcggtactgtatctatcgaaaaatccgagaaaatttccgccctgctcacgcgcaggggagtccgtcacgaagtgttaaacgcaaaaaaccacgctcgtgaagcgcttattatttcggaagccggagcaaaaggttctgttaccatagcgactaacatggccggacgcggaacggacataaaactcggcggaaatcccgaacatcgggcgagaagacgggcgggaacaaacgcctcggaagatcaatattccgctatttacaaagaagaacttgaaaagtggaaaaaagattatgaggaagtaaaatctctcggcggactttatgtaatcggaacagagcggcatgaaagccgccgtattgataaccagcttcgagggcgttcggggcggcagggcgatcccggaaagagcaaatttttcatttctatggacgacgaacttatgcgcttattcggcggagagcgcatgaaaaacatcatgtcaagaatagggatgacgggcggagacgctatttaccaccctatgttaaacaagagcatagaaaacgcccagaagaaagtagaggagcgcaattttgaaatccgcaaacatcttttggattatgacgatgtgttaaaccaacagcgtaaatttatttatgaacagcgcgatgctatacttgtagacgaagatttaaaaaagcgcgtaaacgacgccacacaggatatagtcggcgactacattgatgaatttaatcaggcggcaagaaacgatcaaaatgaagcgttgaaagaattaacggaaaaactccgcacaaagttcggctattctcttactgccgattccgacagcagcgaattcaaaaataccgaagtttggaaaaacgataaatgctatctctcggccgatctgtcatga

SEQ ID NO: 27604 - protein, 424 aa, Unknown
  Obtained from environmental sample
  DOMAIN (1)...(31): SecA preprotein cross-linking domain
  misc_feature (1)..(424): Xaa is any amino acid
MQDGEVQIVDEFTGRILHGRRYSDGLHQAIEAKERIKIAQRNRTLATITFQNYFRLYKKISGMTGTADTEAVEFDKIYKLSVVVVPTNRPVARNDEDDVIYLDESDKFKALCDEIAEANKKGQPMLVGTVSIEKSEKISALLTRRGVRHEVLNAKNHAREALIISEAGAKGSVTIATNMAGRGTDIKLGGNPEHRARRRAGTNASEDQYSAIYKEELEKWKKDYEEVKSLGGLYVIGTERHESRRIDNQLRGRSGRQGDPGKSKFFISMDDELMRLFGGERMKNIMSRIGMTGGDAIYHPMLNKSIENAQKKVEERNFEIRKHLLDYDDVLNQQRKFIYEQRDAILVDEDLKKRVNDATQDIVGDYIDEFNQAARNDQNEALKELTEKLRTKFGYSLTADSDSSEFKNTEVWKNDKCYLSADLS

SEQ ID NO: 27605 - DNA, 450 bp, Unknown
  Obtained from environmental sample
  misc_feature (1)..(450): n is a, c, g, or t
gtgcgcaaaggaataatattggccggcggttccgggacgcgcctctatccgaccaccatcgccgtctcaaaacagctcatgcccgtctacgacaagccgatgatctactaccctcttaccacgctgatgctggccggaataacggagatattggtcattaccactccggaggacgccgccgattttgcgcggttgttggccgacgggtcgcagtggggcgttaaactctcatacgcggtgcaacagaagccggaaggcttggcgcaggcgttcataatcggttcggaatttgtcgggggggccctggcggcgttgattctcggcgacaatatcttttggggccacgggcttgtggaacgtttgcaattagcgataaatcgttgtggacacggccacgatcttcgcctaccgcgtgagcgacccgcaacgatacggtatagtggaagttga

SEQ ID NO: 27606 - protein, 149 aa, Unknown
  Obtained from environmental sample
  DOMAIN (3)...(149): Nucleotidyl transferase
  misc_feature (1)..(149): Xaa is any amino acid
MRKGIILAGGSGTRLYPTTIAVSKQLMPVYDKPMIYYPLTTLMLAGITEILVITTPEDAADFARLLADGSQWGVKLSYAVQQKPEGLAQAFIIGSEFVGGALAALILGDNIFWGHGLVERLQLAINRCGHGHDLRLPRERPATIRYSGS

SEQ ID NO: 27607 - DNA, 558 bp, Unknown
  Obtained from environmental sample
  misc_feature (1)..(558): n is a, c, g, or t
gtggccgagcgtctgcgggggagcggtacgccttgtctcgtcacgcgcgaaccgggcggtacggccgtcagcgagaagatcagggaattgctcatatcgccggataataaggggatgcgatcggagacggaattgctgctgtacttggccgcccgcgcccagcatgtaagagaaatcataataccggcggttgacaggggagaaacggttctgtgcgatagattcgaacaggcgacgttcgcctatcagggcggcggcagggggcttgacgtcgacgcgattcgttgcatcaacaagttcgccgcgggggggatcgcgccggatatgacgtttatcatagacataccggttgaggtttcccaagagcgtttgaataagataggcaagggcaaagacaggatggagagcgccggcgctttgtttttcgagcgcgtcagggcggggtacgtaaacgccgcgtcagccgatccgcgaaggataaaactgctcgacggaaccaagggggtggatgagttgacggacgagatattgggggtgatagcgtgcgcaaaggaataa

SEQ ID NO: 27608 - protein, 185 aa, Unknown
  Obtained from environmental sample
  DOMAIN (2)...(176): Thymidylate kinase
  misc_feature (1)..(185): Xaa is any amino acid
MAERLRGSGTPCLVTREPGGTAVSEKIRELLISPDNKGMRSETELLLYLAARAQHVREIIIPAVDRGETVLCDRFEQATFAYQGGGRGLDVDAIRCINKFAAGGIAPDMTFIIDIPVEVSQERLNKIGKGKDRMESAGALFFERVRAGYVNAASADPRRIKLLDGTKGVDELTDEILGVIACAKE

SEQ ID NO: 27609 - DNA, 498 bp, Unknown
  Obtained from environmental sample
  misc_feature (1)..(498): n is a, c, g, or t
atggataaaaggcgcgtattaatttttgaggattcggatattttcgcggatctgctccttgaattattaaacggggaagcttacgaaacacagcgcgcgaaaaacggccttgaaggcattaagctggtttacagtttccttcccgagcttatcattaccgccgtggaaatgcctttgctcaaaggttatcagtctgcaaggtatcttaaatcccgtcccgccgccgggaaaatccccataattatgtttaccaatcttggcgagacaagtgataaattctggggcgaacaggcgggagccgacgtttacattgaaaaatcacctgagaatttcggggaactgtcggcgcaggtacagcgccttttaaacgataacagggcgattgattttgaggcggttaaaaaagaaggggagaaagtaactgatgattcccttatagaaacagtaaataacattcttgacaacaagctttttcaggcgactcttatcggaatgtag

SEQ ID NO: 27610 - protein, 165 aa, Unknown
  Obtained from environmental sample
  DOMAIN (4)...(119): Response regulator receiver domain
  misc_feature (1)..(165): Xaa is any amino acid
MDKRRVLIFEDSDIFADLLLELLNGEAYETQRAKNGLEGIKLVYSFLPELIITAVEMPLLKGYQSARYLKSRPAAGKIPIIMFTNLGETSDKFWGEQAGADVYIEKSPENFGELSAQVQRLLNDNRAIDFEAVKKEGEKVTDDSLIETVNNILDNKLFQATLIGM

SEQ ID NO: 27611 - DNA, 1143 bp, Unknown
  Obtained from environmental sample
  misc_feature (1)..(1143): n is a, c, g, or t
atgaaggtaacaatcgccgatgacggcaggggcatcaacatagaggtaatccgcaaaaaaattgtcgagaaaggtttggtttccccggaagccgccgccgcccttgaagaagatgaattaataaattttattttccaaagcggattttctactgcggaaaaactttccaatgtttcgggacgcggaatcggaatggacgctgtcaggaacaacattgagcgcatgaagggcagtataagtatacataccaaagccggagaagggactacatttaccatttccgtccccctgtcgctggccgcccttatgggcttccccatttcatcgggcagcatgaaatttatcatccccgccaattttgtggacacggtcatgcttatcaatacaaaagacattatcaccgtggtagaccgtccgggcattaaatacaacgacaggatcatcaaacttttctaccttcatcatgtcctgaaaatccccgtacccatagaagaaaaaaagaactcaggcgattcgatttttgtcgccatcgtacaggcttatgaggaaacggtagccctcgccgtaaatcaggtaagcagcatgaggcaggtgattcttaaaaacctgccctcttttatggaaaaaatggaagtgttctccgggctggtgttaagcgaagattatgaaatgatacccgccctgcatattcctacggtgataaggatggcgcggcgcacaaaaacgattgacatgaaaaaacgccatattgattatgagcgcatgcgcaaatccgtccttgttgtggacgattcaaaaccgacgcgcgacatagaacgcgatattcttgaggccgaaggctataaagtggatgtcgcaacggacggttccgaagcgcttgccgcggcgaaaaacacccagtacgatttaatttgcaccgatatttttatgccaaacatggacggctttatgctgacggacaacatccgcaaaaacgaccgtttaaaagacattcccattatcgcaatctcatccaagagcgacgagaaagaccaaaacagggcggcgtccctgggtataaaccgctatatcgtaaagagttcgtttaacgatcatgatttgatatccgccgttaaagaattaatcggagaagccaatggataa

SEQ ID NO: 27612 - protein, 380 aa, Unknown
  Obtained from environmental sample
  DOMAIN (101)...(238): CheW-like domain
  misc_feature (1)..(380): Xaa is any amino acid
MKVTIADDGRGINIEVIRKKIVEKGLVSPEAAAALEEDELINFIFQSGFSTAEKLSNVSGRGIGMDAVRNNIERMKGSISIHTKAGEGTTFTISVPLSLAALMGFPISSGSMKFIIPANFVDTVMLINTKDIITVVDRPGIKYNDRIIKLFYLHHVLKIPVPIEEKKNSGDSIFVAIVQAYEETVALAVNQVSSMRQVILKNLPSFMEKMEVFSGLVLSEDYEMIPALHIPTVIRMARRTKTIDMKKRHIDYERMRKSVLVVDDSKPTRDIERDILEAEGYKVDVATDGSEALAAAKNTQYDLICTDIFMPNMDGFMLTDNIRKNDRLKDIPIIAISSKSDEKDQNRAASLGINRYIVKSSFNDHDLISAVKELIGEANG

SEQ ID NO: 27613 - DNA, 1050 bp, Unknown
  Obtained from environmental sample
  misc_feature (1)..(1050): n is a, c, g, or t
gtgtggcggggggagaacgcccagcgggggcgttaccgtgaatttacccagtgtgattttgacattatcggaagcgacagccccgccgccgattttgaaattcttttgatgatccgcgccactttgctgaatttgggagtcggcgtaaccatacatatcaaccaccggggcctgttcaaccggttccttgcccacatcggacagcgggaaaaatccgttgatgtgcttcgcgcggtcgataaaatcgccaaagtaggctatgacgaaacagccgccgctcttgccgcgattaccggcgatgccaacgcgaaaaaaatactggactttaccgccgcggtgtccggtgaaacatttgaagataccttgaatcgcataacagagttgtccggcgggccttcccctgaatccgagcggctctctttgctcaggcgatttatgagcgatgccctttcggatggtgatagcgcaaatggcggtttcatgcttgatccctcaattacccgtgggctggattattataccggcgtagtgtttgaaacttttatcactgaacttcccgacattggctcaatttgttccggcgggcgttacgacaaccttgccggcctgtactcaaaaagcaacgccgcaatcagcggggtcggctcatccatcggccttgatcggatgatagcggcgctggaaagcctgaacaaactgcctccggcaagcggatttgccgctgccgccattagttgcctaagacaggaagatgcggggcaataccaggctcttgccgcacagttccggcgcgtcggtatcccctgcgaggtcttcacggacgcgtccgcagttggaactgcggttgcggacagagccgccggcatcggcgacagtaaaaaccttgttaagcagtttgtgttagctgaaaaaaaagggcatcaatggatgatcatccccggcgcggatcccctgcgcacgcccctgaccctgaggaaccttgttacaaggcagaaccgggaagggctgtcggtcgatgaagcggttattcaaataacaaataacaaataa

SEQ ID NO: 27614 - protein, 349 aa, Unknown
  Obtained from environmental sample
  misc_feature (1)..(349): Xaa is any amino acid
MWRGENAQRGRYREFTQCDFDIIGSDSPAADFEILLMIRATLLNLGVGVTIHINHRGLFNRFLAHIGQREKSVDVLRAVDKIAKVGYDETAAALAAITGDANAKKILDFTAAVSGETFEDTLNRITELSGGPSPESERLSLLRRFMSDALSDGDSANGGFMLDPSITRGLDYYTGVVFETFITELPDIGSICSGGRYDNLAGLYSKSNAAISGVGSSIGLDRMIAALESLNKLPPASGFAAAAISCLRQEDAGQYQALAAQFRRVGIPCEVFTDASAVGTAVADRAAGIGDSKNLVKQFVLAEKKGHQWMIIPGADPLRTPLTLRNLVTRQNREGLSVDEAVIQITNNK

SEQ ID NO: 27615 - DNA, 834 bp, Unknown
  Obtained from environmental sample
  misc_feature (1)..(834): n is a, c, g, or t
atgattgcgtataacctgcccaacgcctgtttctgcgactgtaccgccagcgatgatgtcgccgcgctgtacgcgaaagttttgggcgcgtccattccggttgttacacctaacaaacgggccaattccggcaaactggagtattaccggaaactgaccggcttttcccgcgaccgggggattccctacctgtacgaaaccactgtctgcgcgggcctgccggtaatttcaaccttgcgggatttgtacctttccggcgaccgggtgcgccgcattgaagcggttctttcagggactttaagttttattttcaataattttgacggcaaaacatctttttccaccctagtacgggaggcaaaggccaagggctataccgagccggatccccgcgacgatctgaacgccatggacgcggcccgcaaagccctgatccttgcccgtgagtgcggtctttcccttgaatttgccaatgtcgccattgagccgattttgccccgtgcctgtttcaaggcgaaaaatgttgacgctttctttaaggaactggaaaaatcggacgccgcttttgaaaaacgccgctcccaggccgtcgcgcagggaaaggctctgcgctatattgccgttattgaggaaggctccgcgaaactcgccctgagggcggaagcggcggacagccccttccgttcactggtagacagcgacaacatggtggtaattaccaccgaccgttattcgaaattgccgatggtgatcaaggggcccggcgcgngcgcgcaggtaaccgccggcggtatttttgccgatatcgcgcggattgcgcggcccttggtttaa

SEQ ID NO: 27616 - protein, 277 aa, Unknown
  Obtained from environmental sample
  DOMAIN (74)...(270): Homoserine dehydrogenase
  misc_feature (1)..(277): Xaa is any amino acid
MIAYNLPNACFCDCTASDDVAALYAKVLGASIPVVTPNKRANSGKLEYYRKLTGFSRDRGIPYLYETTVCAGLPVISTLRDLYLSGDRVRRIEAVLSGTLSFIFNNFDGKTSFSTLVREAKAKGYTEPDPRDDLNAMDAARKALILARECGLSLEFANVAIEPILPRACFKAKNVDAFFKELEKSDAAFEKRRSQAVAQGKALRYIAVIEEGSAKLALRAEAADSPFRSLVDSDNMVVITTDRYSKLPMVIKGPGAXAQVTAGGIFADIARIARPLV

SEQ ID NO: 27617 - DNA, 342 bp, Unknown
  Obtained from environmental sample
  misc_feature (1)..(342): n is a, c, g, or t
ttgtttggttccggcaccgtcaggaaacatcgggagattgtgtggacgctgcaagaatctgacatctctaggctggccgaagcccaggccaagttgctggacgcggccctgccaaagctggcccccggcggcctgctgatctattccgtatgcagttggttcccagaggagggcgccgcccacctgcccaaattgctgcaatgccgcacaaatgttggcccagcggcaatatggccaagcgatgcagggccaagccacctcttttgccccgacccgctggcatgggatggcgaaggcttccaagcgtttgcgctgacgaaagagcttcttgcaaaactctga

SEQ ID NO: 27618 - protein, 113 aa, Unknown
  Obtained from environmental sample
  misc_feature (1)..(113): Xaa is any amino acid
MFGSGTVRKHREIVWTLQESDISRLAEAQAKLLDAALPKLAPGGLLIYSVCSWFPEEGAAHLPKLLQCRTNVGPAAIWPSDAGPSHLFCPDPLAWDGEGFQAFALTKELLAKL

SEQ ID NO: 27619 - DNA, 741 bp, Unknown
  Obtained from environmental sample
  misc_feature (1)..(741): n is a, c, g, or t
ttgggacaggaccccttcaaaacaaatgtggtaatctgccacatagggaacggcgcttcggtgaacgctgttaaagacggctgttcttttgatacgtccatgggcattacccctcttgagggacttgtcatggggacgcgctcaggcgatattgacgcggctctgcccttctacgttatgagaaaaacaggcatgaacgacgttgaaatggaagccgccttaaataaaaaatcggggcttttggggttgacgggcaaattcgcggacaggcgcgatatacaagccgccgcgattaacggcgataaacaggctttgctcgcccagtatatcgaagcccaccgggtaaaaaaatacataggcgcttattgggcggttcttggccgggtggacgctcttgtccttaccgcgggcgtcggcgagtttgcgtggttcatgcgtgaaaaaattcttgacgggctggaaggcatcggtatcgtttacgatccgcgcaagaataaaatatcctgcacaagaaataccgaaaccttgatcagcaaacctgaatcgaagatacctatatacatcattcctaccgacgaagagcttgtaatgacggaagacgcttacgcccttatgaaaggcacttacgatacgcatacccattttacttattccttccagagcaaggattatgtaaacaaggggcgcgccgaaagccttgtgcacgatcttgcgaaaaacatcctgaacttgccgaaataa

SEQ ID NO: 27620 - protein, 246 aa, Unknown
  Obtained from environmental sample
  DOMAIN (1)...(199): Acetokinase family
  misc_feature (1)..(246): Xaa is any amino acid
MGQDPFKTNVVICHIGNGASVNAVKDGCSFDTSMGITPLEGLVMGTRSGDIDAALPFYVMRKTGMNDVEMEAALNKKSGLLGLTGKFADRRDIQAAAINGDKQALLAQYIEAHRVKKYIGAYWAVLGRVDALVLTAGVGEFAWFMREKILDGLEGIGIVYDPRKNKISCTRNTETLISKPESKIPIYIIPTDEELVMTEDAYALMKGTYDTHTHFTYSFQSKDYVNKGRAESLVHDLAKNILNLPK

SEQ ID NO: 27621 - DNA, 645 bp, Unknown
  Obtained from environmental sample
  misc_feature (1)..(645): n is a, c, g, or t
ttgagtaataaaactgaattgttatgtatcggcaactctattgtcgatgtatttgttgatattgataacagtcttgcgttaaagtacggcattctcgatcctattcagcatatcggcggcgataaagccgaagcgctgctgacggagccttccattgattttgcaaaatcggtgaaaagctcgggcgggggagcggcaaatgtagcaaaaattgcctcaatgcttggaatggatgcggcattttgcggctgtatcggacaggatgaacttgcgtcaatctttgaagaagagataaaagaagccggcgtttcttccatgcttgtaagatccaatgaaaagacagggttatgctttgtgtgtaatcttggcagtgaaacgcgttttgccgcaagtccgcgcgcggcgcttgaactgaacgagtctcatatcagcgaagatttgataagcggcgctgaagcggttatccttgacggctttatactcgaccgacgccctttggtgcagcatatcttaaggcttgccagccataaaggaataccggtcgcccttgacgccgcttcgataatgcaggtaaaaagcaaagcggaagaaatattgacatacagccgtaattatcctctctttatttttatgaacgcgcgatga

SEQ ID NO: 27622 - protein, 214 aa, Unknown
  Obtained from environmental sample
  misc_feature (1)..(214): Xaa is any amino acid
MSNKTELLCIGNSIVDVFVDIDNSLALKYGILDPIQHIGGDKAEALLTEPSIDFAKSVKSSGGGAANVAKIASMLGMDAAFCGCIGQDELASIFEEEIKEAGVSSMLVRSNEKTGLCFVCNLGSETRFAASPRAALELNESHISEDLISGAEAVILDGFILDRRPLVQHILRLASHKGIPVALDAASIMQVKSKAEEILTYSRNYPLFIFMNAR

SEQ ID NO: 27623 - DNA, 738 bp, Unknown
  Obtained from environmental sample
  misc_feature (1)..(738): n is a, c, g, or t
atgcttgaagtcaaatcgttaaaaaaatcttacggaaattttttcgtatcgtttgatttatctgtcgacgcgggagaaacgcttgcgctggtcggtccttcgggctgcggaaaaactacggcgcttaatcttatcgcggggcttgttgagccggaatcgggaaaagtgctcattgacggcgaggatattacaagtctgccggcgtggaagcgaaatgtttccgtagtttttcaggacttggctttattccctcaccttgatgtcggcggaaatatagcctacgggctttttatcaaaggcgtacccaaaaaagaacgccgtcttattgttgagcagacgctggaaattgtccgccttcaaggatattcaggcagacgcattgacaccctctcaggcggagagcgtcagcgggtagccattgcgcgcgctcttgcgtccagtccgcggctgcttttgctggacgaacctttttccagcttagacgcccccttgagaaaaagcctccgcaacgattttcttgagattcgcgcacattcaaaagcgccctgcatttttatcactcatgatcgcgaagaagctttgatgctgggaaacaaagtcgcgcttatgaaagacggacgcattgtagaaaccgcaaaaggaagggatattctaatcgcgccaaagacggaatttgccatggagtttttggcaaggattaataagaaaataaacaacacccttctcggccgattctga

SEQ ID NO: 27624 - protein, 245 aa, Unknown
  Obtained from environmental sample
  DOMAIN (25)...(206): ABC transporter
  misc_feature (1)..(245): Xaa is any amino acid
MLEVKSLKKSYGNFFVSFDLSVDAGETLALVGPSGCGKTTALNLIAGLVEPESGKVLIDGEDITSLPAWKRNVSVVFQDLALFPHLDVGGNIAYGLFIKGVPKKERRLIVEQTLEIVRLQGYSGRRIDTLSGGERQRVAIARALASSPRLLLLDEPFSSLDAPLRKSLRNDFLEIRAHSKAPCIFITHDREEALMLGNKVALMKDGRIVETAKGRDILIAPKTEFAMEFLARINKKINNTLLGRF

SEQ ID NO: 27625 - DNA, 798 bp, Unknown
  Obtained from environmental sample
  misc_feature (1)..(798): n is a, c, g, or t
ttgcttacagacagccgcgaaggaatacctgtcgataagcacaataaagatatgatagaacaactgtcaacattggcggcggacagtcttgtttatctcaaggaaatcgggatttcagaaaaaacacggctggttgatgataatatctttgacattgttccgtatgatgaaagcggctttaaagacattgatagcaccgagaccatctctttcaagccgttttatacgaagattaaaaaggctttcgaaaccgaagctattattccgtgtgaaaacggcgagtatgttgcgaaagacaaggcgtactgggcgtccgtaccaagacttgccgatttgttctcgaatgggagacttgccgatttgacaggagacgttggagccaagtgggtgtttacgtcattcggtcgcgatgaaaaataccgtaataccagacaacttgtcacatacattgattctataattaaaacttacgtagacgaaggtaaagccacgattttctccggcggccttatcacctatataaatctcagaggccatgattttattaagaaacagtcgattgagtggttgcatgatttttatgggtggattgcggaaagtcctaagagaaaagacagtttcaagggtatgaaaatatttttagatcaagacaaaaatgcagtcgccgcctttgaccaattaaatcaactgatcttgtttttaccgaaagatggtttcaatggctacatcacagttcacgaagatttgttaaaaaacgagaagaacaaagaatttattaaaaagtttgggtgtttctga

SEQ ID NO: 27626 - protein, 265 aa, Unknown
  Obtained from environmental sample
  misc_feature (1)..(265): Xaa is any amino acid
MLTDSREGIPVDKHNKDMIEQLSTLAADSLVYLKEIGISEKTRLVDDNIFDIVPYDESGFKDIDSTETISFKPFYTKIKKAFETEAIIPCENGEYVAKDKAYWASVPRLADLFSNGRLADLTGDVGAKWVFTSFGRDEKYRNTRQLVTYIDSIIKTYVDEGKATIFSGGLITYINLRGHDFIKKQSIEWLHDFYGWIAESPKRKDSFKGMKIFLDQDKNAVAAFDQLNQLILFLPKDGFNGYITVHEDLLKNEKNKEFIKKFGCF

SEQ ID NO: 27627 - DNA, 807 bp, Unknown
  Obtained from environmental sample
  misc_feature (1)..(807): n is a, c, g, or t
gtggtcaacccgtgggtggcgcggcgcggcgtgctcttcctcttttttcccggcaccatgtcgcgcgccatgaactacaaaatgctatgcgagaccgccgccgaccgcggtttccacgccataagcctgcagtacgtgaacgacgtttccgtcaacaacaagtgctccggcagccgcaacgcggagtgccacgagaatatgcgccgcgaggtgctgttcggcgccgacttctcgccccacgtgcacgtgagccgcccgaacagcgccgagaaccgcttggtcaaattgctgcgttacctcgcaaaccaatacccgcttgacgggtgggagcagtacctgaccgccggcgacgtcccgcgctggtcgagaatcctggtcgccggtcactctcagggcggcggacacgccgcgctgctcggcaagtactacagcaccgccggcgttataatgttcgcctccatggactacaacttctcgcgcgacaaggccggctcatggatcgataagcgtagcaacacccccatagaaaaattcttcgccgtggcccacacgatggacgaggtaatgcccatagcgtcaatgcgcaaatactggaacgccttcggattcaaaaacatcgccccggtgataaacatagacgacataggcttcccctacgcgaactcaaacacgcttataacctctataaaaccgacaagaccggtgaagcccggcaaaaaaagcgcggtctaccacaacctactatgcttagacggagacacgccgctacttagggatggaaaaccccgctctctcgtccgattctga

SEQ ID NO: 27628 - protein, 268 aa, Unknown
  Obtained from environmental sample
  misc_feature (1)..(268): Xaa is any amino acid
MVNPWVARRGVLFLFFPGTMSRAMNYKMLCETAADRGFHAISLQYVNDVSVNNKCSGSRNAECHENMRREVLFGADFSPHVHVSRPNSAENRLVKLLRYLANQYPLDGWEQYLTAGDVPRWSRILVAGHSQGGGHAALLGKYYSTAGVIMFASMDYNFSRDKAGSWIDKRSNTPIEKFFAVAHTMDEVMPIASMRKYWNAFGFKNIAPVINIDDIGFPYANSNTLITSIKPTRPVKPGKKSAVYHNLLCLDGDTPLLRDGKPRSLVRF

SEQ ID NO: 27629 - DNA, 495 bp, Unknown
  Obtained from environmental sample
  misc_feature (1)..(495): n is a, c, g, or t
atggaaaatatctactggcttgaacaggcgttaaaagccgatttttgcaatccgttatacgctctggcattaatcgaaaatgaaacccagtgggaaaaataccgttatcttttttccatgcacataaacttaaaaatgatagaacaatatatgttattgggcaacaaatggaacaagcgcaacgcctatttttacaacgccccatggaaagatcaaaatcttgaaagtcttgatattgcggaaacctgttaccgcaccgctctctactactgggacgaggctcttgtatggtacaagaaagccaacgacaggcgtttcaggtggatagatattcctaagatacaattctggcaggatgaagcttacaggatagaacagggtacgttaaactacgctaaaacgattaaccgagaactcgactctttgcagaaagtgcgagagaaatttcaggctatggaaaatttttacagaaaacaagactcgtttgcgcagtag

SEQ ID NO: 27630 - protein, 164 aa, Unknown
  Obtained from environmental sample
  misc_feature (1)..(164): Xaa is any amino acid
MENIYWLEQALKADFCNPLYALALIENETQWEKYRYLFSMHINLKMIEQYMLLGNKWNKRNAYFYNAPWKDQNLESLDIAETCYRTALYYWDEALVWYKKANDRRFRWIDIPKIQFWQDEAYRIEQGTLNYAKTINRELDSLQKVREKFQAMENFYRKQDSFAQ

SEQ ID NO: 27631 - DNA, 813 bp, Unknown
  Obtained from environmental sample
  misc_feature (1)..(813): n is a, c, g, or t
ttgtttgacggccttaaaaaggccaaccccgcctccaccctctacggttttaaaggaggccccagcggccttatcgacaataaaaccgtagtccttaccaaagagcacatagacgaataccgcaacacaggcggttttgacataataggttccggcagaacaaagattgagacaccccagcagtttgcctcttcgcttcaaacagcgaaaaccctcgggcttgacgcggttgtggttataggcggggacgattcaaacaccaacgccgcacttcttgccgaatactttgccgccaacggttccggcactcaggtaatcggctgccctaagacaatagacggggacttaaaaaacgaatatatcgaaacctcttttggttttgacaccgcctgcaaaacctacagcgagcttatcggcaacctttgcagggacaccaacagcgcgaaaaaatactggcactttgtaaaacttatggggcgcgccgcgagccacatcgcccttgaatgtgcttttcagacacagcctaacatctgccttatttccgaagaagtcgaggccaaacgctattctcttgacaacattgtagaccaagtctgcgcgtcaatagcgaaacgggcggacaacggcgagaatttcggcgttgtattaattcccgaaggactggttgagtttattccggaaattaaacatttaatagacgaacttaacgatacgatagccggagaggaagaaaaatcgcctctcttcataattttcccgaccaactgcaatggctgtccggcaggcttacggacatatcttacgcgattttaa

SEQ ID NO: 27632 - protein, 270 aa, Unknown
  Obtained from environmental sample
  DOMAIN (6)...(241): Phosphofructokinase
  misc_feature (1)..(270): Xaa is any amino acid
MFDGLKKANPASTLYGFKGGPSGLIDNKTVVLTKEHIDEYRNTGGFDIIGSGRTKIETPQQFASSLQTAKTLGLDAVVVIGGDDSNTNAALLAEYFAANGSGTQVIGCPKTIDGDLKNEYIETSFGFDTACKTYSELIGNLCRDTNSAKKYWHFVKLMGRAASHIALECAFQTQPNICLISEEVEAKRYSLDNIVDQVCASIAKRADNGENFGVVLIPEGLVEFIPEIKHLIDELNDTIAGEEEKSPLFIIFPTNCNGCPAGLRTYLTRF

SEQ ID NO: 27633 - DNA, 417 bp, Unknown
  Obtained from environmental sample
  misc_feature (1)..(417): n is a, c, g, or t
ttggaggtttttatgaagctgtataatttgaagatcatgactccggagcgcttgttttttgatggcgaggtcgaggctgtcacgctggcggcgccggatgggctggttacgatacttgctgatcacatcccgttcatcatgcctgtcgccgtcgggactatccgcatcaagaaagacgacgtctgggaggagtccgtcatttccgaagggtttatggaggttcaccgccagggtgtcctgattttcgtgcaggcttgcgagcacccgtatgaaatcgatcagcgccgtgcggaggaagccctccgccgcgcggaggagcatctccgccagaagcaaagcatgaatgaatacaagcagtcgaaattcgccctggcccgcgcgatggcaaggctgagagtcacaaaacccggggaatga

SEQ ID NO: 27634 - protein, 138 aa, Unknown
  Obtained from environmental sample
  DOMAIN (90)...(137): ATP synthase, Delta/Epsilon chain, long alpha-helix domain
  misc_feature (1)..(138): Xaa is any amino acid
MEVFMKLYNLKIMTPERLFFDGEVEAVTLAAPDGLVTILADHIPFIMPVAVGTIRIKKDDVWEESVISEGFMEVHRQGVLIFVQACEHPYEIDQRRAEEALRRAEEHLRQKQSMNEYKQSKFALARAMARLRVTKPGE

SEQ ID NO: 27635 - DNA, 375 bp, Unknown
  Obtained from environmental sample
  misc_feature (1)..(375): n is a, c, g, or t
atgcccaacatttctcccaaatggattaaatccctaggcgaaaatgaaattttcgtttttggcagcaacctcgctggatttcacggaggcggtgcagccgagctggctatggaatggggagcggtttgggggcagggcgttggattgcaggggaaaacctatgctattccaacaatgtttaaatcagtagaagaaatgaaaccttatattgacgaatttctgatttttgcaaaaacgcatcccgaattgaaatttctcgtcacagaattaggatgcggaatagcgggttttacgccaaaagatgtggcaccgctttttaaggcagtgatagacgaaaatattgagaatgtgtatttgccggagaggtttgtttaa

SEQ ID NO: 27636 - protein, 124 aa, Unknown
  Obtained from environmental sample
  misc_feature (1)..(124): Xaa is any amino acid
MPNISPKWIKSLGENEIFVFGSNLAGFHGGGAAELAMEWGAVWGQGVGLQGKTYAIPTMFKSVEEMKPYIDEFLIFAKTHPELKFLVTELGCGIAGFTPKDVAPLFKAVIDENIENVYLPERFV

SEQ ID NO: 27637 - DNA, 630 bp, Unknown
  Obtained from environmental sample
  misc_feature (1)..(630): n is a, c, g, or t
atgaataacccatcatttcttttggcaatttccggcggcttggacagcatgtgcatgctacatttctttgcaaaaaaacattcaaatttatatgcagcttatgtgaaccacggaattagacaagatgcaaacgaagattccaaattgataaaaaagaaatgcgaagaatatggcgttccattttacgaactttttatagaccaaaaaatttttgaaggcaaaaataattttgaagccattgcaagagaagctagatataatttgctctttgatttaaaaaataaattaggcacagattttttggcaaccgcgcaccacaaaaacgaccaagcagaaaccgtgtttttgcgaatagcacgaagcacgggtttaaaaggtttgcgaggaattttgccagagcgagaagacggagttattcgcccaatgcttaaattcacaaaagaagatttgcaaaaatacgcagaggaaaatgggattaaatggagagaagatagcaccaacaaaagtactaaccatttcagaaataaaattcgcttgcaaattttgccaaaaattgaagaagaatgtaaaggcacaataaacagcttggcgcacatagcagaactttccaaaaaatttacccgcaagtga

SEQ ID NO: 27638 - protein, 209 aa, Unknown
  Obtained from environmental sample
  DOMAIN (5)...(202): PP-loop family
  misc_feature (1)..(209): Xaa is any amino acid
MNNPSFLLAISGGLDSMCMLHFFAKKHSNLYAAYVNHGIRQDANEDSKLIKKKCEEYGVPFYELFIDQKIFEGKNNFEAIAREARYNLLFDLKNKLGTDFLATAHHKNDQAETVFLRIARSTGLKGLRGILPEREDGVIRPMLKFTKEDLQKYAEENGIKWREDSTNKSTNHFRNKIRLQILPKIEEECKGTINSLAHIAELSKKFTRK

SEQ ID NO: 27639 - DNA, 801 bp, Unknown
  Obtained from environmental sample
  misc_feature (1)..(801): n is a, c, g, or t
atgctgtccaaaattgacgccgataaatttcatactctcatagagataaactctctaataaattcaaattataaggatatacatagtcttttatccagaataatggaatccgccacgcttctttccgaagctgacgcgtccagtctttttttaatagacaaagaaaaaaacgagctttattttgaagtagccttgggttcaaagggcagtgaagttcaaaagtatacccttaaaatgggagagggaatcgcgggctggacggcgcagaacaataaatccttaattgttaacgatgtaaagaacgacaagcgtcaccttcacagtattggggaagaaatcaattacaaatcaaaaacaattatgactgtcccaatgaggataaaagacgattgtatcggcgttcttgaagttataaataaaaaaaatgaaaccggctttacgcaagaagatcttgaatggcttgaaattttcgccaatcaggcggcgctggcgattgtcaacgcaaaaacaatggaagaggtgcgcagtgaaattcaggatctgcatgacagactgcaaagcgatcagttccatacaatcattacaaaaagcccggctattcttgaaataatggaaattattgacaaagtggcaaaaaccgattcgtccgttttgcttttaggggagagcggagtaggcaaggaattatttgccgaacagatacatttaaaaagcgctcgcaaagaccgtccgtttataagaattaactgcgcgacgattcccgaaggcttgctgagaaagcagagctttttggtcatgtga

SEQ ID NO: 27640 - protein, 266 aa, Unknown
  Obtained from environmental sample
  DOMAIN (193)...(265): Sigma-54 interaction domain
  misc_feature (1)..(266): Xaa is any amino acid
MLSKIDADKFHTLIEINSLINSNYKDIHSLLSRIMESATLLSEADASSLFLIDKEKNELYFEVALGSKGSEVQKYTLKMGEGIAGWTAQNNKSLIVNDVKNDKRHLHSIGEEINYKSKTIMTVPMRIKDDCIGVLEVINKKNETGFTQEDLEWLEIFANQAALAIVNAKTMEEVRSEIQDLHDRLQSDQFHTIITKSPAILEIMEIIDKVAKTDSSVLLLGESGVGKELFAEQIHLKSARKDRPFIRINCATIPEGLLRKQSFLVM

SEQ ID NO: 27641 - DNA, 813 bp, Unknown
  Obtained from environmental sample
  misc_feature (1)..(813): n is a, c, g, or t
atgcgcgagtgctttagcacgagcagcgcgctcggagtgaagtccaaacttctgggctttatcaacgcggttctgggaaaaacaggagatgacaaattcacctctattgaaatcctggaagataaaacattcacgccggaaataataggcgacaaatcggttacattggacgtaagggccgtcttgcacggcaaaacaaaggttaatgtagaagtccagcttcgtaacgagcataatatggacaaaagaagccttttttactggagcgaggaatttgtcaacagcttgaaaacgggacaggattacatcgaacttcctgacgtgatagcgataaatatagttgacttcgactataccaatactcgttcttttcacagttgtttccacctgcgcgatgacaatgaaaaggatgtaattctgacaaattcactggaaatacactttataaacatggtaaaatacaggaagatgaagggaaaattaaatgattcccttagccattggcttacatggtttgacagaaacagtacgtctgaaatactggaggaggtgttaaagatggataacgctatacagacggctaatgaaagactgttacatgttactggagacgaagacgcgcgtcgcgcctaccttgtgcggttcagggcgatgtgcgacatgaccagcatgcaaaatgcctctcatagaaaaggcgttgaagaaggtattttaattactgcccgcaacgcactggaagaagggatatctgtcgaaatggttcaaaaaataactggtctcagtatggatgaaatagaacggcttagaaattaa

SEQ ID NO: 27642 - protein, 270 aa, Unknown
  Obtained from environmental sample
  misc_feature (1)..(270): Xaa is any amino acid
MRECFSTSSALGVKSKLLGFINAVLGKTGDDKFTSIEILEDKTFTPEIIGDKSVTLDVRAVLHGKTKVNVEVQLRNEHNMDKRSLFYWSEEFVNSLKTGQDYIELPDVIAINIVDFDYTNTRSFHSCFHLRDDNEKDVILTNSLEIHFINMVKYRKMKGKLNDSLSHWLTWFDRNSTSEILEEVLKMDNAIQTANERLLHVTGDEDARRAYLVRFRAMCDMTSMQNASHRKGVEEGILITARNALEEGISVEMVQKITGLSMDEIERLRN

SEQ ID NO: 27643 - DNA, 363 bp, Unknown
  Obtained from environmental sample
  misc_feature (1)..(363): n is a, c, g, or t
atgcctacgaaaaaaagcgcccccatctgtgactgcgacgtcattcacagcaagctggtcgagcaggtgcgcaagaccatgccgagggaggaggacttttacgacctagccgacctatacaagatgttctcggacaccacaagagtccgcatcttgtgggcgctatccgccgcccaactatgcgtctgcgacattgccgttcttttaaatatgaccaagtcagccatatcacatcaactcagggcgttgcgcttagccaatttagttaaatatgataaaaagggtaaatcagtctattattcattagcggacagtcatgtaaaagacatttttgagaagggatttgaacatataagagaatga

SEQ ID NO: 27644 - protein, 120 aa, Unknown
  Obtained from environmental sample
  DOMAIN (45)...(91): Bacterial regulatory protein, arsR family
  misc_feature (1)..(120): Xaa is any amino acid
MPTKKSAPICDCDVIHSKLVEQVRKTMPREEDFYDLADLYKMFSDTTRVRILWALSAAQLCVCDIAVLLNMTKSAISHQLRALRLANLVKYDKKGKSVYYSLADSHVKDIFEKGFEHIRE

SEQ ID NO: 27645 - DNA, 756 bp, Unknown
  Obtained from environmental sample
  misc_feature (1)..(756): n is a, c, g, or t
atgtcaggccactccaaatgggctaccatcaagcgggcgaaaggcaaggccgacgccgcccgcggcaagttgtttaacaggctgatccgcgagatcaccatcgcggctcgtatgggcggcggggacgtcaccgcgaacccgcgtctgcgcaccgccgtctccgccgctcgtgcggccaacatgccgggcaagaacgtcgattcggcgatccagaagggtaccgggcagctcgacggcgtgaactacgaggagatcacctttgagggctacgggccgagcggcgtggccatcctcatcgaggccgtgaccgacaaccgcaaccgcacggtggcggaggtgcgccacctgctgaccaagtacggcggcaatttgggccagaccaactccgtacccaggatgttcaagtccacgggcatcataaccgtggccaaagagtccgtcgaagaggacaaactaatggaactggtgctggaagccggcgccgacgacatgtccgccgagggcgatgagtacgaaatcacaacgtcggtagacgccttcgacgccgtgcgcgaggcgatagtgaacgccaagatcgagcccacctcggcggagatcacaaaagtagtccacactcctgtccacttagacggcggcgcccccgtcaagataatgaaattggtcgacgctttggacaaactctacaacacccatcacgtctacaccgggattgacctccccgacgaaaaaccgcctaaaaggactacgattttgtaa

SEQ ID NO: 27646 - protein, 251 aa, Unknown
  Obtained from environmental sample
  DOMAIN (5)...(238): Domain of unknown function DUF28
  misc_feature (1)..(251): Xaa is any amino acid
MSGHSKWATIKRAKGKADAARGKLFNRLIREITIAARMGGGDVTANPRLRTAVSAARAANMPGKNVDSAIQKGTGQLDGVNYEEITFEGYGPSGVAILIEAVTDNRNRTVAEVRHLLTKYGGNLGQTNSVPRMFKSTGIITVAKESVEEDKLMELVLEAGADDMSAEGDEYEITTSVDAFDAVREAIVNAKIEPTSAEITKVVHTPVHLDGGAPVKIMKLVDALDKLYNTHHVYTGIDLPDEKPPKRTTIL

SEQ ID NO: 27647 - DNA, 762 bp, Unknown
  Obtained from environmental sample
  misc_feature (1)..(762): n is a, c, g, or t
ttgctcatttttgacgaaatacaggaatgtccaaaagccttgacttccttaaaatatttttacgagaatgctccagaatatcatattgtttgcgcgggaagtttgcttggggttgcgacctcgagctctgagggtagcggctttcccgttggaaaagttgattttttaaccctttacccaatgacttttttggaatttttggaagtacttggaaaaaacgattttgtccacataataaaaaatctggaattcaagcaactagttatatttcacgaaaaaatcttggaatttttgaaacagtatttttttattggcggtatgcctatggctgttaaaatttttgccgaaagcggagattttgcagaggcaagaaatactcaaaatatcattatgcaaagttattatgcagattttgcaaaacatattccctcacacgacattgcaaaagtccggcaaatttggaattcaattccaaagcagctctcaaaagaaaacaaacgctttttgtatgcagatttaaaaatcggcgcaagaggaagagattacgaaacagctctgcaatggctaatagattctgggcttgttcgcaaaataaacaaggtgaattcaccaagccttccactaatagcttacgaagaaagctctattttcaagctttattttggagatgtggggcttttgtgcgctatggcaaatttggatataaaaaccattctggaaccaaaagacgaattatttttcggccgagctcggccgatctga

SEQ ID NO: 27648 - protein, 253 aa, Unknown
  Obtained from environmental sample
  misc_feature (1)..(253): Xaa is any amino acid
MLIFDEIQECPKALTSLKYFYENAPEYHIVCAGSLLGVATSSSEGSGFPVGKVDFLTLYPMTFLEFLEVLGKNDFVHIIKNLEFKQLVIFHEKILEFLKQYFFIGGMPMAVKIFAESGDFAEARNTQNIIMQSYYADFAKHIPSHDIAKVRQIWNSIPKQLSKENKRFLYADLKIGARGRDYETALQWLIDSGLVRKINKVNSPSLPLIAYEESSIFKLYFGDVGLLCAMANLDIKTILEPKDELFFGRARPI

SEQ ID NO: 27649 - DNA, 483 bp, Unknown
  Obtained from environmental sample
  misc_feature (1)..(483): n is a, c, g, or t
ttgtttaaaaagcacttgagtccgcaaataacggctgttggcgtgtttgtgaatgcggaaattccctctataaccaagctgtataattctggcataataaatattgcgcaactgcacggcaatgaaagcgaagattatataaatactctaaaaaaaacttgcgatgtgcctgttataaaagctgtgaacatagaaagtgcaaagcctgcaaatgcagactacctgctttttgataatggcaaaggtggaacgggcaagtcttttgactggaatttaatccccaaatgcgataaggaatttttcttggccggtggcataaatttaaacaatatcagagaagccgtaaaactgaacccctacggcatagatttgagcagcggggtggaaaatgaaaaaggcgaaaaagacagggagaaaattcttgaagcctgccggattgtgagaattacggaaaagggtgcgaaacttacacctttttcctga

SEQ ID NO: 27650 - protein, 160 aa, Unknown
  Obtained from environmental sample
  DOMAIN (2)...(143): N-(5'phosphoribosyl)anthranilate (PRA) isomerase
  misc_feature (1)..(160): Xaa is any amino acid
MFKKHLSPQITAVGVFVNAEIPSITKLYNSGIINIAQLHGNESEDYINTLKKTCDVPVIKAVNIESAKPANADYLLFDNGKGGTGKSFDWNLIPKCDKEFFLAGGINLNNIREAVKLNPYGIDLSSGVENEKGEKDREKILEACRIVRITEKGAKLTPFS

SEQ ID NO: 27651 - DNA, 864 bp, Unknown
  Obtained from environmental sample
  misc_feature (1)..(864): n is a, c, g, or t
atgcgccccttctcattctgcgccggaactttaacgcaaagaccgtccatgccttgctggatcacatataccaatttaaaaacacacgaaataattaggtcgaacattcaccgttctccgttatacggcggaaaaattacaggaacaggagcgcgatactgcccttctatagaagacaaggttgtccgtttcccgcaaagggaacggcaccatatttttatcgaacctgaaggactttcaactaacgaaatgtacatgaacggcgcttccagttccctgcccgaagacgtgcagcgggaatttatccgcaccattcccggtcttgaagacgcccgcattgtccgccctgcttatgcggtggagtacgattatattgatccccttgatctttatccctcacttgagtcaaaacgcatatccggtttctattcggcagggcagacaaacggcagttccggttatgaggaagccgcagctcaggggttaattgccggcattaatgccgcaatgaaaatgctgaaccgtccgcctatgatacttggacgcgccgaagcctacatcggcgttttggtggacgatcttacaacactgggaacaaaagagccgtaccgaatgttcacaagccgcgccgaacaccgcttaatgctccgccacgacacagcggacacaaggcttactcccagggggcgcgatgccggtcttgtagacgacaaccgctgggagcagtttcttgaaaaggcaaagaaactggacgcaattacagaacttcttgcgcagcggcattcaaaagtaaaatcctgcaagggtgacgacgtgttagccggcaataccgcttgtacggaaattggcaggctatccggctga

SEQ ID NO: 27652 - protein, 287 aa, Unknown
  Obtained from environmental sample
  DOMAIN (1)...(176): Glucose inhibited division protein A
  misc_feature (1)..(287): Xaa is any amino acid
MRPFSFCAGTLTQRPSMPCWITYTNLKTHEIIRSNIHRSPLYGGKITGTGARYCPSIEDKVVRFPQRERHHIFIEPEGLSTNEMYMNGASSSLPEDVQREFIRTIPGLEDARIVRPAYAVEYDYIDPLDLYPSLESKRISGFYSAGQTNGSSGYEEAAAQGLIAGINAAMKMLNRPPMILGRAEAYIGVLVDDLTTLGTKEPYRMFTSRAEHRLMLRHDTADTRLTPRGRDAGLVDDNRWEQFLEKAKKLDAITELLAQRHSKVKSCKGDDVLAGNTACTEIGRLSG

SEQ ID NO: 27653 - DNA, 348 bp, Unknown
  Obtained from environmental sample
  misc_feature (1)..(348): n is a, c, g, or t
ttgtctctatggaggaacgcatgccttttttactttgaggaaagtagtatgaataagtgtcacttagcaaagttgtctttagcagctttactcgctacggcttcggtcgtattcgcacaagaacctgctccggcacaagcggaaacagttccagttgcagaacccactcctgctcctgttgcagagcctgcaccaccagccccaacaccagcaccagcaccggaagttaaaccgatactagaagttaaaccagaaccagccccagccaaagcggcaagcggaacaaaaatttctctatacggattcgcacagctcaatgcaattgggaagacggcgtttaagcactaa

SEQ ID NO: 27654 - protein, 115 aa, Unknown
  Obtained from environmental sample
  misc_feature (1)..(115): Xaa is any amino acid
MSLWRNACLFYFEESSMNKCHLAKLSLAALLATASVVFAQEPAPAQAETVPVAEPTPAPVAEPAPPAPTPAPAPEVKPILEVKPEPAPAKAASGTKISLYGFAQLNAIGKTAFKH

SEQ ID NO: 27655 - DNA, 1158 bp, Unknown
  Obtained from environmental sample
  misc_feature (1)..(1158): n is a, c, g, or t
atgaatatttcacctgaaaaagttgttgcctatttccagcccattctttcggcagattcaaaaactgtatattcttacgaaattctagggcggtatatagatgatgaaggagccgtacactccttaggtccgttttttaacgatttaaacaccacaaacgaagatgcgtttgcagtggatagacttgtaagacgatatgctttgaaaaaatacgccgaagaaaagcgtagtgaatatctatttatcaacataaggcttgcctggctcacgcaattcacagacagaccagatttaatgctaactttgaaatgggcagaggaatttggcatagctcttgaaaaactggttatagaaattacggaagaagaatttaatgcaggcaatgcttacattcgtgccgtacttcattacaaaggtgttggttgccgtattgcgcttgatgattatggaaaaggcgcaagcgatattgataggttggcagagataaagccagacattataaaaataaatatggactatatccataaaagcgaaaaatcttactattatcgcgaatatatgcgttccattgccgattttgccgaatcggttggaattgaagtgctgtacgaaggcatagaaactagggagcagcttgatatttgcacggctttaaaaggcagattttatcagggatttttaattgcccgcccccaagcttcaatgagtgatgcagttataaacgaagctattttttctgaatcaattgaaaatttatacacagttctgcaagatgaaatatctaaaacagagattctgcgtaaatccttagacactcaaattgagcatttcttgaaagaaaatccttttgattccgaaaaaaattacaacgaatatctttcaaaactctgtcaagaattatcaaatgtatggcagatttatttatgcgacagccacggtaaccagtttaccccaaacattgcatcttccaaaaaagttcgtccaaaaaaattactattccgcanaaccgagcaagagttacacaaaaacaaaaattggatttggcgcggatattttcacgatgctttgaaatcttttgcctctggtcaaagaagctgtatatcttctacctatcacgattttttaccaaagaaaaagtcgcacttatcataccaatag

SEQ ID NO: 27656 - protein, 385 aa, Unknown
  Obtained from environmental sample
  DOMAIN (1)...(231): EAL domain
  misc_feature (1)..(385): Xaa is any amino acid
MNISPEKVVAYFQPILSADSKTVYSYEILGRYIDDEGAVHSLGPFFNDLNTTNEDAFAVDRLVRRYALKKYAEEKRSEYLFINIRLAWLTQFTDRPDLMLTLKWAEEFGIALEKLVIEITEEEFNAGNAYIRAVLHYKGVGCRIALDDYGKGASDIDRLAEIKPDIIKINMDYIHKSEKSYYYREYMRSIADFAESVGIEVLYEGIETREQLDICTALKGRFYQGFLIARPQASMSDAVINEAIFSESIENLYTVLQDEISKTEILRKSLDTQIEHFLKENPFDSEKNYNEYLSKLCQELSNVWQIYLCDSHGNQFTPNIASSKKVRPKKLLFRXTEQELHKNKNWIWRGYFHDALKSFASGQRSCISSTYHDFLPKKKSHLSYQ

SEQ ID NO: 27657 - DNA, 870 bp, Unknown
  Obtained from environmental sample
  misc_feature (1)..(870): n is a, c, g, or t
atggcccgctttacccaatttgcggtggcggcggcggcgcaggccctgaccgacgcgggccttatgggggaggccacgcccgagggcaagcgcccggtaaaaagcaatcccgacagaaccggcgtcgttatgggcaacggaatcggcggttttgaaattgttacagaatcttacaaaaaactttttgacgcggggccaaagcggatgctgcccctcaccgtccccatgatgattccaaacgaggcggcgggaaatatctcgatgatgttcggcaccaggggaccggcttttacccaggtaaccgcctgcgcttccggcaccgacgcgctgggccaggctctggacgttatccgcgcgggccgctgcgacgtggtcatcgcgggcggcaccgaagccaccatcgttccctttgccgttggcggcttccagatgctcaaggccctttccaccaaacgctgcaacgagcctacaaaagcgtcccgcccctttgacgttgaccgcgacggcttcgtcattgccgaaggttcgggcgtccttgtccttgaaagcgaggaacacgccaaagcgcgcggggcgaagatactggccgaacttgccggttacggcgcgagcgccgacgcgtatcacataacggcgccggatcccacgggtaccagcggggccaacgcggtgaaacttgccatcgcggacgcgggccttaaacccgaggatatccagtactacaacgcccacggcacctcgacggaaatcaacgaccccacggaaacaaaaatgctcaaaatggttttcggggatcacgcctataagaagaagggttccagcaccaagagcatgcacgggcactgcatcgccggcgggcggcggcattga

SEQ ID NO: 27658 - protein, 289 aa, Unknown
  Obtained from environmental sample
  SIGNAL (1)...(15)
  DOMAIN (195)...(289): Beta-ketoacyl synthase, C-terminal domain
  misc_feature (1)..(289): Xaa is any amino acid
MARFTQFAVAAAAQALTDAGLMGEATPEGKRPVKSNPDRTGVVMGNGIGGFEIVTESYKKLFDAGPKRMLPLTVPMMIPNEAAGNISMMFGTRGPAFTQVTACASGTDALGQALDVIRAGRCDVVIAGGTEATIVPFAVGGFQMLKALSTKRCNEPTKASRPFDVDRDGFVIAEGSGVLVLESEEHAKARGAKILAELAGYGASADAYHITAPDPTGTSGANAVKLAIADAGLKPEDIQYYNAHGTSTEINDPTETKMLKMVFGDHAYKKKGSSTKSMHGHCIAGGRRH

SEQ ID NO: 27659 - DNA, 321 bp, Unknown
  Obtained from environmental sample
  misc_feature (1)..(321): n is a, c, g, or t
atggctaaaactaaagtcttgaaaaaaacacacccaataagcgagcttgaagctaaaatgaatccggcggttctggcaaaagcaaaaaaaatggcggaggaagagagccttaatatccggcttgcgatactacgggaaaaatacggaaagaaacaaagcgagattgcaaacattactcaaaccgctgtgtcaaaacttgaaaatcgcaaaaacatccggatttctactttgatagattatttggacagcctcggtatgggtctggaaataaccgcgcgcccaagaaattccgccaagaaggagttactgttgagggtgtga

SEQ ID NO: 27660 - protein, 106 aa, Unknown
  Obtained from environmental sample
  DOMAIN (41)...(91): Helix-turn-helix
  misc_feature (1)..(106): Xaa is any amino acid
MAKTKVLKKTHPISELEAKMNPAVLAKAKKMAEEESLNIRLAILREKYGKKQSEIANITQTAVSKLENRKNIRISTLIDYLDSLGMGLEITARPRNSAKKELLLRV

SEQ ID NO: 27661 - DNA, 1173 bp, Unknown
  Obtained from environmental sample
  misc_feature (1)..(1173): n is a, c, g, or t
atgacagcgagccgccgctgcattacatccacacaaaggccgaaggatcgcttgagtattcaacctctgttttacataccaaagaaagctccctttgatctgtacaatgtcgattacaaacccggagtaaaactctacgtcaagcgggtattcatcaccgatgacgacaaggaactgatgcccgtatggctgcgctttgtccgcggcgttatcgattccgaagacctgccccttaatgtaagccgcgagatcctccagcagaacaaggtgctgattaatattaaaaacgcctcggtaaaaaaactgcttaccgaattcaaacagatggcggataacgccgtttcggtcggtgatgaagccagggaaaaatgggatacctttgtcagagagtttaaccgcccgctaaaggaaggactgtaccaggattttgccaaccgcgaggcgctcatggaacttgtccgcttcaagagtaccgccgcggaagaggcggagggcaagcccgtctggaccagctttgacggttacgtttcacgcatgaaaagcgaccagaagcacatctactacatcacgggcggcgacgagaaaaccctgcgctcctccccccttctggaagcctaccgcgcaaaagggatagaagtcctcatcatggacgacgacatagacgacattgtaatccccaccctgcacagttacaggaaagagaccacaggcacagacggcaaaactgaaacccagacctgggaactaaaagcggtaaaccgtgccggcgcggacgaggaactgggagaaaagaaggacaagactgccgaaaaggaagcaaaacctatcttagagaaagtcaaaaaagcccttggcgacagggtaaaggacgtaaagctctcccgccgcctccacgactctccctcctgcattgtggcggatgaaaacgaccccagcatacagatggcgcagatgctcaaggcgatgggccaggcaacgatgccggacgtaaagccaatcctggaactcaacggggatcatcccattgtagccggtctcaagaacacagacgacgaggggcgcatcgccgacaccgcgtccgtgcttctcgatcaggcgctgctggtggaaggcattaaacttaatgacccggcggatttcgtgaaacgcttaaatcggctgctatccaaatag

SEQ ID NO: 27662 - protein, 390 aa, Unknown
  Obtained from environmental sample
  DOMAIN (1)...(390): Hsp90 protein
  misc_feature (1)..(390): Xaa is any amino acid
MTASRRCITSTQRPKDRLSIQPLFYIPKKAPFDLYNVDYKPGVKLYVKRVFITDDDKELMPVWLRFVRGVIDSEDLPLNVSREILQQNKVLINIKNASVKKLLTEFKQMADNAVSVGDEAREKWDTFVREFNRPLKEGLYQDFANREALMELVRFKSTAAEEAEGKPVWTSFDGYVSRMKSDQKHIYYITGGDEKTLRSSPLLEAYRAKGIEVLIMDDDIDDIVIPTLHSYRKETTGTDGKTETQTWELKAVNRAGADEELGEKKDKTAEKEAKPILEKVKKALGDRVKDVKLSRRLHDSPSCIVADENDPSIQMAQMLKAMGQATMPDVKPILELNGDHPIVAGLKNTDDEGRIADTASVLLDQALLVEGIKLNDPADFVKRLNRLLSK

SEQ ID NO: 27663 - DNA, 687 bp, Unknown
  Obtained from environmental sample
  misc_feature (1)..(687): n is a, c, g, or t
ttgccccggttttatatccacttcaagtatattgtgccgcccaaaaatatcgacgtaatcatggtcgcgcccaaaggccccggtcatatggtgcgccaactttataccgaaggcgcgggcgttccggcgcttttcgccgtacaccaggattccagcggcaaggcgcgcgagatagccatggcttacgccaaagccatcggcggcacgcgggcgggaatttttgagacgacttacaaagaggaaacggagaccgaccttttcggtgagcaggcggttttgtgcggcggcatgtcggcgttggttacggccggttttgaaactctcgtcgaggctggctatcagccgacaatggcgtattttgaatgtctgcatgaaatgaaattgatcgtcgacctgatgtacaagcacggcttagcgggcatgcgctattccatttccaacaccgccgagtacggcgacctgaccgtcgggccgaaaatcattgacgcggcgaccaaagcgcggatgaaagaagtcttaaagcggatccagagcggcgagtttgccgaggaattcgttaaggaatgcaaagcgggcaagcccaatatgaacaaattgcgtgccaaagcgaaagaacacttagtcgaaaaagtcggcgaggagttacgctccaaaattccgttcctcaagggcggaaaattactgtag

SEQ ID NO: 27664 - protein, 228 aa, Unknown
  Obtained from environmental sample
  DOMAIN (1)...(72): Acetohydroxy acid isomeroreductase, catalytic domain
  misc_feature (1)..(228): Xaa is any amino acid
MPRFYIHFKYIVPPKNIDVIMVAPKGPGHMVRQLYTEGAGVPALFAVHQDSSGKAREIAMAYAKAIGGTRAGIFETTYKEETETDLFGEQAVLCGGMSALVTAGFETLVEAGYQPTMAYFECLHEMKLIVDLMYKHGLAGMRYSISNTAEYGDLTVGPKIIDAATKARMKEVLKRIQSGEFAEEFVKECKAGKPNMNKLRAKAKEHLVEKVGEELRSKIPFLKGGKLL

SEQ ID NO: 27665 - DNA, 699 bp, Unknown
  Obtained from environmental sample
  misc_feature (1)..(699): n is a, c, g, or t
atgttattgatttgggggattaaaatggcaagtgacgcggcggcacaaatggcctactctgatttttcccgcgccaggggaaaggcgatgttatcgcaaatacagaattttttaaatacggatcgtgacaaactgctttcatttaacgatgtcaaaggcatactgaagcccaagaacgaagtatacatgggaagccagacggtgccgataaaattgattgtcggcagtgaaggccgttaccatgattttaacaaatattttctaccgcgcaaagatcatatgcgccaacgctggtcaaaggttgacgaggcgcacatcaaggatataattcttccccctattctcctttatgaaatcggcggagtatattttgtacgcgacgggaatcaccgcgtgtcagtcgcaaaaatgcagggcgttgaatttatagacgcggaagtaatcagtcttacgacggagataaatattaaaccttccatgactacggaagaattaacgtccgaacttatcaaatatgaaaaaaatattttttacggcgaaacattattcggcgacttaaccgattactgggacatgaatttcagttctccagggcgttatgacgttatttacaaccatatacttgtccataaatactatttaaacgaggatattgaagaggagattctttttacaacgccctgtatcatggtacaataa

SEQ ID NO: 27666 - protein, 232 aa, Unknown
  Obtained from environmental sample
  misc_feature (1)..(232): Xaa is any amino acid
MLLIWGIKMASDAAAQMAYSDFSRARGKAMLSQIQNFLNTDRDKLLSFNDVKGILKPKNEVYMGSQTVPIKLIVGSEGRYHDFNKYFLPRKDHMRQRWSKVDEAHIKDIILPPILLYEIGGVYFVRDGNHRVSVAKMQGVEFIDAEVISLTTEINIKPSMTTEELTSELIKYEKNIFYGETLFGDLTDYWDMNFSSPGRYDVIYNHILVHKYYLNEDIEEEILFTTPCIMVQ

SEQ ID NO: 27667 - DNA, 417 bp, Unknown
  Obtained from environmental sample
  misc_feature (1)..(417): n is a, c, g, or t
atgtcccgcagacggcctatggattcaagtatttgtcttccgcccacttcctgctcttccatcgcgcttaagatgttttgctcatgctcggaaactgtttttacgcttgtgtctatagccccgaaacgcgcaagcacatcttcggatgatttggtgatgctgtctatggactcttttatttttttaagcattgccgtggtggtttttgactgctcgctggaactttccgccagtttgcggatttcatcggctactacggcaaaacccctgcccgaatctcccgcgtgcgccgcctcaatcgcggcgttcatcgaaagcaggttggtctggctggcgatattgttcattacggcgtttatttccaaaagcccctcggagtctttcgatatttcctgtatcttctgcgccaccgtctga

SEQ ID NO: 27668 - protein, 138 aa, Unknown
  Obtained from environmental sample
  misc_feature (1)..(138): Xaa is any amino acid
MSRRRPMDSSICLPPTSCSSIALKMFCSCSETVFTLVSIAPKRASTSSDDLVMLSMDSFIFLSIAVVVFDCSLELSASLRISSATTAKPLPESPACAASIAAFIESRLVWLAILFITAFISKSPSESFDISCIFCATV

SEQ ID NO: 27669 - DNA, 693 bp, Unknown
  Obtained from environmental sample
  misc_feature (1)..(693): n is a, c, g, or t
atgggacggtcatacagaaaaaataaccccaataaaaaatcacatttaagggataaggatcccccgcttgatattgccaggctgctggaaaaaacgcattttgaaacgattatggctttttctgaggcgttggaagccagagacgagtataccgcaggccattcgcgccgtgttatggaatattccaaaggcatcggtcagcgcatgaaaatggataaacaggatattgaagaccttaaaaggtcggcattattgcatgacatcggaaaaataggaatacccgacacgattcttaaaaagcagacaaaattaaccgatgaggaatacgccgtaattaaatcacaccccgaaacaggagcctctatccttaaatatataaaatcattcacacatttagtgccggctgtttatcatcaccatgaacggtttgacggcgatggatatccgaatggcattaaaggcacggaaattcccctgcatgcgcggattattgccattgcagatacttttgacgcaatgacctcaagcagatcgtacagaaaaaaggcgctttctttcagggttgcgttatccgaacttgaacggaataaaggcttacaattcgatcctgacattgcagatatttttattgaaatattggaggaagcgcctttttattttacgcggtttagggaacctgaatatcatttatag

SEQ ID NO: 27670 - protein, 230 aa, Unknown
  Obtained from environmental sample
  DOMAIN (51)...(173): HD domain
  misc_feature (1)..(230): Xaa is any amino acid
MGRSYRKNNPNKKSHLRDKDPPLDIARLLEKTHFETIMAFSEALEARDEYTAGHSRRVMEYSKGIGQRMKMDKQDIEDLKRSALLHDIGKIGIPDTILKKQTKLTDEEYAVIKSHPETGASILKYIKSFTHLVPAVYHHHERFDGDGYPNGIKGTEIPLHARIIAIADTFDAMTSSRSYRKKALSFRVALSELERNKGLQFDPDIADIFIEILEEAPFYFTRFREPEYHL

SEQ ID NO: 27671 - DNA, 462 bp, Unknown
  Obtained from environmental sample
  misc_feature (1)..(462): n is a, c, g, or t
atgctgatgctccttaaaattgataatgatgttatcaccgacgtgcgctggagaacatacgggtgcgccagcgccattgcgtcaacaagcatgttgtcggaagtaataaagggcatgaaaatagaggatgcctacaaggtaaggccggaggaccttgttgaaaagctgggcggcctgccctcatacaagatacattgttccgtgttaggcgacaaagccctgcgcgccgccattgacgactaccttgccaaaaccggcaggccgggaatgttacaggaatctgtcaccgagatttgccactgcctgggcatcaccgacaaggacattgaaaacgcctatcaaaacggagcccgcgattgggaggctttacagcaggccacaaagatcggcactgtctgcgggaactgcaaaacaaaagcgatggagttgctgcatgggctggaacacatctacgggatgtaa

SEQ ID NO: 27672 - protein, 153 aa, Unknown
  Obtained from environmental sample
  DOMAIN (96)...(148): BFD-like [2Fe-2S] binding domain
  misc_feature (1)..(153): Xaa is any amino acid
MLMLLKIDNDVITDVRWRTYGCASAIASTSMLSEVIKGMKIEDAYKVRPEDLVEKLGGLPSYKIHCSVLGDKALRAAIDDYLAKTGRPGMLQESVTEICHCLGITDKDIENAYQNGARDWEALQQATKIGTVCGNCKTKAMELLHGLEHIYGM

SEQ ID NO: 27673 - DNA, 1173 bp, Unknown
  Obtained from environmental sample
  misc_feature (1)..(1173): n is a, c, g, or t
ttgttttcactatttttaaaaaaatccataaagtcaaaaaaaaacgaaaattctaattttgtttcaatcataatatctgcacacaacgaagaagaaatcatagaacaaaaaattttaaacaccttggctttgaactatccaaaagacaaaatggaaatttggattggcgatgatggttctaccgacaaaacctcagaaattgtgcaaaaattcagcgaagtgcatttatttaaaaaagaaaaaaacgaaggaaaagccgctatgctcaacgacttgtgcaaaaaagcaaaaggcgatttttttctttttagcgatgcaaatacaatgattgaaagaaatgcattgaaaaatttaatatctgaatttaccgataatagcattggctgtgtttgcgggcaacttgccctaaaagatgaaagcggttctgatttgagcaaaacagaaagcgtttattggaagggagaatccaaattgaaaatgctggaaagccgttttggagcggtgatgggaagcaatggtgcattgtatgcaattcgcacgggattatacccaactcttccaacgcataaaaccataatggacgatttttacataacggcaaaaattctgatgaaaaaccattcctgcatattttgcgaaaatgcccttgcctttgaaaatacttccatttcaaaatatggggaattcaatcgcaaggttcgcattggcagagccaatttcaattttgtttcaacattttttcctctgctaaatccgttgaaacccatgagagcgtatatgtttttatcgcataaattgctgagatgggttagcccatttttgccttttgtactttttgcaagcagtgtttttgttattgaggtacatatattttacaaagtatttctaagcattgaaatgttggttcccaatagccgcattattaggtgtacaagtatgcagctattttttaagcatgaatttggccttgtttctcggtttttgcaaatcgtttttcaaagaaagcggcggagcttggaaaagggtggaacgtcaaaaataaaatccggcttctacattcactcccttgttgaatgttggatgcataacaaaataagctgggctgtcaaagtcgtgaagcattgcatcaactgcggcatctgcaagggaatagagataaaacaatgttattga

SEQ ID NO: 27674 - protein, 390 aa, Unknown
  Obtained from environmental sample
  SIGNAL (1)...(29)
  DOMAIN (22)...(182): Glycosyl transferase family 2
  misc_feature (1)..(390): Xaa is any amino acid
MFSLFLKKSIKSKKNENSNFVSIIISAHNEEEIIEQKILNTLALNYPKDKMEIWIGDDGSTDKTSEIVQKFSEVHLFKKEKNEGKAAMLNDLCKKAKGDFFLFSDANTMIERNALKNLISEFTDNSIGCVCGQLALKDESGSDLSKTESVYWKGESKLKMLESRFGAVMGSNGALYAIRTGLYPTLPTHKTIMDDFYITAKILMKNHSCIFCENALAFENTSISKYGEFNRKVRIGRANFNFVSTFFPLLNPLKPMRAYMFLSHKLLRWVSPFLPFVLFASSVFVIEVHIFYKVFLSIEMLVPNSRIIRCTSMQLFFKHEFGLVSRFLQIVFQRKRRSLEKGGTSKIKSGFYIHSLVECWMHNKISWAVKVVKHCINCGICKGIEIKQCY

SEQ ID NO: 27675 - DNA, 1521 bp, Unknown
  Obtained from environmental sample
  misc_feature (1)..(1521): n is a, c, g, or t
atggggcatttcataccggagaggattggcaagaatatgatagatgtcgatgttgaatacggtgagcacagacaagcggcttttcaggcaatacaggacgggaagccctatagcctgagtttctatgatccgaatttcaaagaaaattgccattttgtaatggaacctttcactatcggcaattcaggcgtaagctggatgataattataggaaccatggattcctttgtcctcaaagaagtcagggctataaccaaatttaccatcattctggccgtgatagccattttggcgtcggcggtgattatttattatgttctgggcaaatcaaccaaaccaatcggaaaggtagccgatacgctcaaaattgtggcgaaaggcgatctgacgaagagcgtcaatatcactacaaaagatgaaatgggcgatcttgcccgtgactttaactttacgatgggaaaaatcagaaaccttataagttcaataaaatataaaatcaacgggcttaaccataccagttttgagctttccgtcaatatgggcaagacttctacggcggttcagcagattagctcgagtcttgacagtatgaagaccctcatggttaatcaggaaaaaggcgcggaagaagcgggcaaggcggtaggggatattaaaaccaatattgacagcctgaacaggatgatagaagaacaaaccgacagcgtaaacaggtcgtcttccgccattgaggaaatgactgccaacattaattcggtaacccggacgctggttgagaacagcaaaaacgtcagcactttgaccgaagcgtcggaaaacggtaaaacaggcgttcaaacagtggcgcaggagatacaggaaatagcccatgattcggaagggctgctggaaataaactcggtgatgaacaatatcgccagtcagaccaatctgctttcaatgaacgcggcgattgaggcggcccacgccggagaagcgggcaagggctttgccgttgtcgccgatgaaatccgcaaactcgccgagtcatcgggacagcagtcaaagaccaccgcgacgatgctgaaaaaaataaaagcgtccatagacaacatcaccaaatcgtctaacgaggtattgtcgcgttttggcgccatagactcaggcgtaaaaacggtttcagatcatgagagaaatattctcaacgcaatggaagaacaggaaacaggcggaaagcaaatactggattccataagccgtctgcgggacataacctcttcggttaaacaaggctctgacaacatggaagaatcgggaaagacactggtaaaagatacgaatgaattcataaaaaccagtaaagaaacggtagagggcatgaacgagatactgaaaggcattaatcagataaatgtttcggtaagtcatgtcaacgaaatgagccatgaaaacaaccagaattttgaatcatntaaacaggaaacagaaaaattcaatgataacgttggcaacaagaaaccaaaaaatcctcatggtggatga

SEQ ID NO: 27676 - protein, 506 aa, Unknown
  Obtained from environmental sample
  DOMAIN (89)...(157): HAMP domain
  misc_feature (1)..(506): Xaa is any amino acid
MGHFIPERIGKNMIDVDVEYGEHRQAAFQAIQDGKPYSLSFYDPNFKENCHFVMEPFTIGNSGVSWMIIIGTMDSFVLKEVRAITKFTIILAVIAILASAVIIYYVLGKSTKPIGKVADTLKIVAKGDLTKSVNITTKDEMGDLARDFNFTMGKIRNLISSIKYKINGLNHTSFELSVNMGKTSTAVQQISSSLDSMKTLMVNQEKGAEEAGKAVGDIKTNIDSLNRMIEEQTDSVNRSSSAIEEMTANINSVTRTLVENSKNVSTLTEASENGKTGVQTVAQEIQEIAHDSEGLLEINSVMNNIASQTNLLSMNAAIEAAHAGEAGKGFAVVADEIRKLAESSGQQSKTTATMLKKIKASIDNITKSSNEVLSRFGAIDSGVKTVSDHERNILNAMEEQETGGKQILDSISRLRDITSSVKQGSDNMEESGKTLVKDTNEFIKTSKETVEGMNEILKGINQINVSVSHVNEMSHENNQNFESXKQETEKFNDNVGNKKPKNPHGG

SEQ ID NO: 27677 - DNA, 768 bp, Unknown
  Obtained from environmental sample
  misc_feature (1)..(768): n is a, c, g, or t
atgtccgtccttcgttaccgtaacggcgaatatgaggaagcggcgcggctatgcgacgcgttaatcgccggcaacaggcaggatatgagcgcatggtatttaaaaggcatgtctttaatacgattgaaccgtaatcaggacgcgataaccgttctttcaaatgcggttctcgttaatgaagaagatgagtttatccgcgccgttttagaagaaacgcttatatcttcctcacctttggaagatccgcgccgcgtaagattcgcggcatggcattttaacaaagcgcggggttttcgccagcgcaatttaaatgaacaggcgctttttgaataccgccgcggattaagactgaacccattcgcgcaagacaggcgcgaatacgccgagattttaagacttttaggctaccctgcccgctaccttgaagaacttcgcttcttgcaggatcagggagtctcggacaaaaacataaatgacgctgtggaagcctacgcttccctgctttccaacgcgctttttaaacaatggcaggtaaaccccgtcgatctggctgaacggcattggaaaatagctgtcttttccctcgcgggacaatcaagtttttaccatgcggatgcgggttctgtagccgcgggagtcatcaaggaattacttgtacacgacaggaacattaaccccatgaatctggaacagcggcaggctatcttttctcaggcgttaaacaggcaagggaaagcggagccgattactttatacttgtctcggtaa

SEQ ID NO: 27678 - protein, 255 aa, Unknown
  Obtained from environmental sample
  misc_feature (1)..(255): Xaa is any amino acid
MSVLRYRNGEYEEAARLCDALIAGNRQDMSAWYLKGMSLIRLNRNQDAITVLSNAVLVNEEDEFIRAVLEETLISSSPLEDPRRVRFAAWHFNKARGFRQRNLNEQALFEYRRGLRLNPFAQDRREYAEILRLLGYPARYLEELRFLQDQGVSDKNINDAVEAYASLLSNALFKQWQVNPVDLAERHWKIAVFSLAGQSSFYHADAGSVAAGVIKELLVHDRNINPMNLEQRQAIFSQALNRQGKAEPITLYLSR

SEQ ID NO: 27679 - DNA, 801 bp, Unknown
  Obtained from environmental sample
  misc_feature (1)..(801): n is a, c, g, or t
ttgcttgaaagcggtgaaattgacgggcacattgcccttgataccgcggaagctgcttttgacgaatatggcggcgtgataagtgaggatttcttcccgctgattttcagatcgtcaggtctgttaacgcggaacgtggatcttctgccggttatctccgtcatggagaaggcgctgaatgaccgcaccctcacttatctggttgaactgcgcaataccggctatcaaaattacctacagaacaaactgtatacgcttttgaccgaagaggaacgttcatacctaaaaaacaacccatttgtgccagtcgccgccgagtacaacaattacccggttagttttttcgataccaacgtaaatcgatgggagggaatttattttgacgcgctcaataaaatctcgggccttacgggccttaaattcgaatatgttaacaagccgggcgcacaatatcctgaactggttgcattgcttgaaaatggcgaagtgttgatcctgcccgaattgtttcatttagatgaatacgaaaaccgttttctatggtcggaagtccctctcttaaccgataattacgtgtttatcaccagatcggatttccgtaacatcgaaataagcgagattccttatttgcgtgtcggcgtacacgaaaacaccccatattgtgaattgtttacgcaaatgtttcccggccacaggaatcatttaatatatgacactcagaaaggaacatgggacgcgctaaaacggggcgaggtcgatgtgatttttacaagcagggcggaggcttgttacttacactaa

SEQ ID NO: 27680 - protein, 266 aa, Unknown
  Obtained from environmental sample
  misc_feature (1)..(266): Xaa is any amino acid
MLESGEIDGHIALDTAEAAFDEYGGVISEDFFPLIFRSSGLLTRNVDLLPVISVMEKALNDRTLTYLVELRNTGYQNYLQNKLYTLLTEEERSYLKNNPFVPVAAEYNNYPVSFFDTNVNRWEGIYFDALNKISGLTGLKFEYVNKPGAQYPELVALLENGEVLILPELFHLDEYENRFLWSEVPLLTDNYVFITRSDFRNIEISEIPYLRVGVHENTPYCELFTQMFPGHRNHLIYDTQKGTWDALKRGEVDVIFTSRAEACYLH

SEQ ID NO: 27681 - DNA, 1020 bp, Unknown
  Obtained from environmental sample
  misc_feature (1)..(1020): n is a, c, g, or t
gtggagatagccatgaataaaaaacagcagactattataaccgcgttatctgtcattgtatttgtgcttgtcctgatggtttcaggccgtctctggttccgccttgacctgacaaaaagcaaagcttatacgatttctaaagcttcacgtaacattttcagggaactccccgatccggttaatatcacttattatctttccaataaacttaaaacgataactcccgcgccgggtgaaattgaagacacattaaaagaatatgccgcctattcaaaaggaaaaatccgcgttacggtgcgcgatccgctgaaaacgggattgtcaaaagccgacgagcttggtcttcagccccggcagatacagactgtagagcaggataacgcaagtcttgttaccatctattcaggcatagttatcgaatatcttgacagaacggacgtactgccgtgggttatctccacggatacgcttgaatatgatcttacttcaagaatacgctcccttattaacgccagcgaacgctggataggagtgcttgtaggagacagtttcaggcaatggagagaagaattcagctatctgtctgcggcgttagacgaagccggttacggagtgcgtttgctttctataggcgatgaaatttccgaagccatcccagcgctttttgttcttggaggagcggaagatttagatgactggatgctttaccgtatcgacagatacattcaacagggcgggaaagttctttttgccgtaaagggagtatacgtagataccgtttcaggttcattagaggcaaggcttcaacgcaaccagacgttatttgaaatgatcgcctcttacggcgtaatcataagacaggagcttgtactggatcgcaacgcgcttacgttgcagtatcagtcaagagcgccgaacggggcaatccaatacaggattgtgcgttatccgctttggattggcgtcttaggcgacaatggaaatgaaaaacacccggtatgctccgcttcagcggcatga

SEQ ID NO: 27682 - protein, 339 aa, Unknown
  Obtained from environmental sample
  misc_feature (1)..(339): Xaa is any amino acid
MEIAMNKKQQTIITALSVIVFVLVLMVSGRLWFRLDLTKSKAYTISKASRNIFRELPDPVNITYYLSNKLKTITPAPGEIEDTLKEYAAYSKGKIRVTVRDPLKTGLSKADELGLQPRQIQTVEQDNASLVTIYSGIVIEYLDRTDVLPWVISTDTLEYDLTSRIRSLINASERWIGVLVGDSFRQWREEFSYLSAALDEAGYGVRLLSIGDEISEAIPALFVLGGAEDLDDWMLYRIDRYIQQGGKVLFAVKGVYVDTVSGSLEARLQRNQTLFEMIASYGVIIRQELVLDRNALTLQYQSRAPNGAIQYRIVRYPLWIGVLGDNGNEKHPVCSASAA

SEQ ID NO: 27683 - DNA, 441 bp, Unknown
  Obtained from environmental sample
  misc_feature (1)..(441): n is a, c, g, or t
ttggttctgggaagattcctttccgtaatttcctgtctcgtattaatgcttcttttgaccctgccgataccctttacggtaatgcccctcggtttgtttgacgcaggagtaattttctgcgaatactccggagcgttccttctcggagcaagcgcgtgcgccctcgggcttatgttctcgtcattatcaaaaaatcaggcgggcagtttcttagccagcgccgtagttttaatgatagtgatgcttgcaaaccagcttacataccttcagaacttgccgcagtggctcgcgggctttatcaattacttctccctctccttccattttgaaagtttctcaaagggactcattgacagcacggatctggctttctttatcgtaagcacggttctttttttattcattaatacgcgtgtaatcatgttcaggaagtggagatag

SEQ ID NO: 27684 - protein, 146 aa, Unknown
  Obtained from environmental sample
  misc_feature (1)..(146): Xaa is any amino acid
MVLGRFLSVISCLVLMLLLTLPIPFTVMPLGLFDAGVIFCEYSGAFLLGASACALGLMFSSLSKNQAGSFLASAVVLMIVMLANQLTYLQNLPQWLAGFINYFSLSFHFESFSKGLIDSTDLAFFIVSTVLFLFINTRVIMFRKWR

SEQ ID NO: 27685 - DNA, 1179 bp, Unknown
  Obtained from environmental sample
  misc_feature (1)..(1179): n is a, c, g, or t
atgagcgatggcgcactgtcgcaggatgaaatagacgcattattggcaggtgtagattcaggttcaggcggcgctacggcagccaccatgtcgatgggacattcaggcggcggctcggaagaggaccgcagggcttttcaggattatctttcggcgaatatcgccgcggaatcctccaacctttcctcgatgacaggggcgtctgtaaccctgaaggaaccacaggtatcttttacaaaccgcgatgccatattgggccagntccccgatatggtaaccgttattaaacagacttcagctccggttttcggggccnacacctctttatattgcctgaggacgcgggcaagaagcatcgcctctttgatgaacaaggaagacaatatacagatggacgaaatggccatgtccgtcatcggagaggtaatttcccagttagtgggtacccagataacagatttgacaaaaaggaccaacaacaaatccatcgcagcggttgcccctgaagctgtaaacgtaagaaaagccgccgcggcgtttcctgccggaaatttcctcagcgccaacttccaactggatctgggagatggcgtcccgcatcaaatgtgggaaatctacggcggctctgtagcctccgatattgccaattcgctgaacggaggcggccagcctgccgcaaaggccggaatgggaatgggcatgccctctatgggagggggtatgcagatgccgatgggcgggatgggcatgccctctatggggggaggtatgcagatgccgatgggtggaatgggtatgggaatgggtatgcagggaatgcaaggcatggcaggaatgggtatgccaaatatgggcattcccacaaatgtccaggccgtccagtttccaaatttgatgcagcacgccaatcctcaggaagcgggtaatatcagcctgataatggacgtcttcatggagatgaccgttgaattaggccgtaccaaaaagctcattaaggaaatcctgagcatgggagagggtacgatcatcgagctggacaagttggcaggcgagcctgttgatattctggtaaaccataaactcatagcaaagggcgaagttgtagtaattgatgaaaatttcggtgtccgcgttaccgaaattgttcctccgcatgaacgaatgaatgatatgagttag

SEQ ID NO: 27686 - protein, 392 aa, Unknown
  Obtained from environmental sample
  DOMAIN (309)...(385): Surface presentation of antigens (SPOA) protein
  misc_feature (1)..(392): Xaa is any amino acid
MSDGALSQDEIDALLAGVDSGSGGATAATMSMGHSGGGSEEDRRAFQDYLSANIAAESSNLSSMTGASVTLKEPQVSFTNRDAILGQXPDMVTVIKQTSAPVFGAXTSLYCLRTRARSIASLMNKEDNIQMDEMAMSVIGEVISQLVGTQITDLTKRTNNKSIAAVAPEAVNVRKAAAAFPAGNFLSANFQLDLGDGVPHQMWEIYGGSVASDIANSLNGGGQPAAKAGMGMGMPSMGGGMQMPMGGMGMPSMGGGMQMPMGGMGMGMGMQGMQGMAGMGMPNMGIPTNVQAVQFPNLMQHANPQEAGNISLIMDVFMEMTVELGRTKKLIKEILSMGEGTIIELDKLAGEPVDILVNHKLIAKGEVVVIDENFGVRVTEIVPPHERMNDMS

SEQ ID NO: 27687 - DNA, 576 bp, Unknown
  Obtained from environmental sample
  misc_feature (1)..(576): n is a, c, g, or t
atggaagggatcattgtccgcattttgggaaatatgcgcgaagcctggacacaggtgatagacctccgtccccgtcttggccagatcgacacgaacccgcagttcgcccagatagtgcctcccacggacatggtggtgcttgtaaccctcgaaaccaaagttggggacgtggaggggatgattaacttctgtattccctaccttaccattgagcccataatcggcaaactttccacccagttctggttttctactgtgcaccgcggtactacaaccgaaaacctgaacgtgctaaaggaaaaacttgcgacagtcgaggttgacgtagttgcggaaataggaaagatcaatattccggtaagggaagttctttcattacgggtaggggatgtggtcaggctttacaatacaagaataggggatccgtattcccttaatattggcaataaaagaaaatttttgtgcaggccgggcgttatcggtaaaaagatagcggtgcaggtattaaagaaaaccgcggagtttgaacatgaagaatttgaagagcttgctaccgaaaaggaggaattattatga

SEQ ID NO: 27688 - protein, 191 aa, Unknown
  Obtained from environmental sample
  DOMAIN (1)...(77): Flagellar motor switch protein FliM
  misc_feature (1)..(191): Xaa is any amino acid
MEGIIVRILGNMREAWTQVIDLRPRLGQIDTNPQFAQIVPPTDMVVLVTLETKVGDVEGMINFCIPYLTIEPIIGKLSTQFWFSTVHRGTTTENLNVLKEKLATVEVDVVAEIGKINIPVREVLSLRVGDVVRLYNTRIGDPYSLNIGNKRKFLCRPGVIGKKIAVQVLKKTAEFEHEEFEELATEKEELL

SEQ ID NO: 27689 - DNA, 546 bp, Unknown
  Obtained from environmental sample
  misc_feature (1)..(546): n is a, c, g, or t
atgcgcaaactcatactgactacggcggcggtcgcggctttgttggtcggtacggcggcggcgcagcagataggaacgttcaccgacggcagggacggacggacgtacaagactgtgaagattgggacgcagatttggatggcgcaaaatctcgattataaaacagatagttcttggtgctatgaaaacagcgccgacagttgtggaaaatacggcaggatgtacgacgggtggacggcgaagaaagcttgccccaccggatggaaattaccgtccaaacatgaatgggaaaatttggtgactacggtgggtggaaaaaagaccgcaggtaagaagttaaaatcaaaaagcggttggaacgaaaataatgggactgacggcaacggtacagatgattacggattttcggccttgcccggcggaggccgggactccgaaggcagtttctaccacataggcaacgacggctattggtggactgctaccgagcgctgggactactacgcctaccgccgatacatgtactacggcctcggccgattctga

SEQ ID NO: 27690 - protein, 181 aa, Unknown
  Obtained from environmental sample
  SIGNAL (1)...(21)
  misc_feature (1)..(181): Xaa is any amino acid
MRKLILTTAAVAALLVGTAAAQQIGTFTDGRDGRTYKTVKIGTQIWMAQNLDYKTDSSWCYENSADSCGKYGRMYDGWTAKKACPTGWKLPSKHEWENLVTTVGGKKTAGKKLKSKSGWNENNGTDGNGTDDYGFSALPGGGRDSEGSFYHIGNDGYWWTATERWDYYAYRRYMYYGLGRF

SEQ ID NO: 27691 - DNA, 318 bp, Unknown
  Obtained from environmental sample
  misc_feature (1)..(318): n is a, c, g, or t
gtggctgttgactatgaagccgtgacagagttggccaagcgttacgccgacgatgtgcgccgcgttatgcccgttgacaaggcggtgctgttcggctcctacgcncagggcactgccgacgaggggagcgacgtggacatctgctttttcttggataactacggcggcaaacaacgaccggatataataggcgaactattgcgactcaccagcggacacaaggcgtttttcgaaccgatagcgttccccacatccgagatttataatgataacccattcgtgaaagaaatactgcggacaggacgagaaatatcataa

SEQ ID NO: 27692 - protein, 105 aa, Unknown
  Obtained from environmental sample
  DOMAIN (8)...(104): Nucleotidyltransferase domain
  misc_feature (1)..(105): Xaa is any amino acid
MAVDYEAVTELAKRYADDVRRVMPVDKAVLFGSYAQGTADEGSDVDICFFLDNYGGKQRPDIIGELLRLTSGHKAFFEPIAFPTSEIYNDNPFVKEILRTGREIS

SEQ ID NO: 27693 - DNA, 408 bp, Unknown
  Obtained from environmental sample
  misc_feature (1)..(408): n is a, c, g, or t
atggcgatgagcgcacaggagaagttcgagtattggctggacatagcgcagagcgacctgcgggtggcgggggtcatgctgaacaatgcgctatggctttacatggcgttcatgtgccagcaggcggtggagaaacttgtcaagggtctgtatctgctctacttggacgatgacgtgccaaggacacacaacatcaggcatctcatcgggagatatgaacaaaagctgcccgtggaagtcccccctgaaacccgcaaactattcgctgatctgtcgtcttactatgtgaacaaccgataccccgacttcaagaaagcactggcatcgcagtttgacgaggccaaggcaacggagctatactcacagacgaaagaggtgttcgcgtggctgttgactatgaagccgtga

SEQ ID NO: 27694 - protein, 135 aa, Unknown
  Obtained from environmental sample
  DOMAIN (9)...(133): HEPN domain
  misc_feature (1)..(135): Xaa is any amino acid
MAMSAQEKFEYWLDIAQSDLRVAGVMLNNALWLYMAFMCQQAVEKLVKGLYLLYLDDDVPRTHNIRHLIGRYEQKLPVEVPPETRKLFADLSSYYVNNRYPDFKKALASQFDEAKATELYSQTKEVFAWLLTMKP

SEQ ID NO: 27695 - DNA, 753 bp, Unknown
  Obtained from environmental sample
  misc_feature (1)..(753): n is a, c, g, or t
atggacaaatacgagaaaatcgtaaatatgtggcggctctggcgggtcgaaacggtaccagatattgatgagcgcttgcacaatttcaagattctttttgcctataactccggtaaaattgaaaacgaggcggtcacttaccacgatacgagggagatttttgagaatgggcgcgccttaaacttcactggcgacccgcgtgtcctgtttgaacagagaaaccaaaagatctgttatgagtttcttaaacacaaaattgccgcacaggagccgcttactgttgcgcttgttctggaaactcatggtattcttacagccggtacctacgatgagcggcggtttgtcgagcgtggcgaacggcccggcgcttttaagaagcacgactatgtgacaggtcgaaatgaagtaggttccctgcctgaaaatgtatccggcgatatagcggctttgcttgatgaggtacaagcgtacactgggagcgaaattctaaaaaccgccgcgtacttccacctgcggtttgagtatatacaccttttcgcggacggcaatggccgcgttggaaggacgctaatgaactattttctgatgggccgtgaccatccgccactcattatccacgacgaggacaaggcggcgtattatgccgcgctggaggcttacgatatagccgaggaaatcacgcccatgtttgatttcctgcgcctgcaagccgagaggacatgggaaaaaacgcttgatcgcaaggctggataa

SEQ ID NO: 27696 - protein, 250 aa, Unknown
  Obtained from environmental sample
  DOMAIN (97)...(223): Fic protein family
  misc_feature (1)..(250): Xaa is any amino acid
MDKYEKIVNMWRLWRVETVPDIDERLHNFKILFAYNSGKIENEAVTYHDTREIFENGRALNFTGDPRVLFEQRNQKICYEFLKHKIAAQEPLTVALVLETHGILTAGTYDERRFVERGERPGAFKKHDYVTGRNEVGSLPENVSGDIAALLDEVQAYTGSEILKTAAYFHLRFEYIHLFADGNGRVGRTLMNYFLMGRDHPPLIIHDEDKAAYYAALEAYDIAEEITPMFDFLRLQAERTWEKTLDRKAG

SEQ ID NO: 27697 - DNA, 867 bp, Unknown
  Obtained from environmental sample
  misc_feature (1)..(867): n is a, c, g, or t
gtgctgtgcattgaagccgagcntgagttatttgccatttcacagaagcatttcagcgatgcactgaaacacagtcccaaattgcgcataacaaatatttgcgaagctgccgaattatgcgccttgataaggaaaaaatggggttcaagggtcttccgcaagatccatgtactgcgccttaacgggggctggcagttgtatccggctttgaatgagcttgcggacactttacagcgcgagattgcccttgactggggcaacgcgatgaccctggcgaaacttggccgccgttatatacgcaacgcgatacgcaacctggcgctaattccccgacacccttcgattgacgggctttccttcggcgcggaacctgtactggtgttgggagccggcccgtcccttgatggggttctggacgcgcttgcggcccgttttggagagggttgccttttaccggaaacaaggcccttcagaataatttgtgttgacaccagccttccggttttgcgtgaacgcggcataaggcccgacctggcaataatccttgagagccagcactggaaccttgatgattttacaggcctttcaggctgggatgttccggcggcttttgacctttcggccctgccaaggtcagcctctgtgctgggaaacaggctttttcttttctttaccccctggacacaactcaacatttttacgcggcttggggcggccggcctgcttcccgcaagcctgcttccgcttggttctgtgggccttagcgcggctgcgatttccttgcggcttacacagggaaccgtaatcacggcgggcattgatttttctttcagccatggattcataccatgccaatcctcgccataa

SEQ ID NO: 27698 - protein, 288 aa, Unknown
  Obtained from environmental sample
  DOMAIN (101)...(275): Protein of unknown function DUF115
  misc_feature (1)..(288): Xaa is any amino acid
MLCIEAEXELFAISQKHFSDALKHSPKLRITNICEAAELCALIRKKWGSRVFRKIHVLRLNGGWQLYPALNELADTLQREIALDWGNAMTLAKLGRRYIRNAIRNLALIPRHPSIDGLSFGAEPVLVLGAGPSLDGVLDALAARFGEGCLLPETRPFRIICVDTSLPVLRERGIRPDLAIILESQHWNLDDFTGLSGWDVPAAFDLSALPRSASVLGNRLFLFFTPWTQLNIFTRLGAAGLLPASLLPLGSVGLSAAAISLRLTQGTVITAGIDFSFSHGFIPCQSSP

SEQ ID NO: 27699 - DNA, 657 bp, Unknown
  Obtained from environmental sample
  misc_feature (1)..(657): n is a, c, g, or t
ttgagcgttgatatccccgaagaagaaacgcgtgacatcgtgatttcactcgcgaagggtgattacagcaatgtgataaaaaccgccgcgggctggtttttcttccgctgcgaggaaccgatgctggaagccgatttaaccgatccggcagttatggaaaaagtccgatcctatctgcgcaattttgagagagggcgcatggagaaccgggcaatagacaaggcaaatggtttcatcgcgcttgtcaatgaacacggttttgataaagcgctgtcgttgcagggccttgaaagcaagagtttcggccctgttccgataaacttcggtaatgaggaactctttaccacacttcagtcccaatcgatgcctgagcttgcgggcgccgcggaaaatgaaaatttctggagatccgccttttccacgcctgtcggaaaaccctctccgtggatagtgcaggggagcaatgtgctggtgcttctcccggtcgaggagatcgaggttgaagcttccagacaggagaccgtcacttccaattatagcgagtactggctgaattatatgataggacagtccatgcagcagttttttcttaacagccccaaaatggaagacaagttcatggatgtctatttccgctattttgtcggcgacaactaa

SEQ ID NO: 27700 - protein, 218 aa, Unknown
  Obtained from environmental sample
  misc_feature (1)..(218): Xaa is any amino acid
MSVDIPEEETRDIVISLAKGDYSNVIKTAAGWFFFRCEEPMLEADLTDPAVMEKVRSYLRNFERGRMENRAIDKANGFIALVNEHGFDKALSLQGLESKSFGPVPINFGNEELFTTLQSQSMPELAGAAENENFWRSAFSTPVGKPSPWIVQGSNVLVLLPVEEIEVEASRQETVTSNYSEYWLNYMIGQSMQQFFLNSPKMEDKFMDVYFRYFVGDN

SEQ ID NO: 27701 - DNA, 309 bp, Unknown
  Obtained from environmental sample
  misc_feature (1)..(309): n is a, c, g, or t
ttggctagtcagtcaaggcggccagacatccaggccgacggcgagatacagtttgatgctgcgatgattcccgccataggtcaaaagaaattcccaggttcaaccgttgcgggcagggccaacgtgctggtgttccccgacctcaacgccggcaacatcggctacaaaatcgccgagcgcttcggcgggtgcagcgccaatgggccagtgctgctggggctgacaaagccaggcaacgacctcagcaggggctgctccgcagacgatgttgtgaacacggtgatacttactgcattgcagacagcgtaa

SEQ ID NO: 27702 - protein, 102 aa, Unknown
  Obtained from environmental sample
  DOMAIN (1)...(98): Phosphate acetyl/butaryl transferase
  misc_feature (1)..(102): Xaa is any amino acid
MASQSRRPDIQADGEIQFDAAMIPAIGQKKFPGSTVAGRANVLVFPDLNAGNIGYKIAERFGGCSANGPVLLGLTKPGNDLSRGCSADDVVNTVILTALQTA

SEQ ID NO: 27703 - DNA, 660 bp, Unknown
  Obtained from environmental sample
  misc_feature (1)..(660): n is a, c, g, or t
atgagcgcggactcggtgtatatacggccctttaccattgccgaaggcggcattggcgtaaatatttcctatgaaccctgggttcttgtaataaacacgccggtgagcgcctacttttcaggcggcaattcagacgcggttgtcaccgagcggatccgggccactcccaaaggcaccggctggataaaggcctgctccaattacgcgatagcggccctcgctaaacacgaagccctggaagccggttacatggagtgcgtgtttcttgacgctgttgaacgtaaatatattgaggaaggttcctcctgcaatatctttttctatttaaaatcaggagaacttgtaacgcctaagttaggcgacaccattctgcccggcataacccgcgccagcatcattgagcttgccggcgaccggggcataaaaacaagcgagaggagcatctcaattgacgaagcgctggctgaaacaaaggaatgttttgtaagcggaaccgccgccggcgcggtaccccttacttccctgacctggcagggcaaaaaagcgatctttaataacggcaaggaaggcgagcttacaacggaaatgagaaacaccctgaaaggcatacagtatggcacgataccagacacaaaaggctggatggttaaaatcaattag

SEQ ID NO: 27704 - protein, 219 aa, Unknown
  Obtained from environmental sample
  DOMAIN (1)...(201): Aminotransferase class IV
  misc_feature (1)..(219): Xaa is any amino acid
MSADSVYIRPFTIAEGGIGVNISYEPWVLVINTPVSAYFSGGNSDAVVTERIRATPKGTGWIKACSNYAIAALAKHEALEAGYMECVFLDAVERKYIEEGSSCNIFFYLKSGELVTPKLGDTILPGITRASIIELAGDRGIKTSERSISIDEALAETKECFVSGTAAGAVPLTSLTWQGKKAIFNNGKEGELTTEMRNTLKGIQYGTIPDTKGWMVKIN

SEQ ID NO: 27705 - DNA, 771 bp, Unknown
  Obtained from environmental sample
  misc_feature (1)..(771): n is a, c, g, or t
atgnaggtgcttgagaccgcgcttcgttacgccgaactaagcggcggcgcttttgatccacccatagggccgctggtaaaactctggggcattggaactgaaacagagcgaatcccggatgacgaagaaattgccgccgctctggaacttgttaactttcgtgatttaaatattaaccgcgataatggaacggtgtttctgcggaagaagggtatggagattgacctgggcgcgattgccaaaggctacgccgccgatgaggccgcccgtattgccaaagaggggaaagcaaaacgaggcatcattgatcttggcggaaacatctttgcgctgggttggcgcgaaaaaaaagaatcgagcccctggcgcatcggcgttcaaaacccctttgtcgcccgcggcgaatctatcggctttctgacagtccatgacacaagcgttgtaacaagcggcgtgtacgagcgttattttgaaggcgatgcgccttccggagaaggggtgaaacgttaccatcacattctttccacgtctgacggttacccggtggaaaacggcctgttatctgtaactattgtaacggagcgttcaatagaagccgacgcgctttccacgtctgttttcgcgatgggctttgagcggggcaaagccctgatagattctatccacaacgcggaagctgtctttgtgtttgcggacaggagcgtgagaattaccgaaggcctctccggcaatttcacgctcaccaataaagaattagaaatgaggaattag

SEQ ID NO: 27706 - protein, 256 aa, Unknown
  Obtained from environmental sample
  DOMAIN (1)...(233): ApbE family
  misc_feature (1)..(256): Xaa is any amino acid
MXVLETALRYAELSGGAFDPPIGPLVKLWGIGTETERIPDDEEIAAALELVNFRDLNINRDNGTVFLRKKGMEIDLGAIAKGYAADEAARIAKEGKAKRGIIDLGGNIFALGWREKKESSPWRIGVQNPFVARGESIGFLTVHDTSVVTSGVYERYFEGDAPSGEGVKRYHHILSTSDGYPVENGLLSVTIVTERSIEADALSTSVFAMGFERGKALIDSIHNAEAVFVFADRSVRITEGLSGNFTLTNKELEMRN

SEQ ID NO: 27707 - DNA, 729 bp, Unknown
  Obtained from environmental sample
  misc_feature (1)..(729): n is a, c, g, or t
gtgaacgaagaaaaaaaagtccttgtaaccggcgcaagcaaaggtataggcagggcgattgcccttgccgtatccggtgcgggttatcagctgacggctcactatcacaaagggaaagaagccgccgaatcattgcaaaaagaaattctccaaaatggcggaagcgtggatctgatccaatttgacgtgagtgacagggaggagtgccgggaaaaacttgagcgatggtcggaaaagaacggcgcgttctggggcattgtcagcaacgcgggaatctccgccgatgattcgtttcccggcatgagcggggaatactgggacagggttctccgcaccgatcttgacagtttttataatgtgcttcatccgctcatgatgccgatatgccgcaaaaaacggggccgtatcattaccatttcttctgtgtcgggaatcacgggaaaccgggggcaggtaaattacagcgccgccaaggcgggcattatcggcgcgacaaaagccctggcggtggaacttgccactcgttccataactgtaaactgtatcgcgccgggcattattgaaacagaaatgatccgtgatgtgccgatggatatagtccttccggcaatccccatgggccgtaccggaaagccggaagaagtggcggctctggcggtgtttctcctttcagaatcggcttcgtatataacgcggcaggtaatttcagttaacgggggaatggcgtga

SEQ ID NO: 27708 - protein, 242 aa, Unknown
  Obtained from environmental sample
  DOMAIN (5)...(173): short chain dehydrogenase
  misc_feature (1)..(242): Xaa is any amino acid
MNEEKKVLVTGASKGIGRAIALAVSGAGYQLTAHYHKGKEAAESLQKEILQNGGSVDLIQFDVSDREECREKLERWSEKNGAFWGIVSNAGISADDSFPGMSGEYWDRVLRTDLDSFYNVLHPLMMPICRKKRGRIITISSVSGITGNRGQVNYSAAKAGIIGATKALAVELATRSITVNCIAPGIIETEMIRDVPMDIVLPAIPMGRTGKPEEVAALAVFLLSESASYITRQVISVNGGMA

SEQ ID NO: 27709 - DNA, 474 bp, Unknown
  Obtained from environmental sample
  misc_feature (1)..(474): n is a, c, g, or t
ttgttgatcgaaagagaagaactggaaaccctcatcccgcacaagggaaagatgctgctccttgacagagttattgaatataataatgatcatagtctgcgggcggaatatgatattaccgggaattgtattttttatgatccggctatagagggcgtgcctgcctgggcggcttttgaatttatggctcaggcgatttccgcgtttacagggataagatgccgggaaaggggtgaaaaacccaaaatcgggtttatattgagcatcccgtcaatgcgtatggaaatcccgttttttaagaacggcagcactgttgcggttcatgttaaagagactgattgtacggatacgatctatacttttgacggagaagcgtttttggaaggcagaaaggttatggaaggaaatttgatggttattgaagtcagcgacgagcggttcaatgagatgaccggaggggcatacttaaggtga

SEQ ID NO: 27710 - protein, 157 aa, Unknown
  Obtained from environmental sample
  DOMAIN (12)...(136): FabA-like domain
  misc_feature (1)..(157): Xaa is any amino acid
MLIEREELETLIPHKGKMLLLDRVIEYNNDHSLRAEYDITGNCIFYDPAIEGVPAWAAFEFMAQAISAFTGIRCRERGEKPKIGFILSIPSMRMEIPFFKNGSTVAVHVKETDCTDTIYTFDGEAFLEGRKVMEGNLMVIEVSDERFNEMTGGAYLR

SEQ ID NO: 27711 - DNA, 381 bp, Unknown
  Obtained from environmental sample
  misc_feature (1)..(381): n is a, c, g, or t
atgagggccgcgcttgccgacgcggggttggacagcgggcaaatcggctatatcacctttcacggaaccggcacagagcttaacgacaaagccgaaggccttgcaatcaaggcggtgtttaatgagatacccncaataagctcaaccaagcccatcaccggacatactttgggagcggccggcgccctggaagcggcaatatgctggatggtattgaccgaacaaaggggtcttcctgtacactgttgggacggcgttgaagatgaagaaattcctgtttctccggccgcagggggcggtgaaaaagcgccctcaatatgtatgagcaatagttttgcctttggcggatgtaatgtcagccttattctgggaggaagataa

SEQ ID NO: 27712 - protein, 126 aa, Unknown
  Obtained from environmental sample
  DOMAIN (1)...(126): Beta-ketoacyl synthase, C-terminal domain
  misc_feature (1)..(126): Xaa is any amino acid
MRAALADAGLDSGQIGYITFHGTGTELNDKAEGLAIKAVFNEIPXISSTKPITGHTLGAAGALEAAICWMVLTEQRGLPVHCWDGVEDEEIPVSPAAGGGEKAPSICMSNSFAFGGCNVSLILGGR

SEQ ID NO: 27713 - DNA, 693 bp, Unknown
  Obtained from environmental sample
  misc_feature (1)..(693): n is a, c, g, or t
gtgtctatcggaaccaataatgagaccagcctccaccgggatcttaaattccggtacgcggggcaggacggcgagaccgaggcggaagttgccggctttgtcgccgacggcataaacgccgaaggcgagtacatagaaatccagaccggcagtttcggcccgctcaggaaaaaagcccttgctttgcggcggctgagggtaatccatcctgtaataattaccaaatatatagaagtttataacaagaggggcaggctcctgtaccgccggaaaagcccgcgcgggggacaaccctgggatcttttcaatgtgctggtttacgcgcccgatctgccccttatccccggattagttattgagcttgcccttgtagacgcggcggagcagcgcgtgcaggacggcaagggttcgtggcgcaggcgcggcgtaagtatccgtgaccggcaaatgctggttctgcatgatcgcataacgcttgaaaaaccctctgactatattcgttttgtcccgtttaaaaaaaatgaagaattcacttcggccctgctggcgaaaaaggccggcatcaacgttgatctggcaagaaaagccctgtatgtgctggtaaggcttggcattgtgaagaaaattggcaagaagggaaacgcgcatgtttacaagaggaaggggatcanggagtgggggagtggggagtag

SEQ ID NO: 27714 - protein, 230 aa, Unknown
  Obtained from environmental sample
  misc_feature (1)..(230): Xaa is any amino acid
MSIGTNNETSLHRDLKFRYAGQDGETEAEVAGFVADGINAEGEYIEIQTGSFGPLRKKALALRRLRVIHPVIITKYIEVYNKRGRLLYRRKSPRGGQPWDLFNVLVYAPDLPLIPGLVIELALVDAAEQRVQDGKGSWRRRGVSIRDRQMLVLHDRITLEKPSDYIRFVPFKKNEEFTSALLAKKAGINVDLARKALYVLVRLGIVKKIGKKGNAHVYKRKGIXEWGSGE

SEQ ID NO: 27715 - DNA, 1650 bp, Unknown
  Obtained from environmental sample
  misc_feature (1)..(1650): n is a, c, g, or t
ttgataaaaaacgaaaacgcggaaggacaaaagtccgacggaatgaaaaccctttaccgcgccggcgagaaacttcatccgcacaatgttgaggagcttttatcaaacggtattaaatccattgaatatattgattttcaggctgaaggttcccttaactcgcccatgcttcttaattgttttgagcgggaagatattaaattcgtaaaagaaggatcaggcggcgagccgaccaaagacgaagcgttaatggcggtctattcagtattgatgcccggcgaatccatcaccgttgatcaggcggataaagatttacagggaatgttctttacaagccgccgttacgatctcggcaaggtgggacgatacaaactgaataaaaagttcaatctgcagccgcctctggacgactacacccttacaaaaacagacattatcgaaaccatgaagttccttataaaagcctatgtcggcgatgaaatatttgacgatatcgaccatcttggaaacaggcgcatacgctcggtcggcgagttaatggcgaaccagatgaaaacagctttcagcagaatggagcgcattgccaaagagaggatgagccagaaagagaccgacacaataaaaccgcaggaattaatttcaataaagcccattgtcgcggctatcaaggaattcttcggttccagccagctttctcagtttatggatcaggtaaacccgcttgcggagcttacgcacaaaagacgccttaacgctcttggtccgggcggcctttcacgcgaccgcgccggctttgaagtgcgcgacgtacattacacccactacggcagaatgtgccccattgaaacgccggaaggtccgaatatcggcctgattgtatcgctggcaaattacacccgtgtcaacgagtacggctttttggaaactccttaccgcaaggtaagtaaaggtattgccaccagggatattgagtacctttccgccatggatgaagatcgttactttattgcccaggcttcggcaaaactgaaagagaacggttcctttgcggatgatcaaatttcatgccgcaaacagggcgattatgctacccgtctgccggaagatattcagtacatggacgtttcacccaagcagattatttcggtttccgcatctcttattcccttcctggagcatgatgacgccaaccgcgccctcatgggttccaacatgcagcgtcaggcggttccgctggtatttcccgaagcgccgcgggttggcacgggaatggaaggaaaatgcgcctacgattccggtgtgctggttaaagcgtaccggggcggaaccgtactgcgggttacctcccgtgaaattaccataaagccggataagcccaacgcacccaagccgcttactcaggcggttatcgatgaacacggcaatgacatatacaagctggtaaagtttcagcggacgaatcaggatacctgctacaatcagcggcccattgttaaggtgggtgacaagattgttaccggacaggttatcgccgacggtcccgctacccaggaaggagagcttgctctgggcaggaatatcctcgtgggttttatgccctggaacggttacaactatgaagattcaatacttatttcccagcgcgggtaa

SEQ ID NO: 27716 - protein, 549 aa, Unknown
  Obtained from environmental sample
  DOMAIN (2)...(174): RNA polymerase Rpb2, domain 2
  misc_feature (1)..(549): Xaa is any amino acid
MIKNENAEGQKSDGMKTLYRAGEKLHPHNVEELLSNGIKSIEYIDFQAEGSLNSPMLLNCFEREDIKFVKEGSGGEPTKDEALMAVYSVLMPGESITVDQADKDLQGMFFTSRRYDLGKVGRYKLNKKFNLQPPLDDYTLTKTDIIETMKFLIKAYVGDEIFDDIDHLGNRRIRSVGELMANQMKTAFSRMERIAKERMSQKETDTIKPQELISIKPIVAAIKEFFGSSQLSQFMDQVNPLAELTHKRRLNALGPGGLSRDRAGFEVRDVHYTHYGRMCPIETPEGPNIGLIVSLANYTRVNEYGFLETPYRKVSKGIATRDIEYLSAMDEDRYFIAQASAKLKENGSFADDQISCRKQGDYATRLPEDIQYMDVSPKQIISVSASLIPFLEHDDANRALMGSNMQRQAVPLVFPEAPRVGTGMEGKCAYDSGVLVKAYRGGTVLRVTSREITIKPDKPNAPKPLTQAVIDEHGNDIYKLVKFQRTNQDTCYNQRPIVKVGDKIVTGQVIADGPATQEGELALGRNILVGFMPWNGYNYEDSILISQRG

SEQ ID NO: 27717 - DNA, 300 bp, Unknown
  Obtained from environmental sample
  misc_feature (1)..(300): n is a, c, g, or t
atgtcgattattgttccctctatgccgtgcggcactttaagggaagtgtcccgcacttccttcgccttttcgccgaaaatcgaattgagcagtttaaattcgggcgttgtctccgtttcgttcttcggcgttaccttgccgaccagtatatcgccgtcgcgcactttcgcgcctacgcggataatgccttcgctgtcaagattatcaaggcttttttcggacgtgttggggatgtcgcgagtaattttttcggggccgagctttgtttcccttatttcaacgctgaattcttttatatga

SEQ ID NO: 27718 - protein, 99 aa, Unknown
  Obtained from environmental sample
  misc_feature (1)..(99): Xaa is any amino acid
MSIIVPSMPCGTLREVSRTSFAFSPKIELSSLNSGVVSVSFFGVTLPTSISPSRTFAPTRIMPSLSRLSRLFSDVLGMSRVIFSGPSFVSLISTLNSFI

SEQ ID NO: 27719 - DNA, 978 bp, Unknown
  Obtained from environmental sample
  misc_feature (1)..(978): n is a, c, g, or t
atgtcagaatggccgagacagcggcggcttaacgcgttaggccccggcgggctttcccgcgagagagcaggctttgaagtccgcgacgtgcattatacccattatggaaggatgtgccccatagagacgcccgaaggtccgaacatcggactgattgtgtcattggccaactatacccgtgttaatgagtacggctttcttgaaacgccgtaccgcaagattaacaaaggcgttgccaccagggatatagagtatctttccgcgatggatgaggacaggtacttcatcgcccaggcatccgccaaactcagagacaacggctcttttgcggaagggcaggtttcctgccgcagacagggcgattataccaaccgttcgcctgaggatattcagttcatggacgtgtcgcccaaacagattatatcggtatccgcatcgttaatccctttcctggaacatgacgacgccaaccgcgcccttatgggatcgaacatgcagcgccaagcggtgccgctggtgtttcccgaagcgcccagagtcggcacggggatggaggcgaaatgcgcctacgattccggcgtgcttgtcaaagcttgcagaagcgggaccgcattgcgcgtaacatccagcgagatcatcataaagccggataagccaagcgcctcaaaatccctgtcgcaggttattatagatgaagaaggtaatgatgtttacaaactagtgaagttccagcgtaccaaccaggacacctgctataaccagcgtccgattatcaaggtaggcgaaaaaatcacagccgggcaggtaatcgctgatggccccgccacccagaacggggagcttgccttgggcaggaatattctcgtgggctttatgccctgggaacggttacaactacgaagactcgatccttatctcggaagnagtcgtaagggacgatatgtttacgtccattcatataaaagaattcagcgttga

SEQ ID NO: 27720 - protein, 325 aa, Unknown
  Obtained from environmental sample
  DOMAIN (1)...(62): RNA polymerase Rpb2, domain 3
  misc_feature (1)..(325): Xaa is any amino acid
MSEWPRQRRLNALGPGGLSRERAGFEVRDVHYTHYGRMCPIETPEGPNIGLIVSLANYTRVNEYGFLETPYRKINKGVATRDIEYLSAMDEDRYFIAQASAKLRDNGSFAEGQVSCRRQGDYTNRSPEDIQFMDVSPKQIISVSASLIPFLEHDDANRALMGSNMQRQAVPLVFPEAPRVGTGMEAKCAYDSGVLVKACRSGTALRVTSSEIIIKPDKPSASKSLSQVIIDEEGNDVYKLVKFQRTNQDTCYNQRPIIKVGEKITAGQVIADGPATQNGELALGRNILVGFMPWERLQLRRLDPYLGXSRKGRYVYVHSYKRIQR

SEQ ID NO: 27721 - DNA, 396 bp, Unknown
  Obtained from environmental sample
  misc_feature (1)..(396): n is a, c, g, or t
atgcaagtgcccgttaacgacataattgtcaaaaaaagaattcgaaaaaacatgggagacatagagattttggctgaaagcctgaaacgccacggccagatcagccccattgtgataagcagaaagaatgttctgatcgccggaggaaggcggcttgaggcggcaaaaagcctgggctggcggacgattaacgctgtaatacttgaaaactccaccgagctttcaaggctggaactggaaattgaagagaatacccaacggcgcgatttcaccatggaagaactggccgacgcgacaaagaaactttacaatatgcaaaacccggggtttttccgccgtataggcaacgccattgtccgttttttcaaatggctgttcaggattcaggatgaataa

SEQ ID NO: 27722 - protein, 131 aa, Unknown
  Obtained from environmental sample
  DOMAIN (1)...(85): ParB-like nuclease domain
  misc_feature (1)..(131): Xaa is any amino acid
MQVPVNDIIVKKRIRKNMGDIEILAESLKRHGQISPIVISRKNVLIAGGRRLEAAKSLGWRTINAVILENSTELSRLELEIEENTQRRDFTMEELADATKKLYNMQNPGFFRRIGNAIVRFFKWLFRIQDE

SEQ ID NO: 27723 - DNA, 741 bp, Unknown
  Obtained from environmental sample
  misc_feature (1)..(741): n is a, c, g, or t
ttgctgggagaacatggcaaagatattaggtacaatgacgcatggaaaaaatgggttgtctggaacggcaagtattgggaaatggacggcgggtatttaatccacgataagggcttacagataattagggggatatataaagagttactgaaaaccgccgattatcgggagcgtatcgacattgaaaaacacgcaatgcagagcgaaagcgcaaggcgaagaaaagcccttgtcgaagtcgcaagctggataccggaattgaatataaaaactgatgatctggacaaagacccgtggctttttaatgtacggaatgggactattgacctgcgtaccggcgaaattaaagagcataatcaaagcgatttaattactcggattgcgaatgttgattatgaccctgacgcttcctgcccgatatggaaaaagtttataatggaaattatgaactacaatgcggagctaattcactttatacaaaacgccgccggttgggctattaccggggatacctcggaacaaacaatgtttattttattcggaactggcgcgaatgggaaaagtacctttctaaataccattatgaacctgttaggcgattatgccattgccacgcctacggaaacttttatgcggaaaattggcgattatatctctaatgatattgccccccctgcggggtactccggtttgttactactacggaaacggagcatggtcggcggctgtctgaaccgctga

SEQ ID NO: 27724 - protein, 246 aa, Unknown
  Obtained from environmental sample
  misc_feature (1)..(246): Xaa is any amino acid
MLGEHGKDIRYNDAWKKWVVWNGKYWEMDGGYLIHDKGLQIIRGIYKELLKTADYRERIDIEKHAMQSESARRRKALVEVASWIPELNIKTDDLDKDPWLFNVRNGTIDLRTGEIKEHNQSDLITRIANVDYDPDASCPIWKKFIMEIMNYNAELIHFIQNAAGWAITGDTSEQTMFILFGTGANGKSTFLNTIMNLLGDYAIATPTETFMRKIGDYISNDIAPPAGYSGLLLLRKRSMVGGCLNR

SEQ ID NO: 27725 - DNA, 519 bp, Unknown
  Obtained from environmental sample
  misc_feature (1)..(519): n is a, c, g, or t
atgactgcccgattcctgtacggagaattttttaattttataccgactttcaagatttttatggctacgaaccacaagccggttattaaggggactgaccacggaatatggcgaaggattaaacttgtgccgtttattacccggattgaggaagataaacaggacaaacatcttgaacaaaagctaatggaagaaagccctggaattttgaactggctaattgaaggttcaaagcggtggtgtacggaagggttaaaaacgccgtctgttattatcagggctaccgatgaataccgtggggaaatggacgttatcgggaacttcattaaagagcggtgtgtccagggtgcggattattcagtcaaggcgagggagctttttaagtgctatcaggactggtgtgatgaccataatgagaatactgtaagcgagcgttttttcggcttgaggctgaaggaaatggggcttgaccaaaagcggctgactgacgggcggtactggcaggggattgggctgtag

SEQ ID NO: 27726 - protein, 172 aa, Unknown
  Obtained from environmental sample
  DOMAIN (1)...(157): Poxvirus D5 protein-like
  misc_feature (1)..(172): Xaa is any amino acid
MTARFLYGEFFNFIPTFKIFMATNHKPVIKGTDHGIWRRIKLVPFITRIEEDKQDKHLEQKLMEESPGILNWLIEGSKRWCTEGLKTPSVIIRATDEYRGEMDVIGNFIKERCVQGADYSVKARELFKCYQDWCDDHNENTVSERFFGLRLKEMGLDQKRLTDGRYWQGIGL

SEQ ID NO: 27727 - DNA, 582 bp, Unknown
  Obtained from environmental sample
  misc_feature (1)..(582): n is a, c, g, or t
atgagcgccgaggtattaagacgcgatttttccatgaaagaaatactgacatgggatattggaacagttattctgccgcttcgcccgctcaaagcgggctattgttacctgaggcttggggacaggcgcgtatggcagtgccaaatactgccggattgcaagcggttctccaaaacaatcaaaattgtcaattatgctgaaaaaccatttggaacggagggaaattatatggaaacgaaaaaagttaatccgctcgtggcggatgccctgtctaacgcggtgatgaagattaccgtggaactgggagccacccataaaacagtaaaggaagtctacgggattggcgaggggacagttctcgagcttgacaaacttgccggggaacctctggacgtaatggccaatgggatcatcatcgccaagggggaagtggtgatcattgacgagaacttcggggtaaggattaccgagattatcggaacccatgacacttccggtcttcccgactggccggatcagccaatgccgtcattcacagtatcagcaacagcaggatcagcaacagatggagaatcaaaatga

SEQ ID NO: 27728 - protein, 193 aa, Unknown
  Obtained from environmental sample
  DOMAIN (86)...(162): Surface presentation of antigens (SPOA) protein
  misc_feature (1)..(193): Xaa is any amino acid
MSAEVLRRDFSMKEILTWDIGTVILPLRPLKAGYCYLRLGDRRVWQCQILPDCKRFSKTIKIVNYAEKPFGTEGNYMETKKVNPLVADALSNAVMKITVELGATHKTVKEVYGIGEGTVLELDKLAGEPLDVMANGIIIAKGEVVIIDENFGVRITEIIGTHDTSGLPDWPDQPMPSFTVSATAGSATDGESK

SEQ ID NO: 27729 - DNA, 576 bp, Unknown
  Obtained from environmental sample
  misc_feature (1)..(576): n is a, c, g, or t
atgacgttaatttttatgggaatatccttcatcgttatatggcttggaacaacattttttattctccgtaatattaaagcgctcaggaatgacttacttaagaaattttctgatactgaaaaaacatcagaagaaaaaagtgaatatattgcanatcanagactggcaaaaccgtttgattttatcaaccgtgtagacccaaactactttttaagttttatccaacaggaacatcctcaagttattgctcttattttggcacatttggaatcagccaaggcttcggttattctgcagaaccttccccatgatttgcagagtgacatatctagacgtatcgctattctggatcgggttagccctgaaataacgcgtaaaattgagctggttcttgagaaaaaactgtccatgttgtccggcggaagttacttcacagctggtggtgttgatagcatcgttgaaatttttaaacatactgaccgcgattcaaaggatcagattattaaagaacttgaagatgaagacccagaacttgccaaaatgatcaaaaactaccctaactctatcacgccatga

SEQ ID NO: 27730 - protein, 191 aa, Unknown
  Obtained from environmental sample
  misc_feature (1)..(191): Xaa is any amino acid
MTLIFMGISFIVIWLGTTFFILRNIKALRNDLLKKFSDTEKTSEEKSEYIAXXRLAKPFDFINRVDPNYFLSFIQQEHPQVIALILAHLESAKASVILQNLPHDLQSDISRRIAILDRVSPEITRKIELVLEKKLSMLSGGSYFTAGGVDSIVEIFKHTDRDSKDQIIKELEDEDPELAKMIKNYPNSITP

SEQ ID NO: 27731 - DNA, 531 bp, Unknown
  Obtained from environmental sample
  misc_feature (1)..(531): n is a, c, g, or t
ttgctgcccagggcggcgtgtatctcatccaggatcacgcaacgcaccgtggaaagcacctgccgccccctggggttaagaaggatgatgccaaggctttcaggcgtcagggccaggatggaaggcggcagggaaagaaaacgtctgcgctcggcctggggcgtgtcccccgaacgggtctctacccttatagccggaaacgcctcgcctgccttttcgaagcgtttctgtatcccttcaagtggcaagagcaaatttcgcttaatgtcttcgtttaaggctttaaggggcgagacgtatagcaccgacagtttgccagccgaatatgtaccttcggcaaagcgcgagattgccgaaagaaagcctgtcagggttttgccgcttcccgtgggcgcaatggcaaggacgttctctcctgccgcgattagtggccaggcttcttcttgtaccgccgtgggccttcgcgtaggtttcggagaaccatgcgttaatcaatggatggaaggggaggggaagcatggtttatgttag

SEQ ID NO: 27732 - protein, 176 aa, Unknown
  Obtained from environmental sample
  misc_feature (1)..(176): Xaa is any amino acid
MLPRAACISSRITQRTVESTCRPLGLRRMMPRLSGVRARMEGGRERKRLRSAWGVSPERVSTLIAGNASPAFSKRFCIPSSGKSKFRLMSSFKALRGETYSTDSLPAEYVPSAKREIAERKPVRVLPLPVGAMARTFSPAAISGQASSCTAVGLRVGFGEPCVNQWMEGEGKHGLC

SEQ ID NO: 27733 - DNA, 303 bp, Unknown
  Obtained from environmental sample
  misc_feature (1)..(303): n is a, c, g, or t
gtgctggttgggataattttaaaaaggaaatggaggatatttgcaatggctgattatactattgatgaaacagtggatattaccgatgtagtttgtccggtgacttttgtgaaagccaaagtcgcgttggaagaacttgaagacgggcaggttttgtccattcgcctaaacgatggtgaaccggtgcagaatgttccccgtagcatcaaggaagaagggcatcaaattctaaaattgatagataacggagacggtacttacaacctgattgtaaaaaaaataactttggaggatcaagcatga

SEQ ID NO: 27734 - protein, 100 aa, Unknown
  Obtained from environmental sample
  DOMAIN (21)...(93): SirA-like protein
  misc_feature (1)..(100): Xaa is any amino acid
MLVGIILKRKWRIFAMADYTIDETVDITDVVCPVTFVKAKVALEELEDGQVLSIRLNDGEPVQNVPRSIKEEGHQILKLIDNGDGTYNLIVKKITLEDQA

SEQ ID NO: 27735 - DNA, 384 bp, Unknown
  Obtained from environmental sample
  misc_feature (1)..(384): n is a, c, g, or t
gtggttaaggaaaactgtaccttatgcggcgtatgtgtcaaagcttgccgtgagggtgcaattaccaaaactagtgaaagccttgtggttgataaatctaaatgcaattactgcggacgttgtgccaaatcttgcccttttaatgcctggaaaggagaatctggatatcttatttcatttggtggaacatttggcaatttgattgccaagggcgagcagtttttgcctattattcgcaacaaggaaattctgtttaaaattactgatgctgcactgaatttttttgctaaatatgcaaaaccaagtgagcgatttcgcgtgtgcatagaccgtgctggttgggataattttaaaaaggaaatggaggatatttgcaatggctga

SEQ ID NO: 27736 - protein, 127 aa, Unknown
  Obtained from environmental sample
  DOMAIN (2)...(22): 4Fe-4S binding domain
  misc_feature (1)..(127): Xaa is any amino acid
MVKENCTLCGVCVKACREGAITKTSESLVVDKSKCNYCGRCAKSCPFNAWKGESGYLISFGGTFGNLIAKGEQFLPIIRNKEILFKITDAALNFFAKYAKPSERFRVCIDRAGWDNFKKEMEDICNG

SEQ ID NO: 27737 - DNA, 825 bp, Unknown
  Obtained from environmental sample
  misc_feature (1)..(825): n is a, c, g, or t
atggtaattgtaaaatctatttatgcagcaaatgtttcagttgaatccgctaccataggtgattcggtaaccattcaatttgaccgtgaagtagatgcgtccagaggctgtgtactgatgcgaaaagcggaactgaagatagccaaggaatttgaagctaccttgctctggatggacgatgataaactgatttccggcaatgattactggataaaaattggaacaaagctgctacccgctattgtcactggcatacagtataaagtggatatcaacacgggagagcatcttctggtaacttctgttggtaagaacgagattatacgctgtgaaattgttttatctgaaccagcagttttagacgaatttcgtttgcacaaaactttgggcgagctgattctcatcgatagagttagccactccaccgccgcctgcggtgtaatagaaacggcgggaaagaccatagaaaacggggttctgctaaaagacggcaaaaaccagctcgctattggactatttgacagtttttattatcatcctgaaattcacactgtgctaaggcacagcccgcctccaacggaatacaagcccggcgatactttgccgctgcaaggcaccggatataattatcctccagattttgatattcctactgaggctgataattacgccaatatccgcaatggaatttttacaggctttggtgaacggaatccaaagtttgcgttgttgaatttaaacggattggaattggacaaaaaaccaccacgggattttggaaaatatcgcaaagtgatgttatgggaaaaggattttgagatttag

SEQ ID NO: 27738 - protein, 274 aa, Unknown
  Obtained from environmental sample
  misc_feature (1)..(274): Xaa is any amino acid
MVIVKSIYAANVSVESATIGDSVTIQFDREVDASRGCVLMRKAELKIAKEFEATLLWMDDDKLISGNDYWIKIGTKLLPAIVTGIQYKVDINTGEHLLVTSVGKNEIIRCEIVLSEPAVLDEFRLHKTLGELILIDRVSHSTAACGVIETAGKTIENGVLLKDGKNQLAIGLFDSFYYHPEIHTVLRHSPPPTEYKPGDTLPLQGTGYNYPPDFDIPTEADNYANIRNGIFTGFGERNPKFALLNLNGLELDKKPPRDFGKYRKVMLWEKDFEI

SEQ ID NO: 27739 - DNA, 507 bp, Unknown
  Obtained from environmental sample
  misc_feature (1)..(507): n is a, c, g, or t
gtggccgctgtttcggttgccgctgtttcggtcgccgctgttcgggtcgccgctgtttcgatagccgctgtttcgatagccgctgtttcggtcgccgctgtttcggtcgccgctgtttcggtcgccgctgttttggtggccgctgttttggtcgccgctgttttggtcgccgctgttttggtcgccgctgttttggtggccgctgttttggtcgccgctgttttggtcgccgctgtttcggtcgccgctgtttcggtcgccgctgtttcggtcgccgctgtttcgatagccgctgtttcggtcgccgctgtttcgatagccgctgtttcggtcgccgctgtttcggtcgccgctgttttggtggccgctgttttggtggccgctgtttcggtcgccgctgttttggtggccgctgttttggtggccgctgttttggtcgccgctgtttttaattcccgtattgtcttttccggtatttaccagagacaatatttcatcgcggcttag

SEQ ID NO: 27740 - protein, 168 aa, Unknown
  Obtained from environmental sample
  SIGNAL (1)...(27)
  misc_feature (1)..(168): Xaa is any amino acid
MAAVSVAAVSVAAVRVAAVSIAAVSIAAVSVAAVSVAAVSVAAVLVAAVLVAAVLVAAVLVAAVLVAAVLVAAVLVAAVSVAAVSVAAVSVAAVSIAAVSVAAVSIAAVSVAAVSVAAVLVAAVLVAAVSVAAVLVAAVLVAAVLVAAVFNSRIVFSGIYQRQYFIAA

SEQ ID NO: 27741 - DNA, 531 bp, Unknown
  Obtained from environmental sample
  misc_feature (1)..(531): n is a, c, g, or t
ttgcgaaaagagacaagcgtccctcttttgttcatgacatacgtcaaccccgtcttccattacggctacgacgctttttttaaacgctgtaaagatgtcggcttagacggcattatcatccccgacctgccgtttgaggaacagccgccagtgaaggaagcggcaaacaaacacgggattgatcttgtttcgctaatcgctccaacctcgcacgagcggataaaagaaatcgctaagaatgcggaaggttttatctaccttgtttcttcgatgggcgtaacaggcgtgcgctccgagataaccacagaccttgcatcgatcaccgcggcaattaaatccgtaacatcaacgcccatcgcaataggcttcggcattcacaccccgcagcaggcggcgcaaatggcgcgcattgcagacggagtaattgtaggaagcgcgctagtaaaattgtccgcgcagtacggaacagaagccgcgccgcacatttacagctacgtaaaggaaatgaaagaagctgttgttaaagcatga

SEQ ID NO: 27742 - protein, 176 aa, Unknown
  Obtained from environmental sample
  DOMAIN (1)...(175): Tryptophan synthase alpha chain
  misc_feature (1)..(176): Xaa is any amino acid
MRKETSVPLLFMTYVNPVFHYGYDAFFKRCKDVGLDGIIIPDLPFEEQPPVKEAANKHGIDLVSLIAPTSHERIKEIAKNAEGFIYLVSSMGVTGVRSEITTDLASITAAIKSVTSTPIAIGFGIHTPQQAAQMARIADGVIVGSALVKLSAQYGTEAAPHIYSYVKEMKEAVVKA

SEQ ID NO: 27743 - DNA, 744 bp, Unknown
  Obtained from environmental sample
  misc_feature (1)..(744): n is a, c, g, or t
gtgaaacatggctttgttattcccgtatacaggcatagtgaaaccgtggggccgctggcggaaaagctggccgctaccggcctgccgattatccttgtggacgacggaaatgacgagcagaccaaggaaattctcgccgaatggcaaaagaaaattccttcggtttttcttgtcagcttaaaaaacaacaccggcaagggcggggctgttaccaaaggctttgaaaaggccgcggagcttgctttgacccacgtcttgcaaatcgacgccgacggccagcacgatacggcaatggtcggcttttttttggaggagtccgccaaaaatcctgacaagatcatctgcggctatcccctctttgataacaacgcgccaaagagcagggttgttgggcgcagagtttcaaatttttgggctgctgtagttacgctttcaaaagagcttaaagacgtgctttgcggtttcagggtttaccctcttgacgccgcgctgagaatagccagaaaatccttgatagacaggcgcatgggctttgacgcggaaattctgttacgcctttactggaataaagtgttcccggcgtttcaccccataaaagtaagttaccttcctgacggagtttccaatttccgtttggtcagggataatatccgtataagctggatgttcagccgcttgttttttggcatgctcctgcgctcgcctttgctgatttcccgaaaaattaaacgcgggaagaaatga

SEQ ID NO: 27744 - protein, 247 aa, Unknown
  Obtained from environmental sample
  DOMAIN (4)...(167): Glycosyl transferase family 2
  misc_feature (1)..(247): Xaa is any amino acid
MKHGFVIPVYRHSETVGPLAEKLAATGLPIILVDDGNDEQTKEILAEWQKKIPSVFLVSLKNNTGKGGAVTKGFEKAAELALTHVLQIDADGQHDTAMVGFFLEESAKNPDKIICGYPLFDNNAPKSRVVGRRVSNFWAAVVTLSKELKDVLCGFRVYPLDAALRIARKSLIDRRMGFDAEILLRLYWNKVFPAFHPIKVSYLPDGVSNFRLVRDNIRISWMFSRLFFGMLLRSPLLISRKIKRGKK

SEQ ID NO: 27745 - DNA, 336 bp, Unknown
  Obtained from environmental sample
  misc_feature (1)..(336): n is a, c, g, or t
gtgaaggtaattgggcaaaaagaaaatacccttgaaattgaattttccataccggaaaccagcccttattttgacggtcattttcctcaattcagcctgctccctgccgttgcccagacggagctggtaatccgttttgcttcagcatacttgggaaccggcattgatgctacggaaatgaagcgagtgaagtttacgaagtttatccgccccaatgttacacttcatatgcggcttgaaaaaagcgaaagctccgtaggatttaagattttctcgccggatgatgaaagcgtgtattcacacggaacaatttactttaaccgggaaagcgaatag

SEQ ID NO: 27746 - protein, 111 aa, Unknown
  Obtained from environmental sample
  misc_feature (1)..(111): Xaa is any amino acid
MKVIGQKENTLEIEFSIPETSPYFDGHFPQFSLLPAVAQTELVIRFASAYLGTGIDATEMKRVKFTKFIRPNVTLHMRLEKSESSVGFKIFSPDDESVYSHGTIYFNRESE

SEQ ID NO: 27747 - DNA, 807 bp, Unknown
  Obtained from environmental sample
  misc_feature (1)..(807): n is a, c, g, or t
gtggggatgattgaaaccgccttcgaggtcgccgccaaagctgacaggcatttccccgtgctgcccatgtcggtctgcgtggccctgagccaggggtatatcggctacgatctgcagaacaccatccgcatggaacttgaccacaggaacatgaaaaatcaggtagccacgattattacccaggttgaggttgatcccggcgacaaggcctttgaaaacccgaccaagcctatcggcagctttttgatcagggaagaggcggaaatccttaagtcaaaaggcgttcctgtgatggaagacgcgggcaggggctggcggcaggtagtggcttcccccaaacctattaatattatcgaggcgcaaaccatcaaagcgctgctggcggcggggcaaatccccattgcggcgggcggcgggggaattcccgtcgccatgcgtgacggccagtaccggggcatgagcgcggtcatcgacaaggatttttccgcggccaaactcgccgagcttatcgacgcggacatgctgatcattctcacggcagttgaaaaagtcgcgattaactttggcaagccggatcaaaaatggctggacagcttgacggtcgcgcaggcggaacagtacatcgcggaaaaccagttcgccaaaggatcgatgcttcccaaggtgcaggcttcaattgcttttgtaaaatcccgcggccccggcgccccacaggacgcaggcgaggcgcacagcgcattgattaccctgcttacaaaggcgcgtgaagggattgccggtaaaaccgggacaagaataacgccttaa

SEQ ID NO: 27748 - protein, 268 aa, Unknown
  Obtained from environmental sample
  DOMAIN (1)...(250): Amino acid kinase family
  misc_feature (1)..(268): Xaa is any amino acid
MGMIETAFEVAAKADRHFPVLPMSVCVALSQGYIGYDLQNTIRMELDHRNMKNQVATIITQVEVDPGDKAFENPTKPIGSFLIREEAEILKSKGVPVMEDAGRGWRQVVASPKPINIIEAQTIKALLAAGQIPIAAGGGGIPVAMRDGQYRGMSAVIDKDFSAAKLAELIDADMLIILTAVEKVAINFGKPDQKWLDSLTVAQAEQYIAENQFAKGSMLPKVQASIAFVKSRGPGAPQDAGEAHSALITLLTKAREGIAGKTGTRITP

SEQ ID NO: 27749 - DNA, 711 bp, Unknown
  Obtained from environmental sample
  misc_feature (1)..(711): n is a, c, g, or t
atgggacaaaaagtaaaccctaccgggcttagaatcggaattaacaaaacatggggctctcactggtatgtggatccaaaagaatatgtcgacgcccttcacgaagatttattgcttcgcaagctcattcttgatatgcccgaaaccaaaggcgcggatattgccgagatggaaattatccgtcatccgcaaaagataacaatcacaattcatacggcgcgtccgggagttatcatcggcgtaaaaggcgcgaatatagaaaaaatagagagtgacttacacaagaaagtaaataagattgtaaagataaaaataaaagaagtgcgcaacgcggataacaacgcgcagatcgtggcgcagaacatcgcccgccagcttttggcgcgttcttcgttcaggcgcacaatgaagcaggcgatttctaacgcgattaaaaagggcaacgcccagggtgtaaaagtgcgcctttcgggaaggctcggcggagcggaaatgtcccgcaccgaagaagcgaaagaaggacggattcccctgcacacattgcgcgcagatattgattacggttttgccgaagcccacaccccctttggctcgataggcgtaaaggtttgggtttataacggcatgaagtacggcaaagaacaaaaagaagacgcaggcgcacttgtccgcaaacggcgggacagggctcccgngcgcggcaggagttag

SEQ ID NO: 27750 - protein, 236 aa, Unknown
  Obtained from environmental sample
  DOMAIN (65)...(119): KH domain
  misc_feature (1)..(236): Xaa is any amino acid
MGQKVNPTGLRIGINKTWGSHWYVDPKEYVDALHEDLLLRKLILDMPETKGADIAEMEIIRHPQKITITIHTARPGVIIGVKGANIEKIESDLHKKVNKIVKIKIKEVRNADNNAQIVAQNIARQLLARSSFRRTMKQAISNAIKKGNAQGVKVRLSGRLGGAEMSRTEEAKEGRIPLHTLRADIDYGFAEAHTPFGSIGVKVWVYNGMKYGKEQKEDAGALVRKRRDRAPXRGRS

SEQ ID NO: 27751 - DNA, 399 bp, Unknown
  Obtained from environmental sample
  misc_feature (1)..(399): n is a, c, g, or t
ttgcaggaaatgcggggaggctctgtaatggacaaaaactatgtgccccggcttaaaaagatctataaagagcagattgcgccggaactttttaaggaatttaattataagacaaatatgcaaatccctaagctgaaaaagattgtggtaagcatgggagtaggagaagcgatacagaacaaaaagcttttggacgccgccgttgacaccttaacgcagatcacagggcagaaagcggttaagacaaaggcgaagaagagcatcgcgaatttcaagatcagaagcggtcaggaaatcggagcgaaggtgacattgcgcggaataataatgtacgaattctttgacagactggtgaatgtcgcccttccgcgcgtaaggactccctcgtgccgattctga

SEQ ID NO: 27752 - protein, 132 aa, Unknown
  Obtained from environmental sample
  DOMAIN (35)...(94): Ribosomal protein L5
  misc_feature (1)..(132): Xaa is any amino acid
MQEMRGGSVMDKNYVPRLKKIYKEQIAPELFKEFNYKTNMQIPKLKKIVVSMGVGEAIQNKKLLDAAVDTLTQITGQKAVKTKAKKSIANFKIRSGQEIGAKVTLRGIIMYEFFDRLVNVALPRVRTPSCRF

SEQ ID NO: 27753 - DNA, 321 bp, Unknown
  Obtained from environmental sample
  misc_feature (1)..(321): n is a, c, g, or t
atgacagcggcacataaatttaaaataaagaaggaagacactgttcaggttattgccggaaaagacaaaggcaagcagggcagggtattgaaaatccttcgggacaaagaccgcgttcttgttgaaggcgtaaacatcgtaaagaaagcgcagaaaaaaagaaaacagcaggaccgcggcggcatattggaaatagaagcggcgcttcattcttccaatttaatgattgtttgtaaaaaatgcggacccaccaagatcggatacaagataaatggtgataaaaagacaagggtttgcaggaaatgcggggaggctctgtaa

SEQ ID NO: 27754 - protein, 106 aa, Unknown
  Obtained from environmental sample
  DOMAIN (9)...(42): KOW motif
  misc_feature (1)..(106): Xaa is any amino acid
MTAAHKFKIKKEDTVQVIAGKDKGKQGRVLKILRDKDRVLVEGVNIVKKAQKKRKQQDRGGILEIEAALHSSNLMIVCKKCGPTKIGYKINGDKKTRVCRKCGEAL

SEQ ID NO: 27755 - DNA, 729 bp, Unknown
  Obtained from environmental sample
  misc_feature (1)..(729): n is a, c, g, or t
atggagaaagcgatagaatacgcgcaaaagagcaaagaagacaaacagcttggacaatcaaacctgtttgagaattcaaatgaatcgggtatgcctgattttaagtttacggaatttccaccggtaagcagggctgaaagattaaatcttgaaaaacagttaataggtttttatttttcaggccatccgttagatgaatacaaggaaatctggcaggatgtcgtaactgtaaatctggggcagattgacacttataaaacgggaggctgcgttcttgttgggataattaaaaatataaaacaaataaataccgcaaaaggcggcaagatggcttttgcgacccttgaagattacaacggcgaaattgaagttacgtttttttcaggcccgtgggaaaggtgtcagaatatcatcaaagacgattctgttgtcatattaaaaggaaaaattgattatcaaaaagataaggacaagtacagtttccttgccgatggcgttataagcaaacaggaagttacgacagttgtaaaagaagtcaaagaattggacgaaaaaaataaattacataaaaacacatggctttacatggcggatttaaaaagctcatatattttacaggcaaaaaaaggtaattatacggttataggttacttaaaatcaattagggattttaaggataaaaaaggaaacgacatggcgtttggcacattgcagctcggccgattctga

SEQ ID NO: 27756 - protein, 242 aa, Unknown
  Obtained from environmental sample
  DOMAIN (90)...(169): OB-fold nucleic acid binding domain
  misc_feature (1)..(242): Xaa is any amino acid
MEKAIEYAQKSKEDKQLGQSNLFENSNESGMPDFKFTEFPPVSRAERLNLEKQLIGFYFSGHPLDEYKEIWQDVVTVNLGQIDTYKTGGCVLVGIIKNIKQINTAKGGKMAFATLEDYNGEIEVTFFSGPWERCQNIIKDDSVVILKGKIDYQKDKDKYSFLADGVISKQEVTTVVKEVKELDEKNKLHKNTWLYMADLKSSYILQAKKGNYTVIGYLKSIRDFKDKKGNDMAFGTLQLGRF

SEQ ID NO: 27757 - DNA, 786 bp, Unknown
  Obtained from environmental sample
  misc_feature (1)..(786): n is a, c, g, or t
atgttaggtgaaggaaaaagccacgccgtcttccagttcgcctccgacggaatgcaggacattttaaggcagacaaaaccgacatccatagaagacttgacggcgttaaacgctatgtacaggcccggccccatgcagtttattccccggtttgtggaatgtaaaaacgggaaagcgcctataacgtacccggatccaagtctggaaggaattcttaaagaaacctacggcgttattgtttatcaggaacaggttatggaagtggcaagaataattgctggttacagcatgggaaaagccgaccttctccgccgcgccatgggaaaaaagaaaaaggaaattcttgacggagaaaaaatcccgtttctggaaggcgcggctaaacagggctactcggaacaaagggcaggcgctattttcgatatgcttgttcctttcgcgggatacgggtttaataaaagccacgccgcagcgtattctgttctggcgtatcaaaccgcctaccttaaagcgaatttccccgctgaatatatggcggctacgctgatagtcgaaataaaaagcaccgatagacttttatacacgattgtagaaaccagaaaaatgggaataagcgtcgatccgccccatattaattattccgataaactttttacggtagtagacggtagaattgtttacggtttccttgggataaaggcgtgggagacgctccggccgatgaaattatgcgcggcagaaaagacggacactataaaagttttatggatttttaaaacagggtag

SEQ ID NO: 27758 - protein, 261 aa, Unknown
  Obtained from environmental sample
  DOMAIN (1)...(130): Bacterial DNA polymerase III alpha subunit
  misc_feature (1)..(261): Xaa is any amino acid
MLGEGKSHAVFQFASDGMQDILRQTKPTSIEDLTALNAMYRPGPMQFIPRFVECKNGKAPITYPDPSLEGILKETYGVIVYQEQVMEVARIIAGYSMGKADLLRRAMGKKKKEILDGEKIPFLEGAAKQGYSEQRAGAIFDMLVPFAGYGFNKSHAAAYSVLAYQTAYLKANFPAEYMAATLIVEIKSTDRLLYTIVETRKMGISVDPPHINYSDKLFTVVDGRIVYGFLGIKAWETLRPMKLCAAEKTDTIKVLWIFKTG

SEQ ID NO: 27759 - DNA, 759 bp, Unknown
  Obtained from environmental sample
  misc_feature (1)..(759): n is a, c, g, or t
gtgggaaacgcgacaatcggtgacgggttttttacggtcatggccgggccctgttccgttgagagcagggaacagattttggaaatcgcgcgcggcgtgaaaaaaagcggcgcgaagattctgcgcggaggggcgttcaagccaagaacctcgccctacgcttttcagggcaaacaggccgaagggctggaaatgctgcgcatggcaaaacgggaaacagggctgccccttgtctcggagataatgaatcaaacgcagattgatttatttgaagatatagacattgtgcaggtcggcgcgaggaatatgcagaatttcgatctgcttaaagaagtgggaaaactgaaaaagccggtgctgctcaaacggggtctcgcgaacacgattgaggaattgctgatgagcgcggaatatatcgtctcctcggggaatgagcaggttatcctgtgcgagcgcggcatccgcacttttgaaacaatgacacgtaacacgctggatttggcggccgtagcgctgctgaaacaaaaatcgcatctgccggttattgtagacccaagccacgcttccggcatacggagtcttgtccccccgctggcaaaagcggctatggccgtgggagcggacggccttattatagaagcgcataacgacccggcgaaggcgttatgcgacggcgcacagtcccttgatttggagcagtttcactccctcatggacgagttgaaaaggcgcgcggtaatagagaataaaattttctaa

SEQ ID NO: 27760 - protein, 252 aa, Unknown
  Obtained from environmental sample
  DOMAIN (1)...(247): DAHP synthetase I family
  misc_feature (1)..(252): Xaa is any amino acid
MGNATIGDGFFTVMAGPCSVESREQILEIARGVKKSGAKILRGGAFKPRTSPYAFQGKQAEGLEMLRMAKRETGLPLVSEIMNQTQIDLFEDIDIVQVGARNMQNFDLLKEVGKLKKPVLLKRGLANTIEELLMSAEYIVSSGNEQVILCERGIRTFETMTRNTLDLAAVALLKQKSHLPVIVDPSHASGIRSLVPPLAKAAMAVGADGLIIEAHNDPAKALCDGAQSLDLEQFHSLMDELKRRAVIENKIF

SEQ ID NO: 27761 - DNA, 324 bp, Unknown
  Obtained from environmental sample
  misc_feature (1)..(324): n is a, c, g, or t
atgccggaagcgtggcttgggtctacaataaccggcagatgcgatttttgtttcagcagcgctacggccgccaaatccagcgtgttacgtgtcattgtttcaaaagtgcggatgccgcgctcgcacaggataacctgctcattccccgaggagacgatatattccgcgctcatcagcaattcctcaatcgtgttcgcgagaccccgtttgagcagcaccggctttttcagttttcccacttctttaagcagatcgaaattctgcatattcctcgcgccgacctgcacaatgtctatatcttcaaataaatcaatctgcgtttga

SEQ ID NO: 27762 - protein, 107 aa, Unknown
  Obtained from environmental sample
  misc_feature (1)..(107): Xaa is any amino acid
MPEAWLGSTITGRCDFCFSSATAAKSSVLRVIVSKVRMPRSHRITCSFPEETIYSALISNSSIVFARPRLSSTGFFSFPTSLSRSKFCIFLAPTCTMSISSNKSICV

SEQ ID NO: 27763 - DNA, 768 bp, Unknown
  Obtained from environmental sample
  misc_feature (1)..(768): n is a, c, g, or t
atgattaaaccgtctttggaagaagctaaacgcgtcgctgaaacaggacagtatcagataatacctatcagtacggaaatgtacgccgatatggtaacgcccattgacgtaattaaaaaaatgaaaaacgtcagcggtcattgctttatgcttgaaagcgccgaggacgcaaagaattggggcagatacacttttttggggtttgatcccacaatggagatcacctgcctgaacggggagatgaaaattagttccaaaaactccaaagaaacaaaatcgtttaaaaccgataaccccaatattcacattcaggaaattcttgacggccataaaagcgcgaaatttgattttctgccgcccttcaccggcgggcttgtcggctacttcgcgtacgattacgcgaaatactgcgagccgtccctgaaactggacgccgttgatgaagagcgttttaacgacgtcgatctgatgctctttgacaaggtaatcgcctttgacaattaccggcaaaaaattatattaatcgccaacataaacgcgcaaaatattgaatgtgaatacgaaaaaggaaaatcgcggcttgaaagtttgaaagaccttatcaaaaacgggcggcatgaaaaaaccccgcaggcaaaagtcaagtctgatttcagggcattgtttacaaaagaagaatactgccaaatggtggagagggcgaagagccacattaaagaaggcgatatttttcaggtcgtgtatccaaccgcttcgaggctgatttga

SEQ ID NO: 27764 - protein, 255 aa, Unknown
  Obtained from environmental sample
  DOMAIN (23)...(174): Anthranilate synthase component I, N terminal region
  misc_feature (1)..(255): Xaa is any amino acid
MIKPSLEEAKRVAETGQYQIIPISTEMYADMVTPIDVIKKMKNVSGHCFMLESAEDAKNWGRYTFLGFDPTMEITCLNGEMKISSKNSKETKSFKTDNPNIHIQEILDGHKSAKFDFLPPFTGGLVGYFAYDYAKYCEPSLKLDAVDEERFNDVDLMLFDKVIAFDNYRQKIILIANINAQNIECEYEKGKSRLESLKDLIKNGRHEKTPQAKVKSDFRALFTKEEYCQMVERAKSHIKEGDIFQVVYPTASRLI

SEQ ID NO: 27765 - DNA, 564 bp, Unknown
  Obtained from environmental sample
  misc_feature (1)..(564): n is a, c, g, or t
atggttctgttaatcgacaattacgacagtttttcgtataacctgtaccagcttatcggctcaatagacccaaacataaaagttgcgcgtaacgacgaaataagcgtcgacgagataaaacgcctcgcgccgaatttcctcgtaatttcccctggccccggcaaaccttccgacgcgggcatctgcgttgaagccgtcaagcggctttgttcaagcatgccgatactgggcatttgcctcggacatcaggcgatatacgaagccttcggcggcacggtatcctacgcgagtaaattgatgcacgggaaatcttcaatggtaacgattgacccggaaaacaccctgttcaaagggcttccccaaaccatacaggctgcgcgttaccattcgcttacgggcataaaatcgaccttgcccgatacgttgaaagtcacagcttggacgcaggacgatgaaataatggccgtttgccataaagagcaccctgtgtacggtctgcaatttcacccagagtctatacttacgcccaagggaaaaacgattatcgagaattttttaaggtaa

SEQ ID NO: 27766 - protein, 187 aa, Unknown
  Obtained from environmental sample
  DOMAIN (18)...(171): Peptidase C26
  misc_feature (1)..(187): Xaa is any amino acid
MVLLIDNYDSFSYNLYQLIGSIDPNIKVARNDEISVDEIKRLAPNFLVISPGPGKPSDAGICVEAVKRLCSSMPILGICLGHQAIYEAFGGTVSYASKLMHGKSSMVTIDPENTLFKGLPQTIQAARYHSLTGIKSTLPDTLKVTAWTQDDEIMAVCHKEHPVYGLQFHPESILTPKGKTIIENFLR

SEQ ID NO: 27767 - DNA, 468 bp, Unknown
  Obtained from environmental sample
  misc_feature (1)..(468): n is a, c, g, or t
atgctggtagacctgggcagaaacgatttgggaaagataagcaagttcgggactgtaattgtagaaaattatttgtcaatccttcgcttctcccacgttatgcacataggatctacagtaagcggggaaatcattgaaaggaaaacagggttagacgcgattaacgccgtacttcccgccggaacgctgtctggcgcccccaagatacgcgcgatgcagatcataaacgagcaggagaagaacaagcggggcatttacggcggggctatcggctatcttgattttacgggtaacatggatacctgtatcgcaatcagaattgtgtacaaaagaaacaacaaggtttttatccgttcaggcgcgggaattgtcgccgacagcaacccggaatcggagtatcaggagtgcgtaaacaaatccgccgccgttatgaacgctcttaaaaattcctcgggagggattgaataa

SEQ ID NO: 27768 - protein, 155 aa, Unknown
  Obtained from environmental sample
  DOMAIN (1)...(147): chorismate binding enzyme
  misc_feature (1)..(155): Xaa is any amino acid
MLVDLGRNDLGKISKFGTVIVENYLSILRFSHVMHIGSTVSGEIIERKTGLDAINAVLPAGTLSGAPKIRAMQIINEQEKNKRGIYGGAIGYLDFTGNMDTCIAIRIVYKRNNKVFIRSGAGIVADSNPESEYQECVNKSAAVMNALKNSSGGIE

SEQ ID NO: 27769 - DNA, 504 bp, Unknown
  Obtained from environmental sample
  misc_feature (1)..(504): n is a, c, g, or t
ttgaagcggagtaagacaggggctaaaatagcccgaagaatactgggtattgatcccgggctggcgtctacaggctggggtattgtagattctacggaaggaaaagttctttacgtcgatcacggaactattaaaacaaaggcgggtcagcccagagctgaacgccttttttttatttttaattttatccgttcaattattgagaaatacaaaccggcgcaagccgctatggaaactctttacttcggaaaaaacgtaacaagcgcaatccccgtcgccgaggcgcgcggcgtaatatccgtcgccatagctgaaaagggcatacctctttttgaattgacacctaacgcaatcaagcagggagtggtgggcagcgcccgcgccgataaagagcaggttcaggaaatggtgcgtattattttaggattaaaagaaaccccaaaaccagaccacgccgctgacgcgctgggagcggctatctgcgcggctaattccgtctcgtaa

SEQ ID NO: 27770 - protein, 167 aa, Unknown
  Obtained from environmental sample
  DOMAIN (14)...(162): Crossover junction endodeoxyribonuclease RuvC
  misc_feature (1)..(167): Xaa is any amino acid
MKRSKTGAKIARRILGIDPGLASTGWGIVDSTEGKVLYVDHGTIKTKAGQPRAERLFFIFNFIRSIIEKYKPAQAAMETLYFGKNVTSAIPVAEARGVISVAIAEKGIPLFELTPNAIKQGVVGSARADKEQVQEMVRIILGLKETPKPDHAADALGAAICAANSVS

SEQ ID NO: 27771 - DNA, 639 bp, Unknown
  Obtained from environmental sample
  misc_feature (1)..(639): n is a, c, g, or t
atggcaaaaaaaaatagcctggtaaggcctgaaaaaataaatgatgatgagcgcgacatgactcttcgcccaaagtacctgtccgaatttattgggcagaatgtaatgaaggaaaatctttcggtatttattacaaccgccaaacagcgcggtgaaagccttgatcatctttttttaatagggccgcccggcttaggaaagaccactcttgcgcaggtagtagcgaacgaacttgaaacgggctttgttcagacatccgcccccgctctggataagcctaaagacctggtgggacttttaacaaaccttaagaaaggcgatgttttttttattgatgaaatccacaggctaaaaccggctattgaggaattgctgtatatcgctatggaagattacggaattgactgggtagtagggcagggaccgatggcgagaaccttaagaatcgccattaacccttttacgctagtgggcgcgactacaaaagcgggaatagtctcaagcccattgataagccgttttggaattacctgccgtttttctttttacgaacaggaagacatggaagccatagtgcgccgttccgcagggcttttggatattaaaattcaaaacgatgccgcttctcggccgatctga

SEQ ID NO: 27772 - protein, 212 aa, Unknown
  Obtained from environmental sample
  DOMAIN (56)...(176): ATPase family associated with various cellular activities (AAA)
  misc_feature (1)..(212): Xaa is any amino acid
MAKKNSLVRPEKINDDERDMTLRPKYLSEFIGQNVMKENLSVFITTAKQRGESLDHLFLIGPPGLGKTTLAQVVANELETGFVQTSAPALDKPKDLVGLLTNLKKGDVFFIDEIHRLKPAIEELLYIAMEDYGIDWVVGQGPMARTLRIAINPFTLVGATTKAGIVSSPLISRFGITCRFSFYEQEDMEAIVRRSAGLLDIKIQNDAASRPI

SEQ ID NO: 27773 - DNA, 315 bp, Unknown
  Obtained from environmental sample
  misc_feature (1)..(315): n is a, c, g, or t
atgggcgccggccagcccaatagggtagactcgctacgaaaattggcggcgacgaaagcggaagagaacatccgagccgattacgaaaagcaaggcaaaccgatcccggaaggcatactgcctgagttcgggaacttggtgatggtctcggaagccttcttccccttcgccgactcggtagacgcggcaaacgccctaggcctgcgctacatagtccagccgggcggatcaaagcgtgacggagaggtaatagaagcgtgtgataaatacggaatagccatggcgttcacgggcatgagacactttagacattga

SEQ ID NO: 27774 - protein, 104 aa, Unknown
  Obtained from environmental sample
  misc_feature (1)..(104): Xaa is any amino acid
MGAGQPNRVDSLRKLAATKAEENIRADYEKQGKPIPEGILPEFGNLVMVSEAFFPFADSVDAANALGLRYIVQPGGSKRDGEVIEACDKYGIAMAFTGMRHFRH

SEQ ID NO: 27775 - DNA, 507 bp, Unknown
  Obtained from environmental sample
  misc_feature (1)..(507): n is a, c, g, or t
atgccatggaaaaccgcaacggaagtggaattaagtgaaaaacaggagcgaatattaaaagaatatgcggcaggcacccatacgccgctgcatttaaagaaacgggcgcaaatagtattgaaagcagccgaaggaagaacgaacaattcaatagagaaagacctgggattggccgccaaggccgtgaagctgtggcgggacaggtacggcgcccggcatgaagaattgaagcgcacggaggcggaaacgccgagaaagatgcgcggcgtaatagaggaaatactttctgactgtcaacggcccggatgcccctgtacatttacagaagggcaggttgccgccatacttgcgatagcttgcgaagaccctgtaaaacgcgggttgccgttttcgcattggactcccgggctgttgcgtaaagaagccttaagactcggcatagtagaaagcatatcggtccggcaagtcggacgttttttaaaaagagaaagatttacagcctcataa

SEQ ID NO: 27776 - protein, 168 aa, Unknown
  Obtained from environmental sample
  misc_feature (1)..(168): Xaa is any amino acid
MPWKTATEVELSEKQERILKEYAAGTHTPLHLKKRAQIVLKAAEGRTNNSIEKDLGLAAKAVKLWRDRYGARHEELKRTEAETPRKMRGVIEEILSDCQRPGCPCTFTEGQVAAILAIACEDPVKRGLPFSHWTPGLLRKEALRLGIVESISVRQVGRFLKRERFTAS

SEQ ID NO: 27777 - DNA, 1101 bp, Unknown
  Obtained from environmental sample
  misc_feature (1)..(1101): n is a, c, g, or t
ttgcaagaggccctgaacgggaccggggctcggaataagcccggcccgcctacagctgaggggcggcacccccgaatgaaaagagcctttaaactaaaaattttcctgagaggaggccggagcatggccgaaaaaaaacgccccccctgcccccggcggacgaaagacaagagccggcccgccgacccggccgccgggctggccgagatcgtaaaaaaactggtggccctgcgccggcccctctccgccctggaacacgtgagccaggtgccgacgccttcctttccggcggccagagacctcattgaactggcccggctcttgctcttccccggctttttttcgccccggccggttacggaactcaattttgaataccacaccggccagatcctctatgttttttttgagcgcctgggccgggaagtggccgccgccatccgccacgactgccggcgctaccatctcccctgcaccgactgcgagcggcagggcgaggccatagccttggacgtgatcggccgcctgccctggctgcgggaaatactggccacggacgttgacgcggccagaagcggcgacccggccgccggtctccattacgaccagatcatcttctgctatcccggcctgttcgccataacggtgcagcgcctggcccacgaactgtatcagcgccaggtgcccttcctgccccgcatcctgacggaatacgcccacggcaaaaccggcatagacatacatcccggcgcggaaataggcccttacttcttcattgaccacggcaccggcatcgtcatcggcgaaaccacccgcatcgggtccagggtgcggctctaccagggcgtgaccttgggcgccctgtccctccccaaggatgaacagggaaagcccatcaagggcgtcccccgtcatcccattctggaggataacgtcaccgtgtatgctggggcgaccatccttggtcgcgttaccgtaggcgagggcgcggtcatcggcggcaacgtctggctgacccacgatgtgccgcccggcgcgcgtatcgtgcagcagcgatcccacagcccggcgcgcaacgaagacctgctgggcagcggataa

SEQ ID NO: 27778 - protein, 366 aa, Unknown
  Obtained from environmental sample
  misc_feature (1)..(366): Xaa is any amino acid
MQEALNGTGARNKPGPPTAEGRHPRMKRAFKLKIFLRGGRSMAEKKRPPCPRRTKDKSRPADPAAGLAEIVKKLVALRRPLSALEHVSQVPTPSFPAARDLIELARLLLFPGFFSPRPVTELNFEYHTGQILYVFFERLGREVAAAIRHDCRRYHLPCTDCERQGEAIALDVIGRLPWLREILATDVDAARSGDPAAGLHYDQIIFCYPGLFAITVQRLAHELYQRQVPFLPRILTEYAHGKTGIDIHPGAEIGPYFFIDHGTGIVIGETTRIGSRVRLYQGVTLGALSLPKDEQGKPIKGVPRHPILEDNVTVYAGATILGRVTVGEGAVIGGNVWLTHDVPPGARIVQQRSHSPARNEDLLGSG

SEQ ID NO: 27779 - DNA, 606 bp, Unknown
  Obtained from environmental sample
  misc_feature (1)..(606): n is a, c, g, or t
ttgttgctcggcgtatatctgccgaaaagtggcgcaatctatcataacaacgtgaacacctctgatttacagtattcggatatgcacaaaaacatatccgccgtgttccaggatttcaaaaaatataaaatgacgcttgaagaaaacgttaggatgggcgacttaagcaaaaatgacaggacaaagcttctttcttcgctcaatatatcgggtattgatttaagcgaaaagtttgaccttgaaacaaaccttgggcgtgaatttggcggaattgatctttcaatcggcgaatggcagcgtgtcgcgattgcgcggggcatataccgtgactcggatctcatcgcgtttgacgaaccaacagcgtcaatcgacccgttgcaggaatatcaattttacaaggcgtttgctgacatcgcgcagggtaaaatcgcttttattgttacgcacagacttagctgcataaaattttgcgacaaaataattgttatgcggcaaggcaaagtgctggatattgtaagtcatgaaaaactgttaagcgattgtccttattataaaactttgtggaactcccaggcggaaatgtatacaaccgattccattagttga

SEQ ID NO: 27780 - protein, 201 aa, Unknown
  Obtained from environmental sample
  DOMAIN (1)...(166): ABC transporter
  misc_feature (1)..(201): Xaa is any amino acid
MLLGVYLPKSGAIYHNNVNTSDLQYSDMHKNISAVFQDFKKYKMTLEENVRMGDLSKNDRTKLLSSLNISGIDLSEKFDLETNLGREFGGIDLSIGEWQRVAIARGIYRDSDLIAFDEPTASIDPLQEYQFYKAFADIAQGKIAFIVTHRLSCIKFCDKIIVMRQGKVLDIVSHEKLLSDCPYYKTLWNSQAEMYTTDSIS

SEQ ID NO: 27781 - DNA, 468 bp, Unknown
  Obtained from environmental sample
  misc_feature (1)..(468): n is a, c, g, or t
ttgaacccggtaaccgcctcaattcatgctgagtcccttctttccttgcaccggataatttttcttaaccactcaagcaaacgcgacgcgcttcttgccatgacggaaaatctcgccgccgctcctcaaataaagaacgggcaggaattggcggttgaaatacttaaacgtgaagaattgatgagtacggctatcggatgcgggatagcgattccccatgtgcgcctttcgtctgttacagaccttgttgtttccgtcggaataagccgcgttgatataataggatttcacccgatggacgacgaacctgtgcgattggtttttatgattgccgccgccggaaaccagcacgcctattatctgcaaacgctttcatggttcagtgcgcgtcttaaaaacaaagaactgcgggactcacttctgaaagcacaaaccactcaggaagtttacaacttgctaacagcgtaa

SEQ ID NO: 27782 - protein, 155 aa, Unknown
  Obtained from environmental sample
  DOMAIN (14)...(155): Phosphoenolpyruvate-dependent sugar phosphotransferase system, EIIA 2
  misc_feature (1)..(155): Xaa is any amino acid
MNPVTASIHAESLLSLHRIIFLNHSSKRDALLAMTENLAAAPQIKNGQELAVEILKREELMSTAIGCGIAIPHVRLSSVTDLVVSVGISRVDIIGFHPMDDEPVRLVFMIAAAGNQHAYYLQTLSWFSARLKNKELRDSLLKAQTTQEVYNLLTA

SEQ ID NO: 27783 - DNA, 978 bp, Unknown
  Obtained from environmental sample
  misc_feature (1)..(978): n is a, c, g, or t
atgaaagccccttcaattacccccgcgttttgcgccgctaacggaataattattacacgttttgaagacnaaacaatttttttcggaatgttaaatataaacgatgcgatcttgaaaacaagggtaaagaaagcgtatgccgaatggcaatgcgtgtttcaggaacttgatacggaagctttcaaccttaaactgtcgcaattgttctcggaagaacaatcaaatgacgcttctccatccgaagcggtacatgacagccgcgaatcaataattgatcaggtagcggacgatgcgccggttgttaatctgcttaacagcatttttttagaggcaatttcaaaaagagcttcggatatacatatcgaatccggcgcgagtgaaagcgtggtaaggcttcgcattgacggcttactcgttaccgtaaaaaaaataagtcaggaacgggcaattgcgatttccgcgcggctaaagattctcgcaaacctgaacgtgcttgaaaaccgaagaccccaggacggccacatagatgtcaaaaccgattcctattcgcttgatgtcagaatctcgacaatacctactgtctggggtgaatcaatcgtgttgcggcttttaaaccgctctgattcgcctttcagccttgattccctgggattttctgccgggtattccggctatctgcaaagtatcctcgccgtaacgtcggggctgattctcgtaaccggcccaaccggttccggcaaaacaactacccttgcggcattgctaaaagaactcgacatcaaaagcacaaagataatttcaatcgaggatccggttgaataccgcattccggggatcattcaaatacaggttaacgaagaaataggattgagctttgacgctttgcttcgccggattttcaggcaagaccccgacgtaattatgattggtgaaattcgcgacatcgagaccgccgagctcgcgatcagggccgcttga

SEQ ID NO: 27784 - protein, 325 aa, Unknown
  Obtained from environmental sample
  DOMAIN (95)...(325): Type II/IV secretion system protein
  misc_feature (1)..(325): Xaa is any amino acid
MKAPSITPAFCAANGIIITRFEDXTIFFGMLNINDAILKTRVKKAYAEWQCVFQELDTEAFNLKLSQLFSEEQSNDASPSEAVHDSRESIIDQVADDAPVVNLLNSIFLEAISKRASDIHIESGASESVVRLRIDGLLVTVKKISQERAIAISARLKILANLNVLENRRPQDGHIDVKTDSYSLDVRISTIPTVWGESIVLRLLNRSDSPFSLDSLGFSAGYSGYLQSILAVTSGLILVTGPTGSGKTTTLAALLKELDIKSTKIISIEDPVEYRIPGIIQIQVNEEIGLSFDALLRRIFRQDPDVIMIGEIRDIETAELAIRAA

SEQ ID NO: 27785 - DNA, 681 bp, Unknown
  Obtained from environmental sample
  misc_feature (1)..(681): n is a, c, g, or t
gtgacgaacatggtaaccgggcaattggggaatctgcttaatttaaattttgacatcataaccgtgtttggttatcaattcgcggcgaagctgaatcttgccatttccgataaccaggcaaatgtttttgccgatacaaccctttttggcctttcggggcaggaaattaaatttcaaaacacgagtacctaccgctaccgcgattccaacatcgatcctgaaacaggcaagccaatttattccggcgttacaagggaaattgtttccggcctggtgcttgaaataaagggctgggtttccggcgacggaatgatcactaccactgttacagcgtcggtgtccaagcgcggagcggacttgccttccgccatcggaaacccgccgccaacgtcggaacgggttttaacaacccaggttcgcgcaagatcgggtgagacggttgtattaagcggcctaaggcagaacgactccagcataatcgaacagcggcttccgcttttttcaaaattgccccttctgggctggctctttaagagcaagaacaattcgaaagaagattcgcaaatgataatataccttgtgcctcatgttgactttgccaacgatgagtacacagtaagcggtttaaagaccgcttcgatttacacccgccttgtggaaccatacctagaggggaaatga

SEQ ID NO: 27786 - protein, 226 aa, Unknown
  Obtained from environmental sample
  DOMAIN (1)...(198): Bacterial type II and III secretion system protein
  misc_feature (1)..(226): Xaa is any amino acid
MTNMVTGQLGNLLNLNFDIITVFGYQFAAKLNLAISDNQANVFADTTLFGLSGQEIKFQNTSTYRYRDSNIDPETGKPIYSGVTREIVSGLVLEIKGWVSGDGMITTTVTASVSKRGADLPSAIGNPPPTSERVLTTQVRARSGETVVLSGLRQNDSSIIEQRLPLFSKLPLLGWLFKSKNNSKEDSQMIIYLVPHVDFANDEYTVSGLKTASIYTRLVEPYLEGK

SEQ ID NO: 27787 - DNA, 795 bp, Unknown
  Obtained from environmental sample
  misc_feature (1)..(795): n is a, c, g, or t
gtgttcctcggcggcatatctgaacgcgctttgcagagcgacaataccacttatctctttgccgggacggtgatttcccgcgacgaggaagacgttacagttctgaacagggccacgatcagcagcgccaacaaccccgaatccctgtggtcgctcaacgcttcgcgcgtctggcttctgccgggctccgatttcgcgatacttaacgcggttcttaaagtcggcgaaatacccgtaatgtatataccgtttttccattatccggcggatgaacttatctttcatcctgttatcggttcgcgcacgagagaggggcactttatacagacaacgacatatattctgggacgtccaaaggcggcttccacctcgcaaagctctcttacgaaaatacttggaaattcaaccgatatggaaaagaagagggaagggctgtttctgcggagtacgggaaggaaagtgacggacccggaaaaagtaagtttaagggcaatggttgatcattatgtcaatctcggtacttacatcggggcggatctcgcgctgccggcatacaagattctgggcgcgacaaacttaagcttaggcatcggcctgacacggactctcgccctgcgcgacggcagttatacgccattttttcccaattatgacggtgaaaccgactggaaccattccaacctgttttcgcatgaagtcccgttcaggtacaggtttaaaggctcaaattcgataagcggaaaatacggcagttttacatggtcgcttccttattattccgatcccgctggttga

SEQ ID NO: 27788 - protein, 264 aa, Unknown
  Obtained from environmental sample
  misc_feature (1)..(264): Xaa is any amino acid
MFLGGISERALQSDNTTYLFAGTVISRDEEDVTVLNRATISSANNPESLWSLNASRVWLLPGSDFAILNAVLKVGEIPVMYIPFFHYPADELIFHPVIGSRTREGHFIQTTTYILGRPKAASTSQSSLTKILGNSTDMEKKREGLFLRSTGRKVTDPEKVSLRAMVDHYVNLGTYIGADLALPAYKILGATNLSLGIGLTRTLALRDGSYTPFFPNYDGETDWNHSNLFSHEVPFRYRFKGSNSISGKYGSFTWSLPYYSDPAG

SEQ ID NO: 27789 - DNA, 360 bp, Unknown
  Obtained from environmental sample
  misc_feature (1)..(360): n is a, c, g, or t
atgaaaattgacgattcgcggatagaagtaaatatcgcagagcttgcggacgcgatggcaaagacagatgacacaggcctgattaaagattttctgtactgccttttgactccagccgaaatagcggacattgccgcgcgctgggcgctggtaaaaaaactgaaacgcaagaccccgcaaagggagatagcgagagacctgggaatttccctctgcaaaataacacgaggctccagggaacttaaaaaacccggttcggcttttcaacggatgttggcgtcgcaggagcctgattttgcatcttcctcaaccgagtccgcggccatcggcgcgggatcgcagttaaggttcccctcttga

SEQ ID NO: 27790 - protein, 119 aa, Unknown
  Obtained from environmental sample
  DOMAIN (10)...(96): Trp repressor protein
  misc_feature (1)..(119): Xaa is any amino acid
MKIDDSRIEVNIAELADAMAKTDDTGLIKDFLYCLLTPAEIADIAARWALVKKLKRKTPQREIARDLGISLCKITRGSRELKKPGSAFQRMLASQEPDFASSSTESAAIGAGSQLRFPS

SEQ ID NO: 27791 - DNA, 309 bp, Unknown
  Obtained from environmental sample
  misc_feature (1)..(309): n is a, c, g, or t
ttgcctgagggcacacagacaaacatattccttgatcttatggattctttccgtttcgacgatgaagaattaaggaaaagctccggatttaagatgaagtatttccgaatacaggcaacccacaatttgggagactggaacgccgtgttgaactggaatatggcgcctttacgtccgcaaggcagccgttattttgaaattaacaacgaagtgtctttccttttacaatggattcccataagcgaaataaagtcggatataaagtataacaagcagaaagtccccgaatgggaagtgaagggcctgtaa

SEQ ID NO: 27792 - protein, 102 aa, Unknown
  Obtained from environmental sample
  misc_feature (1)..(102): Xaa is any amino acid
MPEGTQTNIFLDLMDSFRFDDEELRKSSGFKMKYFRIQATHNLGDWNAVLNWNMAPLRPQGSRYFEINNEVSFLLQWIPISEIKSDIKYNKQKVPEWEVKGL

SEQ ID NO: 27793 - DNA, 711 bp, Unknown
  Obtained from environmental sample
  misc_feature (1)..(711): n is a, c, g, or t
ttggaagaaggtgcagaagtggcatttagttataacggggagcgtttaaagcgcaatttagacaaaattcttcaaaattatccgggatgcaagctctacgattgcgatgtttctgttgaagagaatgttttaaaagttgctgagcagtataaagccgaggtgggtcagtgcgattttctggttcacgccataggctttgccaataaagactatttgaaaggggcttttttgccaaccccaaaagatgtgtttttgcaggctatggatgtttccgcatattctttggtttctttgacccgtgcgtttaagccgtctatggcaaaaggttgctctattttggctttaacatatttaggtagtgaaaaggttgttcaaaactacaatgtcatgggcgttgcaaaagcggctttggagtccatagttcgctacctcgcctacgatcttggcaaagaaggaataagggtaaatgcaatcagtgctggtccagtcaccacccttgcagcccgtggtatcagcgattttaccgacttggtgaaaattcatcgcaaaattgcccctctgcacgaaaccacaactttggagcatatcggcggcgcggcatacttccttttgagcgatctctcttccggggtaacttcggaaattatgtatgtggacggcggctacaatactgttgcagtgggaccgatggcagcctacgacaaagaataa

SEQ ID NO: 27794 - protein, 236 aa, Unknown
  Obtained from environmental sample
  misc_feature (1)..(236): Xaa is any amino acid
MEEGAEVAFSYNGERLKRNLDKILQNYPGCKLYDCDVSVEENVLKVAEQYKAEVGQCDFLVHAIGFANKDYLKGAFLPTPKDVFLQAMDVSAYSLVSLTRAFKPSMAKGCSILALTYLGSEKVVQNYNVMGVAKAALESIVRYLAYDLGKEGIRVNAISAGPVTTLAARGISDFTDLVKIHRKIAPLHETTTLEHIGGAAYFLLSDLSSGVTSEIMYVDGGYNTVAVGPMAAYDKE

SEQ ID NO: 27795 - DNA, 801 bp, Unknown
  Obtained from environmental sample
  misc_feature (1)..(801): n is a, c, g, or t
ttggaatgggggaataccgttgtccctgtgaattttctgtggagcataaatgataaatggaaatccaatgtaggtttttcttatagcgaatttcaccagttttttaagatagaggatttgtttggaatacaaaacagcgttagtacttttgcaattcgccagtcgttagcatattctggaattgacaagcatactccggtctttggctacgatatggaattttccgatatttcttttgtgcaagatgttgagatgactgggcaaagggtagaagacaagccgcaaacatctcaccatattttatatgcgcaggatacgtggcagctggatgattgggagttgcaatacggtttacgtttaaattaccacgagctttcagggcatcttggagcggaacctcgctttgccgcatcttggaattttgcagaaaatcaaaagctggaatttcacaccggttattacctgcaatacctgaacagccttatgttttctgaccaagaagcgttaaatgagttttattatccggcgcgtaaaacggcaatcaatggcacggtaaaaccatctagttcaatactctccgccattggttattcacgtaccaatattttagagatgttcaatttcaacacagaagcctactacaaaacgcagaacaatttaacggtctataaccaacaggggtatgtggacgacgacgaaaaaacagacaaaattgaatcgctgggagatatgattatcaggggcgagggttattcatttggctatgaagtttccttgcaaaaaccnggagggcttttttag

SEQ ID NO: 27796 - protein, 266 aa, Unknown
  Obtained from environmental sample
  misc_feature (1)..(266): Xaa is any amino acid
MEWGNTVVPVNFLWSINDKWKSNVGFSYSEFHQFFKIEDLFGIQNSVSTFAIRQSLAYSGIDKHTPVFGYDMEFSDISFVQDVEMTGQRVEDKPQTSHHILYAQDTWQLDDWELQYGLRLNYHELSGHLGAEPRFAASWNFAENQKLEFHTGYYLQYLNSLMFSDQEALNEFYYPARKTAINGTVKPSSSILSAIGYSRTNILEMFNFNTEAYYKTQNNLTVYNQQGYVDDDEKTDKIESLGDMIIRGEGYSFGYEVSLQKPGGLF

SEQ ID NO: 27797 - DNA, 393 bp, Unknown
  Obtained from environmental sample
  misc_feature (1)..(393): n is a, c, g, or t
atgagtgtatttatacacaaatcgtacaatgtgtcagtgttattataccatatagtatgtccagcaaaatatagaaggttagtaataaatgattcagtagacaaaacgatacaggaaacgtgcgaagaaataagcaaaagatataaaataaaatttcttgaaatagggacagaaggagatcatgtgcattttgtcatccagtcgataccccgatatagtctgtcaaagatagtaacaacgataaagggaatactgtctaggaaaatatttgagatacaccctgaggtaaagaaacaactatggggaggagaattctggagtgacagatattttgtgagcaaggtaagcaaatatgggaatgaagaagtaatatcaaattatgtaaaatcgtag

SEQ ID NO: 27798 - protein, 130 aa, Unknown
  Obtained from environmental sample
  DOMAIN (18)...(124): Transposase IS200 like
  misc_feature (1)..(130): Xaa is any amino acid
MSVFIHKSYNVSVLLYHIVCPAKYRRLVINDSVDKTIQETCEEISKRYKIKFLEIGTEGDHVHFVIQSIPRYSLSKIVTTIKGILSRKIFEIHPEVKKQLWGGEFWSDRYFVSKVSKYGNEEVISNYVKS

SEQ ID NO: 27799 - DNA, 819 bp, Unknown
  Obtained from environmental sample
  misc_feature (1)..(819): n is a, c, g, or t
ttgaaacaagacaggaaaaagcttgcccttaagggaaaaagcggaacaaagccgggcaagcttcttaaaaagcaaattccagtccgcacctattacgccgacgccgacaaaaagcccgggttttttgaaattgacaccgttcaccattgcggaacttcggattcgggcgagttctgcctaacccttaccgccacagacgtttattccggttgggtcgaactgcgcccgaccctcaacaaggcccataaatgggtttttgaagccctgctggacataaagtcttcactccctttcccgcttgcgggcatagacagcgacaacggctcggaattcatcaattcggccctcctcaaatggtgccaggacgggcgcatccagtttaccaggtcgcgggcctaccgcaaaaacgacaactgtttcgtcgaacagaaaaacttcacctgcgtcagaaacttcgtgggctattgccgcttttccgcagaggcggagcgcgacgccctcgccgatgtctaccgctccctctgcccgctgctgaacttcttcatgcccaccatcaagcttataagcaaagaaagagttggtgcaaaaataaaaaaggtgtatgataaaaaaatcttaagcccttaccaaaggcttatggcttctgacgatatttctgctgaagccaaagccgagctggacaggcgttttgccgtgtacgaccctgttatgctccagggagaagtccacaaggcggtcgatgccttggtgtcaatcaatagggttgcaaatcttgaagggggaaaagcccttgccgcttccgcccttcaagccatctga

SEQ ID NO: 27800 - protein, 272 aa, Unknown
  Obtained from environmental sample
  DOMAIN (34)...(189): Integrase core domain
  misc_feature (1)..(272): Xaa is any amino acid
MKQDRKKLALKGKSGTKPGKLLKKQIPVRTYYADADKKPGFFEIDTVHHCGTSDSGEFCLTLTATDVYSGWVELRPTLNKAHKWVFEALLDIKSSLPFPLAGIDSDNGSEFINSALLKWCQDGRIQFTRSRAYRKNDNCFVEQKNFTCVRNFVGYCRFSAEAERDALADVYRSLCPLLNFFMPTIKLISKERVGAKIKKVYDKKILSPYQRLMASDDISAEAKAELDRRFAVYDPVMLQGEVHKAVDALVSINRVANLEGGKALAASALQAI

SEQ ID NO: 27801 - DNA, 642 bp, Unknown
  Obtained from environmental sample
  misc_feature (1)..(642): n is a, c, g, or t
gtgctttccggctatttgggcgacgcgtccgtcgccatggcgattgtagacgcggtaaaaaaggtgcgaagccaatcacctaacgcgctttacgcctgtgatcccgtaatgggcgacgtggggcgcggtttttacgttaaaccggatatccccggcatttttaacaaagagcttatacctcttgcggatataataacgccaaaccagtttgaacttgacgctattacgggaataaatacgcaaaatatggcagatacgcttaaagcgataaacgtcctgcatgaaatgggtccttcaattgtgcttgtaacaagttataaggaaaaagaaggggaactttcaatgatagcctccgataaaaaagaaatatataaaattacaacccccgaattgccgcttgacaagggtgtcgccggtacgggggacatgactgcggcggtttttttatcgcggtatcttgaaactaaagacctaaaaaaaactttggagttgtgtacagcctcagtctttggtattttagaggcaagttttaaagcgtctaacacgaaaagcggtgcgttgatagagcttaagatcattgacacccaacaagaacttgtcaccccttcatattcatttaaggcggaaaaaataaccgcgtga

SEQ ID NO: 27802 - protein, 213 aa, Unknown
  Obtained from environmental sample
  DOMAIN (8)...(181): Phosphomethylpyrimidine kinase
  misc_feature (1)..(213): Xaa is any amino acid
MLSGYLGDASVAMAIVDAVKKVRSQSPNALYACDPVMGDVGRGFYVKPDIPGIFNKELIPLADIITPNQFELDAITGINTQNMADTLKAINVLHEMGPSIVLVTSYKEKEGELSMIASDKKEIYKITTPELPLDKGVAGTGDMTAAVFLSRYLETKDLKKTLELCTASVFGILEASFKASNTKSGALIELKIIDTQQELVTPSYSFKAEKITA

SEQ ID NO: 27803 - DNA, 1191 bp, Unknown
  Obtained from environmental sample
  misc_feature (1)..(1191): n is a, c, g, or t
ttgacagatgaaagtcaaaggcgttntgagggggagttttatacaccgctgcgattcggccaaaaagccattcactattttacgaaagttttaggtaagaattggtacaaaacagggaaatataggatttgggatatggccgcaggaacgggtaaccttgaatatcacttgccagccgaggcgtacaagtatttgtatatgtccacgcttcactcggacgaaaccgaacacttgaaaaaagtttttccaggtgccacttgttttcaatacgattatttgaatgatgacgtggaatttctttctacacaaaaggaaataccactctttaaaccgaattggaaattgccaaaaaaactaagggccgaattagctaaccccaacataacttggatagtttacatcaatccgccgtttgcgacggcacaagacgcaaagcagaaaaaatcaaagataggtgtcagcaaaaccaaaattgacaaattaatggataggtctgaaactgggcacgcaaaaagggaattgcttgtacaattcatgtatcgaattgttcacgaatttccgagaaatacctacttggggatgttttctaagttatatcttaacgcaccagatagcgttgattatcgagatgaatatttaaactataagtacgaaaaaggatttttatttcattcaaagtgtttccatggtgtttctggagattttcctgtcagttttttgatttggaatttatcaaaacaaagaaaagacaaaaccattgatatagatattttaaatgacgatacacaaataattggtgttaaacatttacaacttattgataaaagagatgttttgaataaatggatacagcgccctaaaaattcgtccgagtatattttgccaccattaagcaacggtataaccgttagaaacgataataaagacacaaggcatagggcaagacctgactttttggcctctatttgcagtaaaggtaacgattttcaaaacaataaatatgtttcaattttatcgtctccgagtgtaagtgctggtgcctttacaataatcaaagaaaatttcgaaaaagcgctaacgcttcatgctgtcaggaaaatcccgaaacagacatggctcaatgacagaaaccaatttctaatcccgcataccgaaccgagcaaagagtttacaaccgactgcctagtttga

SEQ ID NO: 27804 - protein, 396 aa, Unknown
  Obtained from environmental sample
  misc_feature (1)..(396): Xaa is any amino acid
MTDESQRRXEGEFYTPLRFGQKAIHYFTKVLGKNWYKTGKYRIWDMAAGTGNLEYHLPAEAYKYLYMSTLHSDETEHLKKVFPGATCFQYDYLNDDVEFLSTQKEIPLFKPNWKLPKKLRAELANPNITWIVYINPPFATAQDAKQKKSKIGVSKTKIDKLMDRSETGHAKRELLVQFMYRIVHEFPRNTYLGMFSKLYLNAPDSVDYRDEYLNYKYEKGFLFHSKCFHGVSGDFPVSFLIWNLSKQRKDKTIDIDILNDDTQIIGVKHLQLIDKRDVLNKWIQRPKNSSEYILPPLSNGITVRNDNKDTRHRARPDFLASICSKGNDFQNNKYVSILSSPSVSAGAFTIIKENFEKALTLHAVRKIPKQTWLNDRNQFLIPHTEPSKEFTTDCLV

SEQ ID NO: 27805 - DNA, 843 bp, Unknown
  Obtained from environmental sample
  misc_feature (1)..(843): n is a, c, g, or t
atggccgttcttgacatgattcacagtcagtctcccgacatttcgcagggtgtttccggtacaggccttaaaaaattcaagggacagcagggagcgggcgatcagggaatgatgtttggctttgcatgtaatgaaacaaaggaattaatgcctatgccgattatgcttgcccacaaattattgttaagtgcgacaaaacaaagaaaaaacaaaacgattaagtggctccgccctgattcaaaaagtcaggtaacaattgaatatgaaggaaataaacccatccgcatagattctgttgtaatttctcatcaacatgctcctgaagttacttataaagaaattgaaactactataattgaaaaaattattatgccggtgcttgaaccgacgggaatgcttgataaaaaaaccaattactacattaacccgacaggccgtttcgttgtaggcggtccgttcggcgacacggggctcaccgggcgcaaaatcatcgtagacacttacggcggtatgggaaggcacggcggcggcgcgttttccggcaaggatccgacaaaggttgaccgttccgccgcatatgccgcgcgttatgtcgcaaaaaacatagtcgccgccaaacttgcagacaagtgcgaaatacagcttgcttacgcaatcggcgtacctttcccggtttctatcatggtggatactttcggcacgagtaaggtcagcgaagaaagtatttcaaaagcggtagcaaaagtttttgatttaagtcctgcgggaattattaaaactttgaacctgcgcccgggcgatttatttaaagacagcggcctacgggcatttcggacggtctga

SEQ ID NO: 27806 - protein, 280 aa, Unknown
  Obtained from environmental sample
  DOMAIN (149)...(280): S-adenosylmethionine synthetase, C-terminal domain
  misc_feature (1)..(280): Xaa is any amino acid
MAVLDMIHSQSPDISQGVSGTGLKKFKGQQGAGDQGMMFGFACNETKELMPMPIMLAHKLLLSATKQRKNKTIKWLRPDSKSQVTIEYEGNKPIRIDSVVISHQHAPEVTYKEIETTIIEKIIMPVLEPTGMLDKKTNYYINPTGRFVVGGPFGDTGLTGRKIIVDTYGGMGRHGGGAFSGKDPTKVDRSAAYAARYVAKNIVAAKLADKCEIQLAYAIGVPFPVSIMVDTFGTSKVSEESISKAVAKVFDLSPAGIIKTLNLRPGDLFKDSGLRAFRTV

SEQ ID NO: 27807 - DNA, 768 bp, Unknown
  Obtained from environmental sample
  misc_feature (1)..(768): n is a, c, g, or t
ttgcggccgctgggcgattggcttatggccaatgatttaaaaaaatacggaaaaataaaagcggatatttttgttacccatactcactgggatcatatactcgggtttcccatgtttacgccggcttatatcggcggcactgaattgcgcataacaggccctgtttcttttgacaataataccctgaaaaacataatagaaacgcagatgtcataccagtactggcctgttactgcgggagaacttgccgcaaatatcatatacaaccagataaaagaaaccactcttgatctcggcggaggtctttctgtgaccagcaagttcctaaaccatacaattttatgccttggttaccgttttgactatcaaggcaaatcaatagtattggtttttgatcatgaacctttccgtaacttgttttctgttaatcccgccgatgaaggttacgatgaagacgcggccaaagaaggtgaaatcgcagctgcggaagaaaatgaaaaaataaagaattttatgaaaggagcggatattgtagttcatgatacccaatatatggaagacgaatacgcgactcatacgggctggggacatgcgacatttaaacatgcgataaacgctgtaaatgaggcggacgtaaaaaagctggtctgctttcatcatgatccttcacgtacagacagccagcttgaacagcttgaaaaaaaatatacagatagtacaacggttaaaataataatggcaaaagagggtatggttctggaagtgtaa

SEQ ID NO: 27808 - protein, 255 aa, Unknown
  Obtained from environmental sample
  misc_feature (1)..(255): Xaa is any amino acid
MRPLGDWLMANDLKKYGKIKADIFVTHTHWDHILGFPMFTPAYIGGTELRITGPVSFDNNTLKNIIETQMSYQYWPVTAGELAANIIYNQIKETTLDLGGGLSVTSKFLNHTILCLGYRFDYQGKSIVLVFDHEPFRNLFSVNPADEGYDEDAAKEGEIAAAEENEKIKNFMKGADIVVHDTQYMEDEYATHTGWGHATFKHAINAVNEADVKKLVCFHHDPSRTDSQLEQLEKKYTDSTTVKIIMAKEGMVLEV

SEQ ID NO: 27809 - DNA, 300 bp, Unknown
  Obtained from environmental sample
  misc_feature (1)..(300): n is a, c, g, or t
gtgtttcgtgggtttccggcggcttcaagccccatctctnctaagatgcgcgccactgaatcccccacagccggagtcggcgctaaagacagatccaaaatgccgaacggaacccctatccttttagccgcctccattcccacaagctgccccatgcgcgtaatcttaaacgccgtctttttaatcgtgtccgccaattcgtcaaaattttttccgcggcagttttccaaagccgcctttattacgcccggcccggaaactcccacattaagaacgctctcggcctcccccggcccgtga

SEQ ID NO: 27810 - protein, 99 aa, Unknown
  Obtained from environmental sample
  misc_feature (1)..(99): Xaa is any amino acid
MFRGFPAASSPISXKMRATESPTAGVGAKDRSKMPNGTPILLAASIPTSCPMRVILNAVFLIVSANSSKFFPRQFSKAAFITPGPETPTLRTLSASPGP

SEQ ID NO: 27811 - DNA, 417 bp, Unknown
  Obtained from environmental sample
  misc_feature (1)..(417): n is a, c, g, or t
gtggtgaaggggagcattggcagggggctgctngtttacntgggcgttgcgcataatgacactgaaactgacgcggattggctttttgagaaaattgcatatcttaggatttttgacgacgatgaagggaagatgaatttatcacttaaagacatagccgctaatgataataaggcggggcttttggctgtttcgcagtttacgttgttggcggacgcgcggaaggggagacggccctcgtggaatggagcggcggcgcctgagaaggcgaaacagctttatgagtattttgtcggcgcggtaaggaagacggggcttgtctgcgagtgcggggagtttcaagctcacatgatggttaagtatattaatgacgggcctgttactattgttttggataccgaagaattatcaaagtaa

SEQ ID NO: 27812 - protein, 138 aa, Unknown
  Obtained from environmental sample
  DOMAIN (11)...(133): D-Tyr-tRNA(Tyr) deacylase
  misc_feature (1)..(138): Xaa is any amino acid
MVKGSIGRGLLVYXGVAHNDTETDADWLFEKIAYLRIFDDDEGKMNLSLKDIAANDNKAGLLAVSQFTLLADARKGRRPSWNGAAAPEKAKQLYEYFVGAVRKTGLVCECGEFQAHMMVKYINDGPVTIVLDTEELSK

SEQ ID NO: 27813 - DNA, 792 bp, Unknown
  Obtained from environmental sample
  misc_feature (1)..(792): n is a, c, g, or t
ttggataataccagccttaacttaaaaataggggaaacccgcgccattaccgcctctgtcacaccggcaaacgcgacatacaagaccgtcatgtggtcttccggcaattcaggcgtagcaagcgttaataacggaaatgtaactgcagtaagccccggtacagtgacaattaccgcttctactgtagagggcagaacggcaacatgtacggtaactgtaaaagagccgacagtattgctggatttagccgcaaaacttcatgctttgtcagtgcagactattaataccaatgcgcaattctataccgcgtttggcggtttcccggtaagacccggagacgaaatcgaaattgaagattcaactaataaacgcgtttcttaccagataattaatgattccggcatcaataaacttcaggttaacgcatatataaactatggttcaggattagttgttacaaacgaagaatttacgttcaaggcaggcgatataattgaatttaaaggaaaaatgataagtggccccagcaattcaatatatgtcactatggattgttgggactatgttcctcttcaaggatggaatgaaaacttcacaaatggacagattattcagaggacattcactttatccgcaagtgacgcggctacgataaacacaaatgcggtaaatcgttacggatctgctcttaatttcaaaacaggaggaatagagccctgggatggtactatttatcctgagggtattggctcatttgtcatagagcagattanaatttacaggattgaataa

SEQ ID NO: 27814 - protein, 263 aa, Unknown
  Obtained from environmental sample
  DOMAIN (2)...(71): Bacterial Ig-like domain (group 2)
  misc_feature (1)..(263): Xaa is any amino acid
MDNTSLNLKIGETRAITASVTPANATYKTVMWSSGNSGVASVNNGNVTAVSPGTVTITASTVEGRTATCTVTVKEPTVLLDLAAKLHALSVQTINTNAQFYTAFGGFPVRPGDEIEIEDSTNKRVSYQIINDSGINKLQVNAYINYGSGLVVTNEEFTFKAGDIIEFKGKMISGPSNSIYVTMDCWDYVPLQGWNENFTNGQIIQRTFTLSASDAATINTNAVNRYGSALNFKTGGIEPWDGTIYPEGIGSFVIEQIXIYRIE

SEQ ID NO: 27815 - DNA, 642 bp, Unknown
  Obtained from environmental sample
  misc_feature (1)..(642): n is a, c, g, or t
atggacggcgatattgcgcctgtccccgaatttgtcaagcttaaaaaggaattcggattgtttcttatggtcgatgaagcgcattcaagttgcgttataggaaagaacggcgggggcgttgacgagtactttaaccttaagcatgatgatattgacataaagatggggacgctttcaaaagggcttggaacatgtggcggttatcttgcggggaaatatgaattaattgaataccttcgctatatgctgccgggttttattttctcagtcggcctaagccccgcgcttaccgccgccacgattgaatcaatacggattataaggaaggataattcgcttgtcaggcagttgcaggaaaacatcagccattttgtttccaaagccaaagaaaaaggctttaacctctgtaaagcaggagaaagcgcgattgcccctgttcttgtcggcaaggattctgacgcttttgagctttcgcaagccatgtttgaagagggcattttcgttcctcccgcagtttaccccgcagtccctgtaaacatggcgcgtctgcgtttctgtttgacaagctgccacaacaaaaatcagatagactacgcccttgatacttgcagggggttgttaggaatagggagtagggagtag

SEQ ID NO: 27816 - protein, 213 aa, Unknown
  Obtained from environmental sample
  misc_feature (1)..(213): Xaa is any amino acid
MDGDIAPVPEFVKLKKEFGLFLMVDEAHSSCVIGKNGGGVDEYFNLKHDDIDIKMGTLSKGLGTCGGYLAGKYELIEYLRYMLPGFIFSVGLSPALTAATIESIRIIRKDNSLVRQLQENISHFVSKAKEKGFNLCKAGESAIAPVLVGKDSDAFELSQAMFEEGIFVPPAVYPAVPVNMARLRFCLTSCHNKNQIDYALDTCRGLLGIGSRE

SEQ ID NO: 27817 - DNA, 858 bp, Unknown
  Obtained from environmental sample
  misc_feature (1)..(858): n is a, c, g, or t
gtggccgggggcggcgtcgtccgcgcggttccggtcaggggggtatcgggccgcccgcgcgccttctacgacaggatggtcgagttcgcccagtctatcggctcgcagggtttggcctatttaatatggaacgaggagggcgtgaagggccccatcgccaagttcttggacgcggccggcatggctgcgctcacggaggcgctttgcgcgaagccgggcgacgcggcgttcttcgtctgcaacggcgaggccgccgcgaacaagatcgccggggagatcagggtcaaactcggcaaagagctcgacatcgtagaaaaagacgccttccgcttttgctggataaccgacttccccatgttcgagtacaacgaggagctcaaaaagatagacttctcccacaacccattctctatgccccagggcggcctcgaggcgcttaacgaaaaggacccgctcgaaatcctcgcctaccagtacgacatagtctgcaacggcatagagctgtcgagcggcgcgatccgcaaccaccgccccgacatcatgtacaaggccttcgagaccgccggatacgcaaaggaggaggtggacgccagattcggcgcgatgataaacgccctcagctacggagccccgccccacggcggaatcgccccgggagtcgacagaataataatgcttctggccgacgagccgaacatcagggaggtgatagccttcccgatgaaccaaaaagcgcaagacctgatgatgcangcgccggcggaggcccccggaaaagcaactcanagaactgcatatccgcgtcgtggacgtttgaggttcgatttaataatgttaatacatattaatacgtattga

SEQ ID NO: 27818 - protein, 285 aa, Unknown
  Obtained from environmental sample
  DOMAIN (1)...(90): GAD domain
  misc_feature (1)..(285): Xaa is any amino acid
MAGGGVVRAVPVRGVSGRPRAFYDRMVEFAQSIGSQGLAYLIWNEEGVKGPIAKFLDAAGMAALTEALCAKPGDAAFFVCNGEAAANKIAGEIRVKLGKELDIVEKDAFRFCWITDFPMFEYNEELKKIDFSHNPFSMPQGGLEALNEKDPLEILAYQYDIVCNGIELSSGAIRNHRPDIMYKAFETAGYAKEEVDARFGAMINALSYGAPPHGGIAPGVDRIIMLLADEPNIREVIAFPMNQKAQDLMMXAPAEAPGKATXRTAYPRRGRLRFDLIMLIHINTY

SEQ ID NO: 27819 - DNA, 960 bp, Unknown
  Obtained from environmental sample
  misc_feature (1)..(960): n is a, c, g, or t
atgaaagattatgaccaggcggcggcattcttcgagcagttggcggatagatcccccaaggggtcttgncgtgagagcgcgtatatccgcgccgccgagaattacaagaagaataacaagtacgaccgcgccgcgcagatttatttgacggcggcgaaccagatacccaagtccgagttcgccataccgagcttgtcgtcggcttcggagtgttaccagaagatgggccagtacgatatggccggtaagatgttcgagctgatctacgagcggtacgccaacgaccccaagacgccgcaggcgttgtacaacgcgggtctcatatttgaaaagggcaagcactaccacaacgccataaacgtgtacgagcagttggccagccgctacccgagcagcgagttcgccgccgaggcgtttttctcgataggcttgtgctatgagaagctggaagagttcggcaagatggccaactccttctccgactacgcggctaagtacaccgccgaccgctacaagcaggtgcaggcgcttgtcaaggcgggcaacgcgtacttcagcatgcagaactattcggagtcccagagcaactacgacaaggccgtaaaaatttacgagcagcatagcaagacgagcgacatagacgtggccaacgttgccgaggcgtacttcagggtcggcgagatatactacaaaaaatttgaggatatcaagctggtcgccaaaaacgagaaggagatgagcggcgtcgtgaagcagaagaccaaggcgctggaggaccccgcgaagtacttcgccaaggccattgagcttggcgtggaggagtggacgatgagggccacgtacatgatcggtaaaggcttctacgacatggcggaggcggtggccaatcagacgctcttcggcaacgagattgagcggctggccggtaagatcaaggtgcttccactcggccgaatctga

SEQ ID NO: 27820 - protein, 319 aa, Unknown
  Obtained from environmental sample
  DOMAIN (174)...(207): Tetratricopeptide repeat
  misc_feature (1)..(319): Xaa is any amino acid
MKDYDQAAAFFEQLADRSPKGSXRESAYIRAAENYKKNNKYDRAAQIYLTAANQIPKSEFAIPSLSSASECYQKMGQYDMAGKMFELIYERYANDPKTPQALYNAGLIFEKGKHYHNAINVYEQLASRYPSSEFAAEAFFSIGLCYEKLEEFGKMANSFSDYAAKYTADRYKQVQALVKAGNAYFSMQNYSESQSNYDKAVKIYEQHSKTSDIDVANVAEAYFRVGEIYYKKFEDIKLVAKNEKEMSGVVKQKTKALEDPAKYFAKAIELGVEEWTMRATYMIGKGFYDMAEAVANQTLFGNEIERLAGKIKVLPLGRI

SEQ ID NO: 27821 - DNA, 687 bp, Unknown
  Obtained from environmental sample
  misc_feature (1)..(687): n is a, c, g, or t
atgcaggaagtgcggaagcgaggagaacgtaaggaacggcaaaaggggcggcgcccagtgtttcaggtgcaagggctgcggcttccagttcacaaaggagacggcgaacggcgcgagccgcaacgagcgagcaaaggcgatcctcctctacgcgctggggctttccatgggcgcggtggcgagggcgcacggcgtgtacccgtccacgatgatgcgctgggcaagggacttcgcgatcagggtgtaccagaagcccagcccggggggcagcgtggcggtcgagctggacgagatgtggcatttcatacgctcaaaaaaacgaagtgctggatttggaaggcatattgccgcgatacccgccagctcgtcgactgggagtgcggtgacagaagcagcgcgaccctcgcgaaaatgctcgggaggctgaggcggctcgatgtggcagtgtttttcgccgacggcttggaatcgtgcgccgaactgatggagccggagatgctggtctggaccaaggcggagacccacgggatagagcgcaacaacttccgccagcggcactggtttggcaggttcaggcgcaagacctgcatagcgtcgcgttctattcagatggttgatcttgtgatggcgcttttcgcgaggtttcacgtcaacgggcagagggaggaaatattcgctttatcttaa

SEQ ID NO: 27822 - protein, 228 aa, Unknown
  Obtained from environmental sample
  DOMAIN (99)...(219): IS1 transposase
  misc_feature (1)..(228): Xaa is any amino acid
MQEVRKRGERKERQKGRRPVFQVQGLRLPVHKGDGERREPQRASKGDPPLRAGAFHGRGGEGARRVPVHDDALGKGLRDQGVPEAQPGGQRGGRAGRDVAFHTLKKTKCWIWKAYCRDTRQLVDWECGDRSSATLAKMLGRLRRLDVAVFFADGLESCAELMEPEMLVWTKAETHGIERNNFRQRHWFGRFRRKTCIASRSIQMVDLVMALFARFHVNGQREEIFALS

SEQ ID NO: 27823 - DNA, 432 bp, Unknown
  Obtained from environmental sample
  misc_feature (1)..(432): n is a, c, g, or t
atgagatgcaggaagtgcggaagcgaggagaacgtaaggaacggcaaaaggggcggcgcccagtgtttcaggtgcaagggctgcggcttccagttcacaaaggagacggcgaacggcgcgagccgcaacgagcgagcaaaggcgatcctcctctacgcgctggggctttccatgggcgcggtggcgagggcgcacggcgtgtacccgtccacgatgatgcgctgggcaagggacttcgcgatcagggtgtaccagaagcccagcccggggggcagcgtggcggtcgagctggacgagatgtggcatttcatacgctcaaaaaaacgaagtgctggatttggaaggcatattgccgcgatacccgccagctcgtcgactgggagtgcggtgacagaagcagcgcgaccctcgcgaaaatgctcgggaggctga

SEQ ID NO: 27824 - protein, 143 aa, Unknown
  Obtained from environmental sample
  misc_feature (1)..(143): Xaa is any amino acid
MRCRKCGSEENVRNGKRGGAQCFRCKGCGFQFTKETANGASRNERAKAILLYALGLSMGAVARAHGVYPSTMMRWARDFAIRVYQKPSPGGSVAVELDEMWHFIRSKKRSAGFGRHIAAIPASSSTGSAVTEAARPSRKCSGG

SEQ ID NO: 27825 - DNA, 801 bp, Unknown
  Obtained from environmental sample
  misc_feature (1)..(801): n is a, c, g, or t
ttgcggctcgcgccgttcgccgtctcctttgtgaactggaagccgcagcccttgcacctgaaacactgggcgccgccccttttgccgttccttacgttctcctcgcttccgcacttcctgcatctcatcgtgtcaactcctaaaagtcaaaagcataacttgaaatcattatttatgcaatactctcgcatatttataccaatttgcaatcaaaaggctctatgcgtagaatatgtatttggaggttcgcatggtcgcccagatacagattcccaaaaaaaggctcgccgagctcgacagatacaggcgctccaagttcgaggacatggagctcaagtgcttcctgtgcctatggctgcgctcgagccaggagatgcagaccgcggacatagcgagggccgtcggcttccacgaggccaccgccaggatcgtccagagggacttcatagacaggggcatagacgccctcctcccgcaccagaggggcgggaggaaaggcgccagctcatgccgccgggcgaggaggccgcgttcctgaagggcttcctcgatgcggccggcgacgcctcgctgctcaccgtcggggcggtcaaggccgccctggagaaaaggctcgggcggcaggtccaccactccaccgtctaccgcatgctggagcgcaacggctggaggaagaaggtggtcccgcggcccaggcacccgaagcagagcaaggaggcagcggaggctttcaaaaagggggcttcgcagacgcggtggccaaggcgcgggggggagccaaaaagaggaaaatgcggctga

SEQ ID NO: 27826 - protein, 266 aa, Unknown
  Obtained from environmental sample
  misc_feature (1)..(266): Xaa is any amino acid
MRLAPFAVSFVNWKPQPLHLKHWAPPLLPFLTFSSLPHFLHLIVSTPKSQKHNLKSLFMQYSRIFIPICNQKALCVEYVFGGSHGRPDTDSQKKARRARQIQALQVRGHGAQVLPVPMAALEPGDADRGHSEGRRLPRGHRQDRPEGLHRQGHRRPPPAPEGREERRQLMPPGEEAAFLKGFLDAAGDASLLTVGAVKAALEKRLGRQVHHSTVYRMLERNGWRKKVVPRPRHPKQSKEAAEAFKKGASQTRWPRRGGEPKRGKCG

SEQ ID NO: 27827 - DNA, 582 bp, Unknown
  Obtained from environmental sample
  misc_feature (1)..(582): n is a, c, g, or t
gtgcctttccgtgccaatcacgtaaaggccgccggcggctttaacttccgcgtaatcgtttttccacttctcgtattcttccctgaagatggcagcgtactttttcgcggccgcgtctgctgtcgcagacgaagcgctgtcgccctgtgcggcctctgtgcctgccctcctgcgggcgcggtgttcggggttgccgccaagtttgatgtccgtgccgcgccccgccatgttagtcgcaattgttaccgatcccttcgcgcccgcctcggcgataataaccgcttccctggcgtggtttttcgcgttaagcacttcatggcggattccacgctgggtaagctttttggccattatttcggatttttcaatggaaactgtccctaccagaatcggctggccttttttatgagcctcttctatttcatcgcaaagggcgttgaacttttctttttcgctaaggtagataacgtcgtcttcatcgcttcgggtaaccggcaggtttgtgggaataaccaccacatccagattgtaaatcttgccaaattcggaggcctcagtatccgccgttcctgtaccgcctga

SEQ ID NO: 27828 - protein, 193 aa, Unknown
  Obtained from environmental sample
  misc_feature (1)..(193): Xaa is any amino acid
MPFRANHVKAAGGFNFRVIVFPLLVFFPEDGSVLFRGRVCCRRRSAVALCGLCACPPAGAVFGVAAKFDVRAAPRHVSRNCYRSLRARLGDNNRFPGVVFRVKHFMADSTLGKLFGHYFGFFNGNCPYQNRLAFFMSLFYFIAKGVELFFFAKVDNVVFIASGNRQVCGNNHHIQIVNLAKFGGLSIRRSCTA

SEQ ID NO: 27829 - DNA, 1575 bp, Unknown
  Obtained from environmental sample
  misc_feature (1)..(1575): n is a, c, g, or t
gtggtggttattcccacaaacctgccggttacccgaagcgatgaagacgacgttatctaccttagcgaaaaagaaaagttcaacgccctttgcgatgaaatagaagaggctcataaaaaaggccagccgattctggtagggacagtttccattgaaaaatccgaaataatggccaaaaagcttacccagcgtggaatccgccatgaagtgcttaacgcgaaaaaccacgccagggaagcggttattatcgccgaggcgggcgcgaagggatcggtaacaattgcgactaacatggcggggcgcggcacggacatcaaacttggcggcaaccccgaacaccgcgcccgcaggagggcaggcacagaggccgcacagggcgacagcgcttcgtctgcgacagcagacgcggccgcgaaaaagtacgctgccatcttcagggaagaatacgagaagtggaaaaacgattacgcggaagttaaagccgccggcggcctttacgtgattggcacggaaaggcacgagagccgccgtatagacaaccagctccgcgggcgttcaggccgccagggtgatcccggcaagtcaaaattctttatctctcttgacgatgatttaatgaggctttttggcggcgaaagcataaagagctttatgacaaaggtaggaatgagcgacggggaaccaatcaaccatccctggctgaataaaagcattgaaaaggcgcaggcaaaagtagaagaaaggaactttgaaatccgcaaacatcttttggattacgacgatgtactgaaccagcagcgcaaatttatctatgaacagcgtgacgcgattctgcttgacaacaatctgaaaaaccgggtgaatgacgctacagccggcctngtcggtgaaatgatggatgaattcaaccagcttcaaaagcaggacatggcaggggctataaaaaatctgaaagaacagctccggtccaaattcggcttacagttaacgctggatcaaaacgaagcaaaaaaccccgacctgcttgaaaagaaaatcattgccgatcttgaaaaggacattaacgacaaggaagcccttataggccctgactatcttaacatgattatcagggacagctatcttcacgccattgacaacaaatggcttgatcatctggaaaacatggaagcgctgcgcgaagccgtttatctgcgccattatgcccagaaaaatcccctgacggaatacaaggtggagggcttccagatttttgacagaatggttgacgatatacgccaggagatagcgtcacgcctgcaccttgtgaggattcaggtcgcgccccagggtgacggcgcgccgtatcgcggcgcgagccgtcccggcaggacaataacctcgcagtcggcgagccacagcagtatggcctctttcggcggcgccgatcccggagccaaaagctcaggctctcctatgggcggggcaagccgtcccgacggcgctaccgttatacgcagccatcccaaggtaggccgcaacgatccctgcccctgcggcagcggccggaaatacaaacattgccacggcaagtaa

SEQ ID NO: 27830 - protein, 524 aa, Unknown
  Obtained from environmental sample
  DOMAIN (506)...(524): SEC-C motif
  misc_feature (1)..(524): Xaa is any amino acid
MVVIPTNLPVTRSDEDDVIYLSEKEKFNALCDEIEEAHKKGQPILVGTVSIEKSEIMAKKLTQRGIRHEVLNAKNHAREAVIIAEAGAKGSVTIATNMAGRGTDIKLGGNPEHRARRRAGTEAAQGDSASSATADAAAKKYAAIFREEYEKWKNDYAEVKAAGGLYVIGTERHESRRIDNQLRGRSGRQGDPGKSKFFISLDDDLMRLFGGESIKSFMTKVGMSDGEPINHPWLNKSIEKAQAKVEERNFEIRKHLLDYDDVLNQQRKFIYEQRDAILLDNNLKNRVNDATAGLVGEMMDEFNQLQKQDMAGAIKNLKEQLRSKFGLQLTLDQNEAKNPDLLEKKIIADLEKDINDKEALIGPDYLNMIIRDSYLHAIDNKWLDHLENMEALREAVYLRHYAQKNPLTEYKVEGFQIFDRMVDDIRQEIASRLHLVRIQVAPQGDGAPYRGASRPGRTITSQSASHSSMASFGGADPGAKSSGSPMGGASRPDGATVIRSHPKVGRNDPCPCGSGRKYKHCHGK

SEQ ID NO: 27831 - DNA, 1260 bp, Unknown
  Obtained from environmental sample
  misc_feature (1)..(1260): n is a, c, g, or t
atgatgggaatatacgccagtgtggctgataccctgataggcagcgcgataatctttaggattaatgcctggaaaaaagcaaaccccttcgctgtcaaaaactctcttgaagagagagattttcttgccaacaaggtaatggccgaagttagcaaggacgcaggactatttggagttttgaccggaatggctcctcccattatggcagcggtggaatgggcttatgactggtttctaaatacgttaaaagcccagatggcttatggtatttcgtattgttatactgggaaagaactgaactcggatgaattaaaaaccgatttatatgttttatttggcgatgatgatgtaggtgtatcaatgaaaaacatcgccgattcggcgatgaaagcggctaatatagatctggaaggtattgcctgggaccttgcgggaaaagaggaactgtaccagaagctcggcacttggcttttgggcgtcggcaagaacaaatgtcaaaatctggcgcgtgatgtagaaatggtaaaaaatacgtcgaaaggcattgcaaaaggcgtacctattgtttcctcggttatttcggtcgttaccaatatgtataaagcttcaaagttcggggtacaagcacagagatattacaggcctaaagtggttgccgggtccacgcccaaggctgggaaagatgcaatgggcatgacagttaacttcgacgcccagggcggccatcccaggcccgaaagcaggctggcaaccgctggctacgcttatggcacgctgccggttgttaaccaacagggctacaagttcgacggctggtttaccgaggctaaaggcgggaaagaagtaaaatcaacctcacaagtacccgagttcgtacctaatcaaacgctttacgcgcactggactggcataaaagtaaggattagcttcgatacccacggcggcacaccccagccccaggccagggatgttatctttggctccggctatggcgacttgccaaataatgttaccaaatctaaaaacaacttcagcggctggtattttctgcctgatggcggcggagcgcaaataagtaaaaatacacccgtgagaaaagatgattttcacacgcttcatgcgtactggacgccacaaggcggcatgacggttaccttcgataccaacgggggtagtgtgcccagccctgtgnacnaggttatacaaccaggctcccaatacggcacgctgccgactggtaccagaagcggtcacaagtaa

SEQ ID NO: 27832 - protein, 419 aa, Unknown
  Obtained from environmental sample
  misc_feature (1)..(419): Xaa is any amino acid
MMGIYASVADTLIGSAIIFRINAWKKANPFAVKNSLEERDFLANKVMAEVSKDAGLFGVLTGMAPPIMAAVEWAYDWFLNTLKAQMAYGISYCYTGKELNSDELKTDLYVLFGDDDVGVSMKNIADSAMKAANIDLEGIAWDLAGKEELYQKLGTWLLGVGKNKCQNLARDVEMVKNTSKGIAKGVPIVSSVISVVTNMYKASKFGVQAQRYYRPKVVAGSTPKAGKDAMGMTVNFDAQGGHPRPESRLATAGYAYGTLPVVNQQGYKFDGWFTEAKGGKEVKSTSQVPEFVPNQTLYAHWTGIKVRISFDTHGGTPQPQARDVIFGSGYGDLPNNVTKSKNNFSGWYFLPDGGGAQISKNTPVRKDDFHTLHAYWTPQGGMTVTFDTNGGSVPSPVXXVIQPGSQYGTLPTGTRSGHK

SEQ ID NO: 27833 - DNA, 300 bp, Unknown
  Obtained from environmental sample
  misc_feature (1)..(300): n is a, c, g, or t
atggaaagaacagttgacaccggagaaaaacgcaggcgcgctttattggttggtatcagggatgaaaaaatgcgggtctccgaggcggattctcttgttaaagagctcgcgcatcttgcagatactttggggctggaaatcgcgtcaacggaaacagttcatttgagggagaaccatgccaagtacggcatgggaagcggaaaagccgaagaattggcgcaaaaagccaaagaattggaggttgattgcattgttttcgacagggaagtaagcccgtcccagcagcgaactggaagataa

SEQ ID NO: 27834 - protein, 99 aa, Unknown
  Obtained from environmental sample
  misc_feature (1)..(99): Xaa is any amino acid
MERTVDTGEKRRRALLVGIRDEKMRVSEADSLVKELAHLADTLGLEIASTETVHLRENHAKYGMGSGKAEELAQKAKELEVDCIVFDREVSPSQQRTGR

SEQ ID NO: 27835 - DNA, 516 bp, Unknown
  Obtained from environmental sample
  misc_feature (1)..(516): n is a, c, g, or t
gtgatttatgacaagtttgatgaaagcatgattgtcaaggcttctgaccttcctgaacattttgaccgatacgctgccggacaggatttcggtttgaatattactttcgttaggattgcctggcttggcgatgtgatatatgtcctgtgcgattacggcgcatttaacatgactaccttgtcgtttaacgaggaattaaaagcgcggggctggtttgattgtccagacggtatgggcttgcctgtgtactgcgaccctgcggggggtgaacggatacaggaagttacaggcgggactaaagcaaataattctgttgacagcggtattgattttatcaatgcaaaaattgaacgccgtcaattctttgtgtgtgagaagtgtactggcgttctttcagaaatttgggattactgccgtgatgaggcgggacagattgtcaaagtaaacgaccactatttagacgctttgcgttatgcgatatttacggacgttcagcagggggttgtattattgtga

SEQ ID NO: 27836 - protein, 171 aa, Unknown
  Obtained from environmental sample
  misc_feature (1)..(171): Xaa is any amino acid
MIYDKFDESMIVKASDLPEHFDRYAAGQDFGLNITFVRIAWLGDVIYVLCDYGAFNMTTLSFNEELKARGWFDCPDGMGLPVYCDPAGGERIQEVTGGTKANNSVDSGIDFINAKIERRQFFVCEKCTGVLSEIWDYCRDEAGQIVKVNDHYLDALRYAIFTDVQQGVVLL

SEQ ID NO: 27837 - DNA, 642 bp, Unknown
  Obtained from environmental sample
  misc_feature (1)..(642): n is a, c, g, or t
atgattagcgtntgcgctgttattgcgactaacgctgaattccttgcgggtatgctgcgggaaaaattaagggaggctgatatgcgtgtttttacggccgctactgacgctgactttgcggagaaggtaaagacggcgtttccccggattatttttatcgagcattgttttcatgggtatgggactgacgaatttatccagcagacggcgcggcattaccgaagtgtgaggattgtggtatgggctgctacggaagtgaaaccctatgcggcggctcgctttatagctgcgggggctgaaagttttttctccctgcgtgatacggagaaaaatattgacgctattatatgccgtattgcaagggggcagcggtattgtcctgccgatgtcgaagaactgcttgatagtgaatatgtttaccctgttatcggggaaaaagttacaaagagagagattgaggttctgaaactcatggtagaggggaaaaagaacaaggaaatatgcgaggtactgtctatgtctgtgaatacggtaaagtttcatcgtaaaaatatttaccgaaaatgcggcggtaattcgccgcttgaagttttgagaaacgggcttaaagcggggagcatacatccagatgagctaatgtaa

SEQ ID NO: 27838 - protein, 213 aa, Unknown
  Obtained from environmental sample
  DOMAIN (144)...(201): Bacterial regulatory proteins, luxR family
  misc_feature (1)..(213): Xaa is any amino acid
MISVCAVIATNAEFLAGMLREKLREADMRVFTAATDADFAEKVKTAFPRIIFIEHCFHGYGTDEFIQQTARHYRSVRIVVWAATEVKPYAAARFIAAGAESFFSLRDTEKNIDAIICRIARGQRYCPADVEELLDSEYVYPVIGEKVTKREIEVLKLMVEGKKNKEICEVLSMSVNTVKFHRKNIYRKCGGNSPLEVLRNGLKAGSIHPDELM

SEQ ID NO: 27839 - DNA, 543 bp, Unknown
  Obtained from environmental sample
  misc_feature (1)..(543): n is a, c, g, or t
atggcggtttttcccgtgccgggttcgccaaccaaaacagggttgttcttggttttgcgtgcgagaatccgcaccactctgcggatttcctcttcgcgccctataatagggtcaagtttgccttctgccgcgagggaaaccaattccttgccgaacttgttcaaagccgagtcctcttttgcaaccgccgccgcgctcatagggtcggatagccaagtgcgaaccgcctccgcgttgccgagtgcgttttcaaatatggaaaccaattgtttatcgccggaatgtttgattaaagctaccagcaaatgccctggctccgcactattgccctgctcggagcgtgcgagtttcacggctgctctcaatatatttgccaaatcgctgcttgcgtggttatccgcatttgtgctttccactatgcgtggcaatttatccaaaattttttgcacagaagaacgcatctcttggcttttcgctttcttcgctttgaacaggtttttgagacgtgcatctggaatgtccaaaagtgccgcagccaaatga

SEQ ID NO: 27840 - protein, 180 aa, Unknown
  Obtained from environmental sample
  misc_feature (1)..(180): Xaa is any amino acid
MAVFPVPGSPTKTGLFLVLRARIRTTLRISSSRPIIGSSLPSAARETNSLPNLFKAESSFATAAALIGSDSQVRTASALPSAFSNMETNCLSPECLIKATSKCPGSALLPCSERASFTAALNIFAKSLLAWLSAFVLSTMRGNLSKIFCTEERISWLFAFFALNRFLRRASGMSKSAAAK

SEQ ID NO: 27841 - DNA, 867 bp, Unknown
  Obtained from environmental sample
  misc_feature (1)..(867): n is a, c, g, or t
atggatacgcatgatccaaagggacggcacgcaaagagcaaggctcgtattactcagtacgaaaaactttttcaggacgatgaaagagaacgctcacgaggcgctgtaacaaataataaaattacaattccggcgggtccgcatttgggcaaacttgtaattgaggcggaaggattatcaaaatctttcgggaacaaattgttattcgacaacatgagtttcacggttccgccgggagcatgtgtcggcattatcggaccgaatggagcgggaaaaactactcttttcaaattgataacaggcattgaaaaaccggatatgggagaattgcgattgggagagacagtaaaaatcggctacgccgatcagatgagagcttctcttgacagcgaaaaaagcgtttgggaacagctttcagacgggctggatttaattaaactcggcagcggacagagcgcaagagaagtaaactcccgagcctactgcgcatggtacaatttttcgggagcggatcagacaaaaaaagttggagtcctttccggcggagagcgcaacaggcttaaccttgcgatgatgctcaaagaaggggcgaatgtgcttttgcttgacgagccgacaaatgacctggacgtaaacacattacgcgcgttggaagacgctctggacactttcgccggagtgagtcttgtaatcagccacgaccgctggttcctggatcgcattgttacgcacatattggcttttgaagacggcgaagttgtatggtacgacggcaactggtcagagtacgcggattggcgcaaagaaaaacttggttccgctgcggacagtccgcatcgctatgtgtaccgtaaattggaaagatag

SEQ ID NO: 27842 - protein, 288 aa, Unknown
  Obtained from environmental sample
  DOMAIN (79)...(251): ABC transporter
  misc_feature (1)..(288): Xaa is any amino acid
MDTHDPKGRHAKSKARITQYEKLFQDDERERSRGAVTNNKITIPAGPHLGKLVIEAEGLSKSFGNKLLFDNMSFTVPPGACVGIIGPNGAGKTTLFKLITGIEKPDMGELRLGETVKIGYADQMRASLDSEKSVWEQLSDGLDLIKLGSGQSAREVNSRAYCAWYNFSGADQTKKVGVLSGGERNRLNLAMMLKEGANVLLLDEPTNDLDVNTLRALEDALDTFAGVSLVISHDRWFLDRIVTHILAFEDGEVVWYDGNWSEYADWRKEKLGSAADSPHRYVYRKLER

SEQ ID NO: 27843 - DNA, 489 bp, Unknown
  Obtained from environmental sample
  misc_feature (1)..(489): n is a, c, g, or t
atggaagccctgcgctgtcctcccggcgatgaagttgtagatcatctttccggcggcgagagacggcgtgtagctctttgccgtctgctcctgcaaaagcccgacattctgctgcttgacgagcctaccaaccacttggacgctgaaactgtggcatggttggaacgtcatctgcgggactacgccggaacagttatagctgttacgcacgaccgctattttttggataatgtcgccggttggatactggagcttgaccgcggagagggaatcccatggaagggaaattattcgggatggcttgaacaaaaagaaaaccgcatggcgcaggaagaaaaaggcgaaagcgacagacgcaaaacattacagcgcgaacttgaatggatacgcatgatccaaagggacggcacgcaaagagcaaggctcgtattactcagtacgaaaaactttttcaggacgatgaaagagaacgctcacgaggcgctgtaa

SEQ ID NO: 27844 - protein, 162 aa, Unknown
  Obtained from environmental sample
  DOMAIN (1)...(88): ABC transporter
  misc_feature (1)..(162): Xaa is any amino acid
MEALRCPPGDEVVDHLSGGERRRVALCRLLLQKPDILLLDEPTNHLDAETVAWLERHLRDYAGTVIAVTHDRYFLDNVAGWILELDRGEGIPWKGNYSGWLEQKENRMAQEEKGESDRRKTLQRELEWIRMIQRDGTQRARLVLLSTKNFFRTMKENAHEAL

SEQ ID NO: 27845 - DNA, 333 bp, Unknown
  Obtained from environmental sample
  misc_feature (1)..(333): n is a, c, g, or t
ttgttcaagccatcccgaataatttcccttccatgggattccctctccgcggtcaagctccagtatccaaccggcgacattatccaaaaaatagcggtcgtgcgtaacagctataactgttccggcgtagtcccgcagatgacgttccaaccatgccacagtttcagcgtccaagtggttggtaggctcgtcaagcagcagaatgtcgggcttttgcaggagcagacggcaaagagctacacgccgtctctcgccgccggaaagatgatctacaacttcatcgccgggaggacagcgcagggcttccatagcaagttccaggcggctgtctaa

SEQ ID NO: 27846 - protein, 110 aa, Unknown
  Obtained from environmental sample
  misc_feature (1)..(110): Xaa is any amino acid
MFKPSRIISLPWDSLSAVKLQYPTGDIIQKIAVVRNSYNCSGVVPQMTFQPCHSFSVQVVGRLVKQQNVGLLQEQTAKSYTPSLAAGKMIYNFIAGRTAQGFHSKFQAAV

SEQ ID NO: 27847 - DNA, 408 bp, Unknown
  Obtained from environmental sample
  misc_feature (1)..(408): n is a, c, g, or t
ttggaaaggcaaacaaatatgagtacaaacaaagtttgtaagcttatcgccatcactggcaagggcggcgtgggcaagaccaccgtcagtgccttgttgatcaagaatctgctggcagtcgggaagtctcccgtgcttgcgatagacgccgacccgaacagttgccttgattctgcgctgggggtacacgtgacagaaactgtcggacgggcgcgcgaagaagcgaaggtcgcgtccggaacaagcgcgaatatttccaaacgcgagcttttacgaattaaactggagcaggctctggtagaagccaaaggtttcgatcttatcgccatgggccgtccagagggagaaggctgttactgttatgccaacaatatcctaaaagatatcatctcggctcggccgatctga

SEQ ID NO: 27848 - protein, 135 aa, Unknown
  Obtained from environmental sample
  misc_feature (1)..(135): Xaa is any amino acid
MERQTNMSTNKVCKLIAITGKGGVGKTTVSALLIKNLLAVGKSPVLAIDADPNSCLDSALGVHVTETVGRAREEAKVASGTSANISKRELLRIKLEQALVEAKGFDLIAMGRPEGEGCYCYANNILKDIISARPI

SEQ ID NO: 27849 - DNA, 777 bp, Unknown
  Obtained from environmental sample
  misc_feature (1)..(777): n is a, c, g, or t
atgaagattgcggtttccggaaagggaggcgtgggcaagtctaccatcgcggcctctattgctctaattttggctcaaaggggcgggcgggtgctcgcccttgacgcagatcccgacgcgaacctggccgctgccctcggcatcccaaagaacgtcaagataaagcctatctcttcggaaatcgctttgatcgaagaaagaacaggagcaaaggtcaacgagtacgggcgggtattcaagctgaaccccgaggtttcagatttgacagaaaagctggcgcttaaatacaacggcgtagagcttctggtgcttggggcgatcaaaaaaggcggcagcggctgcgcctgcccggaaagcaactttataagagcttttgtgaacgatcttgtactatacaaaaatgaaaccctcatcatggacatggaagcaggtatcgagcaccttggccgggcaaccgccatgggtgtggatgtgatgtttattgtagtggagccgggccaacgctccctggactgcgccgctacagttatcaatatgtcaaaagaaatcggcataaaaaatttagtcatcatagggaacaaagtaacctgcgatgacgacaaacgctacatcgcggacgctcttgcgactgtcaaagtgtccgccttcctgccatattcggagggcatccgcaacgcggacagggacggagtttcggccctggcgggaatgagggatgaggaacgttctattattgaaggccttatcgacacgatttggaaaggcaaacaaatatga

SEQ ID NO: 27850 - protein, 258 aa, Unknown
  Obtained from environmental sample
  DOMAIN (1)...(254): Anion-transporting ATPase
  misc_feature (1)..(258): Xaa is any amino acid
MKIAVSGKGGVGKSTIAASIALILAQRGGRVLALDADPDANLAAALGIPKNVKIKPISSEIALIEERTGAKVNEYGRVFKLNPEVSDLTEKLALKYNGVELLVLGAIKKGGSGCACPESNFIRAFVNDLVLYKNETLIMDMEAGIEHLGRATAMGVDVMFIVVEPGQRSLDCAATVINMSKEIGIKNLVIIGNKVTCDDDKRYIADALATVKVSAFLPYSEGIRNADRDGVSALAGMRDEERSIIEGLIDTIWKGKQI

SEQ ID NO: 27851 - DNA, 339 bp, Unknown
  Obtained from environmental sample
  misc_feature (1)..(339): n is a, c, g, or t
gtggacatcgtgaactttgacgctttcgagtacggggacactatcgccatatactccgacagcgtaaagtcgcacctggataggggcggagtactggcatggggcgtggttcccacttccgaaaagatacgggaacagaccgttgaatccctggaaaagaagcttgaggaaggcattgatcgtctggcttccaagggaattgacaggaaccttattctccagcaggccatgatcaccccctcgtgcggcacgggctcgctggccgttgatgccgcggaaaaagttttttctcttatgcttgaccttaccaaacggatgaaggaaaaatacaagttctaa

SEQ ID NO: 27852 - protein, 112 aa, Unknown
  Obtained from environmental sample
  misc_feature (1)..(112): Xaa is any amino acid
MDIVNFDAFEYGDTIAIYSDSVKSHLDRGGVLAWGVVPTSEKIREQTVESLEKKLEEGIDRLASKGIDRNLILQQAMITPSCGTGSLAVDAAEKVFSLMLDLTKRMKEKYKF

SEQ ID NO: 27853 - DNA, 351 bp, Unknown
  Obtained from environmental sample
  misc_feature (1)..(351): n is a, c, g, or t
atggcggacattatcattcttggcgcaaccgcgctgggcgcgttcgggctttgtttcgctaacgggattctgcttatagtgatcatcgcggtagtcgcgttctgttacggcggctattcgggactgtaccccgttcttacttccggaaatttcggtattaagaatatcggctccaactacggcgcggtgatggtgggctttatgctctcggcgctgttgttccctatcgtgatcaaaaaaatcaacgggcagaaactgcaatttatcgcgcttggcgtattggcggttttaggcgtggtgctggttgttatattgaagttgatgaatatgaagacgaaagaagagagttga

SEQ ID NO: 27854 - protein, 116 aa, Unknown
  Obtained from environmental sample
  SIGNAL (1)...(20)
  misc_feature (1)..(116): Xaa is any amino acid
MADIIILGATALGAFGLCFANGILLIVIIAVVAFCYGGYSGLYPVLTSGNFGIKNIGSNYGAVMVGFMLSALLFPIVIKKINGQKLQFIALGVLAVLGVVLVVILKLMNMKTKEES

SEQ ID NO: 27855 - DNA, 447 bp, Unknown
  Obtained from environmental sample
  misc_feature (1)..(447): n is a, c, g, or t
atgaagtgggaaaaaaaagaaatctctcccgaaagtgtaaaagaaatttccgcaaagtacggctgtgatctgttaaccgcctcgatacttgtacgcagggggttctgcacgggcgacgctatacgtttctttctggaagatgatcttgcgtccctgcgaaacccgttcgcgctggacggcatggaagacgcggttgagcgtattcttgccgcgaaggacgaaggcgagaaagtactggttttcggggacggcgacgtggacggcattaccggaaccgcgctgctggcgaattaccttgaaagtataggcatggacgtaacatggcgcattcccacaggagacgaatcttacgggctttctctggaagcggttgaggaattcgcggcgaaagacggcacgcttataattacagtagactgcggcatttcccgctttggggaaaattaa

SEQ ID NO: 27856 - protein, 148 aa, Unknown
  Obtained from environmental sample
  DOMAIN (71)...(148): DHH family
  misc_feature (1)..(148): Xaa is any amino acid
MKWEKKEISPESVKEISAKYGCDLLTASILVRRGFCTGDAIRFFLEDDLASLRNPFALDGMEDAVERILAAKDEGEKVLVFGDGDVDGITGTALLANYLESIGMDVTWRIPTGDESYGLSLEAVEEFAAKDGTLIITVDCGISRFGEN

SEQ ID NO: 27857 - DNA, 948 bp, Unknown
  Obtained from environmental sample
  misc_feature (1)..(948): n is a, c, g, or t
gtgataatcgaaatcgcaaagacgcgcaaccttatggttataggcacattgacagaaaccatagtgccgggcatggtttcaatttcagatacgcgccttccctcttttcttgaagggcagcagattcttgtctgggacgcgcctttgcaaaagcagaccttcgcgaaacttttcggcaagggcgttgaggtgggaatgttcgacattgcgccgcagattggcgcggagataaaacaggtcgcgggactcagccttctgcgtatcaaggaactatccaagatagcgaagtactcggacaaggaattaagcgagttggatgtttttgtcaatctttttacttcttacgcgcggttaaaagaaaaaaacgccccggactccgccggagaaagcgccgatattcagcttgcggctcttggaacaatcgcggacgttatgccgctgttggacgaaaacagaatcatcgtgcgaaggggaattgaggcgctggggaaaaaacccagagacggcctttttgaacttctttttgaactggatcttgccggacgcaattttgaaacaaaggatatttcgtggaggctctgcccggttattaacgccgcgagacggatgggaagcgcgaaaacggcggcggatttattttttgaaaaagaacgcgctaaaagggaaaagattgccaaggaacttgcgggaatgaacgaagaccgcaaagagctggaagaggaaacatgggcgcttgtcgatcctatggcttacaaaaatttcaacgagtacggaaaaaatcttacccttgtttacagcgaaaaaattaacaagggcgttaccgggctgatggcgcaaagggcggccaaacaattcaatgttccggcaatagcagtttccatgggcggggaaattcacacaggttccatccgttccgcgagagggtttaatgtcctcggccgaatctga

SEQ ID NO: 27858 - protein, 315 aa, Unknown
  Obtained from environmental sample
  misc_feature (1)..(315): Xaa is any amino acid
MIIEIAKTRNLMVIGTLTETIVPGMVSISDTRLPSFLEGQQILVWDAPLQKQTFAKLFGKGVEVGMFDIAPQIGAEIKQVAGLSLLRIKELSKIAKYSDKELSELDVFVNLFTSYARLKEKNAPDSAGESADIQLAALGTIADVMPLLDENRIIVRRGIEALGKKPRDGLFELLFELDLAGRNFETKDISWRLCPVINAARRMGSAKTAADLFFEKERAKREKIAKELAGMNEDRKELEEETWALVDPMAYKNFNEYGKNLTLVYSEKINKGVTGLMAQRAAKQFNVPAIAVSMGGEIHTGSIRSARGFNVLGRI

SEQ ID NO: 27859 - DNA, 663 bp, Unknown
  Obtained from environmental sample
  misc_feature (1)..(663): n is a, c, g, or t
ttgtttccatcagtgggagtatcttccggaaaaattcatagccgtataagcatacactttcttcccgaattgctaaataaacctgagagagacttttttctgaataaatttcccgagccggttcatttcctaaacggatcgcttcataaaattaattttttcatacaggctattgccgaatgtgaatcatacgaagagcctttgcaaaaaatagccacacgggttcgcctggcctcgcttctttctcaattatgctttattaaatcaattaactctgctataccggttgtgctagatgaacggataggacagataattgtctatattggcgaacatttgaaggaagaactttctttggatagtttagccaacaggttcaggcttaataaaaatcacctcaacgtcctttttcataagatcgtagggaccccgataatgaagtatgttacggcaaaacgtctgggtttggcgcagcaggaaatattatcaggaactgcttttgcagaggcagcctataatgcaggtttcaacgattataccacttttttcagggcatataaatcattttacggctgcccgccgtcggaagcgatggtatatggaatggaaatttcacgacatgagaaaagcctgggaacccggcaggcggtttccggaaggtag

SEQ ID NO: 27860 - protein, 220 aa, Unknown
  Obtained from environmental sample
  DOMAIN (104)...(150): Bacterial regulatory helix-turn-helix proteins, AraC family
  misc_feature (1)..(220): Xaa is any amino acid
MFPSVGVSSGKIHSRISIHFLPELLNKPERDFFLNKFPEPVHFLNGSLHKINFFIQAIAECESYEEPLQKIATRVRLASLLSQLCFIKSINSAIPVVLDERIGQIIVYIGEHLKEELSLDSLANRFRLNKNHLNVLFHKIVGTPIMKYVTAKRLGLAQQEILSGTAFAEAAYNAGFNDYTTFFRAYKSFYGCPPSEAMVYGMEISRHEKSLGTRQAVSGR

SEQ ID NO: 27861 - DNA, 465 bp, Unknown
  Obtained from environmental sample
  misc_feature (1)..(465): n is a, c, g, or t
ttgtcaaccttgaatttggcccttacgatactaatcatgcgtaaagtttcattgggcagacagatactgaacagttggcagctttatttgctcattctgccggccttggtttacctgatcatttttaactacctcccgatgtacggagtgcagatagctttcagggatttcaaggctgtgcagggaatcacaggaagcgcttgggttgggcttaagcattttaagacttttttcgaggcgtattacagttcaaggctcatcatcaatacatttatgttgaatctctatgcccttatatttggttttcccattccaatcatactcgccattttgataaataatctacgaaaccagtatttcaagaaatttacccagacggttatctatgtacctcactttatttccaccgtagttttggccggaatgatctatattttcctgtcccctgtaagcggcatttgttaa

SEQ ID NO: 27862 - protein, 154 aa, Unknown
  Obtained from environmental sample
  misc_feature (1)..(154): Xaa is any amino acid
MSTLNLALTILIMRKVSLGRQILNSWQLYLLILPALVYLIIFNYLPMYGVQIAFRDFKAVQGITGSAWVGLKHFKTFFEAYYSSRLIINTFMLNLYALIFGFPIPIILAILINNLRNQYFKKFTQTVIYVPHFISTVVLAGMIYIFLSPVSGIC

SEQ ID NO: 27863 - DNA, 705 bp, Unknown
  Obtained from environmental sample
  misc_feature (1)..(705): n is a, c, g, or t
ttgataggaaagatttatgaaaccatgaagaaaacaatatatacaataataaccgccgccctcctattcgcctgcataatcgccgcgaacgtccgcctcaccgccatccgcgcctccgaccccgcccggaagctcgaaagcatggcctacctccccggcagcgagcgcataaagcccttcatgctcggcttcaacacgacttacgcgcactacctgtggatcagcgccatgatctacttcggcgaccacctcgacggcgacaggcagttcaagtggctgacgcagatgatcgacatgatcacgcgcctccacccgtacttccacgaggcctacgagttcgccgggctgatgatcccggattactgcggcgatccggacgcggcacgggtaatattggagcgcgggatgaacgcgctcggcggcgtgaggtggaacataccgttttacttgggtatgctttacaatcggtactataacgacccggagcgggcggcgcagtgcttcgcggcggcggcgcaggtgccgagcccgcaaagcgggaagctggcgcggctggcggcgagtttctacgagaatgccgggcgagagggcgaggcgatggacgtgctgctgtttttgcttgagacgagcgagaatccggaggttaagaggcatattgaggggaagattgaggaaatggcggcgaaaccggcgcacaaatattaa

SEQ ID NO: 27864 - protein, 234 aa, Unknown
  Obtained from environmental sample
  SIGNAL (1)...(28)
  misc_feature (1)..(234): Xaa is any amino acid
MIGKIYETMKKTIYTIITAALLFACIIAANVRLTAIRASDPARKLESMAYLPGSERIKPFMLGFNTTYAHYLWISAMIYFGDHLDGDRQFKWLTQMIDMITRLHPYFHEAYEFAGLMIPDYCGDPDAARVILERGMNALGGVRWNIPFYLGMLYNRYYNDPERAAQCFAAAAQVPSPQSGKLARLAASFYENAGREGEAMDVLLFLLETSENPEVKRHIEGKIEEMAAKPAHKY

SEQ ID NO: 27865 - DNA, 759 bp, Unknown
  Obtained from environmental sample
  misc_feature (1)..(759): n is a, c, g, or t
ttgatgtacaacgcgacggacggcttttactacgatattaacaaaagcgaaaaacaagtccccattaaaacaatcgccggatactggcccctccttgcggaaattcccaatggagaaaaagccgagcgtattatcgagaaactttccgacccgaaatatttcggcacggctcacccgtttccgtccattgcgctgtccgaaaaagaatttgacgagacagggcgcgggttcagaggatcggtttttccttatctgacattcatggttataaaaggacttgagcgttatcaacgctgggatttggcgcgcgagtgcgcgataaggcatgtgtactttatgctcgattcaatgagtccggacgggaatcatcacaaaggaaatttgtgggaagcgtatttgcccacaaaggaaggtcccgcaaaatggacaggtaaacccgctttcccgcgtccgcagtatttaacttacgacgcgctttcaactatctgtcttatcatcgaaaatattgtcgggctttcaatatcgcttccgcgcaaaaccgtggattgggtcattccaagtctggaaattatgggcgtggaaaatctttccttaaaaaacaatatgattacgattctttccaataaaagcggcagagggtgggagattcacatggaaagcgaaaaactttattactttactattaatattctgggtgtgaaagaaaaaacattaccaattccctctggtaaatgttcaatccttattgataagctgtaa

SEQ ID NO: 27866 - protein, 252 aa, Unknown
  Obtained from environmental sample
  misc_feature (1)..(252): Xaa is any amino acid
MMYNATDGFYYDINKSEKQVPIKTIAGYWPLLAEIPNGEKAERIIEKLSDPKYFGTAHPFPSIALSEKEFDETGRGFRGSVFPYLTFMVIKGLERYQRWDLARECAIRHVYFMLDSMSPDGNHHKGNLWEAYLPTKEGPAKWTGKPAFPRPQYLTYDALSTICLIIENIVGLSISLPRKTVDWVIPSLEIMGVENLSLKNNMITILSNKSGRGWEIHMESEKLYYFTINILGVKEKTLPIPSGKCSILIDKL

SEQ ID NO: 27867 - DNA, 441 bp, Unknown
  Obtained from environmental sample
  misc_feature (1)..(441): n is a, c, g, or t
ttgagccccaacacgaagataagggacatggcgaaacgcgagggcgtggagatcaggacgtaccgcatcatctacgaggcggttgacgccgtgcacaacgcgatggagggcatgctcaagccggagatcagggagaacattctggcggaggcggtggtgcgcaagctcttcaaagtctcgaagatcggcacgatagccggttgcatagtggagagcggcacactcaataggaactctaaagcgagggtgataagaaatgatgttgaattggtagaatccaagatatcgagtttgaaacgtctgcaagacgacgttagagaggtgcagacggggtatgagtgcggaattatgcttgataggttctcggacttccaagagggcgataggattataacgtttgaagaggtggaaatagcgaggaagttgactaagaataattga

SEQ ID NO: 27868 - protein, 146 aa, Unknown
  Obtained from environmental sample
  DOMAIN (63)...(131): Elongation factor Tu domain 2
  misc_feature (1)..(146): Xaa is any amino acid
MSPNTKIRDMAKREGVEIRTYRIIYEAVDAVHNAMEGMLKPEIRENILAEAVVRKLFKVSKIGTIAGCIVESGTLNRNSKARVIRNDVELVESKISSLKRLQDDVREVQTGYECGIMLDRFSDFQEGDRIITFEEVEIARKLTKNN

SEQ ID NO: 27869 - DNA, 1221 bp, Unknown
  Obtained from environmental sample
  misc_feature (1)..(1221): n is a, c, g, or t
atgaggacggattcggtgcgcgtgtcagaaaccgcccttgcggaactacgggaatggctcggcaagaaccaccccaaagagctgcccgaaaaacccctggagtacacctcaggaaagaaagctcaggacgcgcacgaggcgatacgccctacctatgtcagctatacccccgattcggtcgccgagtaccttaacagggaccaactccggctgtacaccataatatgggaacgctttgtttcaagccagatgaccagcgccaaaacccgcaccgtcagcgtcgagataaaggccgtttcgggcaaagccgcctccggcggtggcgacgaagggcttttcagggtttccgggacaaaacttgttgaaaaaggtttttacaaagtcatcaaactcctctcgtcaaaagaagagaagggaaatccctatcccccgctaaaagccggcgacaaagttgccattgataaattccatcccgagcagcatttcacgcagggcccgccccgctataccgaggcttccattatcgacatgctgcgcgagaaggaaatcggcaggccctcgacttacgcccctattatttccgtgctgctggatcgctattatgttacgcgatcaaacaaacagcttgtccccaccctgctggggaaaaaaatatacgaaatgctggttgaatattttcccggttacgttgatgttgattttacagcctctatggaaacaaagctggacaaggtagaggaaagccagttgaaatggcccgacatgctcaaggattctgggggcctttcaaagccaaggttgacgaggtgggcaaatccccttgagtccttcaaaggttcactggacgagccgaccgattatgtatgcgaaaaatgcggaaagcccatcgtgaaaaaactggggcgcaacggatttttcctcgcctgcaccggctttccggaatgccgcaatacaaggtcggtaccccttgccgtgtgcccgaaatgcggcggcgatgttgtcgcgcgcaagacaaagggcaggggaaaggaattttacggctgcgccaattatcccgaatgtgattttgtcagccactacaagccgatcagccagaactgccccaagtgcggcaagtttatggtggaaaaatacgacaagaaaaacggcagccataaggcgtgcataaatccggagtgcgattatttgcatagcgcggaagacgaagacagtgagaagtga

SEQ ID NO: 27870 - protein, 406 aa, Unknown
  Obtained from environmental sample
  DOMAIN (1)...(245): DNA topoisomerase
  misc_feature (1)..(406): Xaa is any amino acid
MRTDSVRVSETALAELREWLGKNHPKELPEKPLEYTSGKKAQDAHEAIRPTYVSYTPDSVAEYLNRDQLRLYTIIWERFVSSQMTSAKTRTVSVEIKAVSGKAASGGGDEGLFRVSGTKLVEKGFYKVIKLLSSKEEKGNPYPPLKAGDKVAIDKFHPEQHFTQGPPRYTEASIIDMLREKEIGRPSTYAPIISVLLDRYYVTRSNKQLVPTLLGKKIYEMLVEYFPGYVDVDFTASMETKLDKVEESQLKWPDMLKDSGGLSKPRLTRWANPLESFKGSLDEPTDYVCEKCGKPIVKKLGRNGFFLACTGFPECRNTRSVPLAVCPKCGGDVVARKTKGRGKEFYGCANYPECDFVSHYKPISQNCPKCGKFMVEKYDKKNGSHKACINPECDYLHSAEDEDSEK

SEQ ID NO: 27871 - DNA, 507 bp, Unknown
  Obtained from environmental sample
  misc_feature (1)..(507): n is a, c, g, or t
gtgagaagtgagaagttagaagtgagaagtgaagaggcgggggtgattacggattatatctcttacctgggggcagtgcgggggctttcggcccggacgcttgcggcttatggggatgatctggggatgtttgcttcttactgcgataatcatggtatcgatcctgaaaaggcgagttcgcatgaggtgcgggggtttatagccgatttgagttttgaacgggcgtccgcggccagcgttaaccgcaggctttcttctgtccggggcttttaccgctggctggccaaatttcgcgggcgtgtcgataatccctgcgacggcgggccgggcgggctccttcgcaacgttaaagcgccgcaggtattgccttccctcttgtgggaagacgagatggcggattttgcggagctgcccgacgagaaaaaaatgctgtggccaagcagggacaaagctttgattttgactatgtattcagcgggcctgcgcatttcagattggtttcattaa

SEQ ID NO: 27872 - protein, 168 aa, Unknown
  Obtained from environmental sample
  DOMAIN (16)...(99): Phage integrase, N-terminal SAM-like domain
  misc_feature (1)..(168): Xaa is any amino acid
MRSEKLEVRSEEAGVITDYISYLGAVRGLSARTLAAYGDDLGMFASYCDNHGIDPEKASSHEVRGFIADLSFERASAASVNRRLSSVRGFYRWLAKFRGRVDNPCDGGPGGLLRNVKAPQVLPSLLWEDEMADFAELPDEKKMLWPSRDKALILTMYSAGLRISDWFH

SEQ ID NO: 27873 - DNA, 1653 bp, Unknown
  Obtained from environmental sample
  misc_feature (1)..(1653): n is a, c, g, or t
gtggcttttgcagtccttgaaaatggcacccgcctaaaaagcgaggtgattcgcattagaggttcggttgccgagttgcaagtgtttgaagacacaacgggcttaaaagaaggcgacagcgttgaattcacaggcgcactcctttctgtggaactagggcctggtttattgacccaagtgtttgacggcttgcaaaatccattgcctcagttagccgagcagtgtggcttctttttgcagagaggcaaatatcttgaggctttgccgcgtgataaaaagtgggctttcaccccaagcaccaccgttggaactcaagtttccgcaggtgatgcccttggttctgtgccagagggaattttcaagcatttgataatggtgccttttggtcttcagggaatattttcggtagagagcatttcacctgctggcaactatacagttacagataccattgccaaaataaaagattcaaacggcaaaagccatgaagttaaacttatgcaaacttggcctgttaagctgccaataaaatgctattccgagaggcttcgcccaacagaacctttaataacaaaacagagaattgtagataccttcttccccgttaacagaggcggagttttctgcgttcctgggccttttggcgcaggtaaaacggtgctgcagcagttaaccgctcgccacgcagaagttgatattgtgattatagccgcttgcggtgaacgtgcgggcgaagttgtggaaacattgaaagaatttccagagcaaattgaccctcgcacaggtcgcagcttaatggagcgcacattaattatatgcaacacaagctcaatgcctgttgcagctcgtgaagcatctgtttatacaggtgtgacacttgccgaatattaccgccaaatgggactcaacgtgttgctgcttgcagattcaacaagccgctgggcacaggctcttagagagatgagcggtcgcttggaagaaatcccgggtgaagaagctttcccagcatatttggaatctgttatcgcgagcttctatgagagaggcggcatagttcgccttaaaaacggttcaactggttctgtgaccattggtggaaacgtttcccctgctggtggaaactttgaagagcctgttacgcaggcaactttgaaagtggttggcgcattccacggtctttcaagagaacgttccgatcaacgccgtttccctgcaattcacccgcttgatagctggtctaaatataacggtttaatagacagtgcaaaaacatctgaagtgcacaaaattttgagcagaggcaacgatgtggggcaaatgatgaaagttgtgggcgaagaaggtacctcaatggacgattttgttctttaccttaaaggcgagtttttggatgcggtttatttgcagcaagatgcctataataaaatagatgaagcttgccctggagacaggcaagaatatgtgttcaataaaatttatcaaatcttgaaaactcaggttactttcaaggaaaaagatacagcgcgttcctttttcttaaagctaactcaaacagcaaaagactggaaccgagtggaattcaaatcaaaagaatttgaggaattggaaggcaacattctaaaagccgtagcggaggtaactgtaaatgcataa

SEQ ID NO: 27874 - protein, 550 aa, Unknown
  Obtained from environmental sample
  DOMAIN (191)...(413): ATP synthase alpha/beta family, nucleotide-binding domain
  misc_feature (1)..(550): Xaa is any amino acid
MAFAVLENGTRLKSEVIRIRGSVAELQVFEDTTGLKEGDSVEFTGALLSVELGPGLLTQVFDGLQNPLPQLAEQCGFFLQRGKYLEALPRDKKWAFTPSTTVGTQVSAGDALGSVPEGIFKHLIMVPFGLQGIFSVESISPAGNYTVTDTIAKIKDSNGKSHEVKLMQTWPVKLPIKCYSERLRPTEPLITKQRIVDTFFPVNRGGVFCVPGPFGAGKTVLQQLTARHAEVDIVIIAACGERAGEVVETLKEFPEQIDPRTGRSLMERTLIICNTSSMPVAAREASVYTGVTLAEYYRQMGLNVLLLADSTSRWAQALREMSGRLEEIPGEEAFPAYLESVIASFYERGGIVRLKNGSTGSVTIGGNVSPAGGNFEEPVTQATLKVVGAFHGLSRERSDQRRFPAIHPLDSWSKYNGLIDSAKTSEVHKILSRGNDVGQMMKVVGEEGTSMDDFVLYLKGEFLDAVYLQQDAYNKIDEACPGDRQEYVFNKIYQILKTQVTFKEKDTARSFFLKLTQTAKDWNRVEFKSKEFEELEGNILKAVAEVTVNA

SEQ ID NO: 27875 - DNA, 780 bp, Unknown
  Obtained from environmental sample
  misc_feature (1)..(780): n is a, c, g, or t
ttgggcaggttaaaaatattcttaatttgcgggggaatgccggaagcggtttcccaatatgcacggaaacgtgatttgcttagcggcgaacttgttttgaacgatcttataaccgtgcttaaaacagactttgccaaataccgtaaacgtactcctctcattcttcttaatgaagtatttgaatccgttatgtgccaaactgaaggaaagtttgtttatgaacgcgccgctccgggaactcaaagcgcggcggtaaggcaggctcttgaacttctcatcatggcagggctggttcatccggtaacccataccgccgccaatggtattccacttggagccgaggcaaaccggaaataccgccggatgataccatgcgatacaggcctctttttgcatacccttggtctccgttcagagatactaccctccgctgatttttccgctgttaatcgtggttctctggctgaaatttttatcggcttagaactgttaaaagcggcttcctgttttactccacaggaattattctgctggcaaagatcggctaatcccggttcttcaaagggtaacgcccaagtcgatttccttgttcagagaggctcaagcattattccaatagaagttaaatcgggaacccaaggcagtatgcaaagcctccgtctttttatganagaaaagcatattgaaagaggcgtgcgaacatcccttgaaaactttggacgctatgaggatatagatgtctatcctttatacgcgattggaaatgtagttagaggctga

SEQ ID NO: 27876 - protein, 259 aa, Unknown
  Obtained from environmental sample
  misc_feature (1)..(259): Xaa is any amino acid
MGRLKIFLICGGMPEAVSQYARKRDLLSGELVLNDLITVLKTDFAKYRKRTPLILLNEVFESVMCQTEGKFVYERAAPGTQSAAVRQALELLIMAGLVHPVTHTAANGIPLGAEANRKYRRMIPCDTGLFLHTLGLRSEILPSADFSAVNRGSLAEIFIGLELLKAASCFTPQELFCWQRSANPGSSKGNAQVDFLVQRGSSIIPIEVKSGTQGSMQSLRLFMXEKHIERGVRTSLENFGRYEDIDVYPLYAIGNVVRG

SEQ ID NO: 27877 - DNA, 387 bp, Unknown
  Obtained from environmental sample
  misc_feature (1)..(387): n is a, c, g, or t
ttgccagggctgtggatccaaaggaaattgccgaaaagaacgtcaagtaaaggccgtgccggggaagaagcggcggcatcatatcttgaaaaaaagggcatgcggattctacagcggaacttccgttcccgctcaggcgaagtggacattatctccatggacggagaggccattatctttgtcgaagtaaaaacttggtcggcatacggaattgaagcccttgaacaatccctggatgagaaaaaacgacacaagattatagaaacctctaagtattttctttccttgcatcgagaatataagtatatggctatacgttttgacgtaatttttatctcccctgatggaatcacccatattgcatcagccttcacggagcatgtatga

SEQ ID NO: 27878 - protein, 128 aa, Unknown
  Obtained from environmental sample
  DOMAIN (20)...(113): Uncharacterised protein family UPF0102
  misc_feature (1)..(128): Xaa is any amino acid
MPGLWIQRKLPKRTSSKGRAGEEAAASYLEKKGMRILQRNFRSRSGEVDIISMDGEAIIFVEVKTWSAYGIEALEQSLDEKKRHKIIETSKYFLSLHREYKYMAIRFDVIFISPDGITHIASAFTEHV

SEQ ID NO: 27879 - DNA, 672 bp, Unknown
  Obtained from environmental sample
  misc_feature (1)..(672): n is a, c, g, or t
ttgatttaccccaaggagggagatcttatgagcagcagcggaagagcaggcaatggccgcgctgacagaaaaaagcaattcaaacgtcgggataacgacgctttgcaggaaggtgattattccggccggactaccggcggggagtctcgctcaggccgcggccaggcgggattttccgtanaaggaaataataattactataaaaagggtggcgaagttcgcggggacagagtttcctttgtggaaaggcccaaatggattcctccaaaggcaaacacggagccgttgcccgtttctgaatgtctgtggtgcggtaaacccatccgggatatttcatcggcaattgcggataaagacacaggcgctccggttcattttgactgtgtggccacaaggattgcttttggggaaaaacttgaaaaaggcgatacaattgcttacatcggggcgggccggtttggtatagtcagttttggaaactcgggtacctcttcgcgcttttcatccgacgattcatcccataattccggcaagtcagaaaatccttctgaagttcagaaccatcccatcgcaaatcgtggctttacgattaaaaaggttatcgaatgggaaaacaaggatcacagagcagaatggcgttcggtaatttgtgatcattattcggtaacttga

SEQ ID NO: 27880 - protein, 223 aa, Unknown
  Obtained from environmental sample
  misc_feature (1)..(223): Xaa is any amino acid
MIYPKEGDLMSSSGRAGNGRADRKKQFKRRDNDALQEGDYSGRTTGGESRSGRGQAGFSVXGNNNYYKKGGEVRGDRVSFVERPKWIPPKANTEPLPVSECLWCGKPIRDISSAIADKDTGAPVHFDCVATRIAFGEKLEKGDTIAYIGAGRFGIVSFGNSGTSSRFSSDDSSHNSGKSENPSEVQNHPIANRGFTIKKVIEWENKDHRAEWRSVICDHYSVT

SEQ ID NO: 27881 - DNA, 1308 bp, Unknown
  Obtained from environmental sample
  misc_feature (1)..(1308): n is a, c, g, or t
atgcttaacgctgaaatgagcggtaaaatcataacatggtcttccggcgactcgacaaaagtatctgttgataataatggcattgtaacttcaaacttaacaagctttacaaccgccgaagggggaagccaaaaatatacgcaaggttccgcaaaagcgcaagcggcaatcacagccaaagcggcggataatacaattcaaacatttaatgtagcggcgactacagaggcgcaggaaagcatagcaagtctatcgccttttaaggatctttttccggcaagtatccttgtcggaaatatcgccacaggcggcgacgcaaacggatcatcaataactaacgcgtctttgacccgccactttaacgcgcttactccggaaaacgatatgaagccggacgcggtttcaaacggcagaaacgcgtcaacaggtgtaatttcctacacatggactaaagcggacaattttgtcaattccgcaacaggttcaaactttaaaattatcgggcatacattactttggcacagtcaaattccgcaatggcaaaaaaatatggcaaatgaaagcaaagcgacggcgcttgaggcaatgaaacaatttatcagcgatgtaatgacgcgatacaaaggaaaaatttactcgtgggatattttaaacgaagtttttcctgacggcgtaagcgcatccgccgactggaaaaccgcaatgcgcgcggaaaacccctggtttaaagctatcggctatgaatttgtatacgaagcgtatcttgccgcgcgtcaggcagaccccgacgcaaaattgtattacaacgattacaacacggatcaaaccggcaaagcgacaatgatccgcgacatggtgcgcgatgtgaatcaacaatacaagacggcgttcccgtctgaaacacggcttcttattgaaggaatagcgatgcaggagcaccacaataccggcgtaacggcggcgagcataagggctgcattaaatctgttcaaaccgttaggcgtaaaagcagctgtctccgagattgacgtacttggtcaaggttggagtgaattcagttctgtcggtcagggcgcgaacaaacatactcaatctacagtaaccaacaacggattattaacgcaggcggatctgtatcggcaatatatggtagtttatatggattttaaagacataattgaacgcatatcaatttggggcattaccgacaacaacagttggcgttcagccggcttgccgcttttgtttgacaaagacggtaaagccaaaccagcgtattacaagtttgcgggagcggtagttaagtag

SEQ ID NO: 27882 - protein, 435 aa, Unknown
  Obtained from environmental sample
  DOMAIN (86)...(433): Glycosyl hydrolase family 10
  misc_feature (1)..(435): Xaa is any amino acid
MLNAEMSGKIITWSSGDSTKVSVDNNGIVTSNLTSFTTAEGGSQKYTQGSAKAQAAITAKAADNTIQTFNVAATTEAQESIASLSPFKDLFPASILVGNIATGGDANGSSITNASLTRHFNALTPENDMKPDAVSNGRNASTGVISYTWTKADNFVNSATGSNFKIIGHTLLWHSQIPQWQKNMANESKATALEAMKQFISDVMTRYKGKIYSWDILNEVFPDGVSASADWKTAMRAENPWFKAIGYEFVYEAYLAARQADPDAKLYYNDYNTDQTGKATMIRDMVRDVNQQYKTAFPSETRLLIEGIAMQEHHNTGVTAASIRAALNLFKPLGVKAAVSEIDVLGQGWSEFSSVGQGANKHTQSTVTNNGLLTQADLYRQYMVVYMDFKDIIERISIWGITDNNSWRSAGLPLLFDKDGKAKPAYYKFAGAVVK

SEQ ID NO: 27883 - DNA, 438 bp, Unknown
  Obtained from environmental sample
  misc_feature (1)..(438): n is a, c, g, or t
ttgacggcgacgtcggcgcttgggttggaggcgaccgcgtcggtcacagtgcatacggacgcggtaccgaacgtgtcgcagtttacggcgaaccggacggttatcgctcccgccgccgcagacaccggcaacaagaacgcgacgctgtcgtggaacgtatcgaatgccgcgagcgtatcaatcgtcagcaatccggccggtcaaggcggcggtacaagcctcgcgcttacgggcaatacaaatgtatctccgacaagccagaccgtttacacattgcaggccgttacatcgcacggggcggtatatacctatccgacaaccatcaccatatcggttgaggccctgttggatataacgagctttaccgcgtctccgaacccgatagcgtcgggtgggagttcgacgttaagctggaccgtgacgggcggtaatccgtaa

SEQ ID NO: 27884 - protein, 145 aa, Unknown
  Obtained from environmental sample
  misc_feature (1)..(145): Xaa is any amino acid
MTATSALGLEATASVTVHTDAVPNVSQFTANRTVIAPAAADTGNKNATLSWNVSNAASVSIVSNPAGQGGGTSLALTGNTNVSPTSQTVYTLQAVTSHGAVYTYPTTITISVEALLDITSFTASPNPIASGGSSTLSWTVTGGNP

SEQ ID NO: 27885 - DNA, 1017 bp, Unknown
  Obtained from environmental sample
  misc_feature (1)..(1017): n is a, c, g, or t
atgaattttaaaagaattggcttattattaatgacggttttgtttctctttggatgtccgggagagggctctgaaacaccgaagcaggaacaagtaaccgtaacttttgatatggacggcggaacgcctgaatatggctcagttaaaattaataaaggcgcgtcgcttggaaacaaatatccggctaaccccagaaaaaccgatttcgcttttgccggctggtacgaaaaaaatgataccgcctatacaaccagatatttagctgacactccaattaacaaaaacataaccttaaaggcaagatggggagaggctaaaaaagacgattttgtttttgataattttgctgcgggatcaaagactactttaactcctggagtagagtttgaagggaaaaccggtgtaactaaaataagccctaagactgtggatggggtaacagaatatgattggaatgtagtgtcattaactttatctgattatttcgataaagaaataacagttacattggatatgtggatatgggtaagcgctgacgcagtaatattatggcagataaataatggtaccggctacacttcatggggaggtacatggacaataattgcgggtgacgacaaaaactcgttaagcaccggacaatggcaccatttacaaggcatcgctaccggaacgccgatagcgggaaatcaaaatcaaggtaataaggtttatctttcaggcggcggaaacggcggacggcttgagaaaaatcctgtatatatatacattgcggatttttccatggttataactgacaactctaatcctcaattaacggattccaataaactaaccattggcggtaaaaaagatctcaatccccggcttaacgccaacatgaccggaactgtaacatggtcttcaagcgactcaaaggtatccgttgccaacggtatttgtacttcaaacattaccagtatttccggcgctgaaggaagtaaaaaatatacgcagggtccgcgggaagttcggtaa

SEQ ID NO: 27886 - protein, 338 aa, Unknown
  Obtained from environmental sample
  SIGNAL (1)...(23)
  misc_feature (1)..(338): Xaa is any amino acid
MNFKRIGLLLMTVLFLFGCPGEGSETPKQEQVTVTFDMDGGTPEYGSVKINKGASLGNKYPANPRKTDFAFAGWYEKNDTAYTTRYLADTPINKNITLKARWGEAKKDDFVFDNFAAGSKTTLTPGVEFEGKTGVTKISPKTVDGVTEYDWNVVSLTLSDYFDKEITVTLDMWIWVSADAVILWQINNGTGYTSWGGTWTIIAGDDKNSLSTGQWHHLQGIATGTPIAGNQNQGNKVYLSGGGNGGRLEKNPVYIYIADFSMVITDNSNPQLTDSNKLTIGGKKDLNPRLNANMTGTVTWSSSDSKVSVANGICTSNITSISGAEGSKKYTQGPREVR

SEQ ID NO: 27887 - DNA, 951 bp, Unknown
  Obtained from environmental sample
  misc_feature (1)..(951): n is a, c, g, or t
atggtttacaggcgtaccaggggaattatgccttcccagtacgaggaacaggaactggccgccgcggacggagtggaaatcaaggaactgctgaagcccgaaacatggactaacgggattctcacntgcgaggtgatgcgcctcggcgattatgattcatcgngaagacgcggcattgagggaacgggcaaaaaagagtccctgcattttgacacagtaatcggcgcggttgacgcgagggttgacgccgaagcctttacgcgtaacgatataaaacttaacgagaagggctttgccgaactcggcgctaaccttgaaagctccgtcccgaatgtgtacatcgtcggcgactgcaaacagggagccgccaccgtggtaaaggccattgccgacgcgaaaatcgcgtctgcggagattctgcgaaagctgaaactggacgccgatttttcaataaagcccacatgcgccgtgtccgctgatatttccggtctttaccataagaagggggtgatcagcgaattaaaaccggacaacgccgacgcttaccgctgtctttcgtgtaacagcctctgcgaggtctgcattgacgtgtgcccgaacagggccaacgtgatggtggaattgccattggaaagcggattgggaagccatcaggttctgcatgttgacagaatgtgcaacgaatgcgggaactgcgccgttttctgcccccatgccggaaatccgtataaggataaattcacgatcttctgctgtgaagaggatttttccgaaagcgaaaaccccggcatgcttaaaacaggcgcggatactttcaggatccggctggaagacaaatccacgcttgactaccgcagaggagaggacacgatccccagacaatggatcgcgttgattgatgttgttatgacgaagtatgggtatttactgactttgatcaatgaacaatga

SEQ ID NO: 27888 - protein, 316 aa, Unknown
  Obtained from environmental sample
  misc_feature (1)..(316): Xaa is any amino acid
MVYRRTRGIMPSQYEEQELAAADGVEIKELLKPETWTNGILTCEVMRLGDYDSSXRRGIEGTGKKESLHFDTVIGAVDARVDAEAFTRNDIKLNEKGFAELGANLESSVPNVYIVGDCKQGAATVVKAIADAKIASAEILRKLKLDADFSIKPTCAVSADISGLYHKKGVISELKPDNADAYRCLSCNSLCEVCIDVCPNRANVMVELPLESGLGSHQVLHVDRMCNECGNCAVFCPHAGNPYKDKFTIFCCEEDFSESENPGMLKTGADTFRIRLEDKSTLDYRRGEDTIPRQWIALIDVVMTKYGYLLTLINEQ

SEQ ID NO: 27889 - DNA, 549 bp, Unknown
  Obtained from environmental sample
  misc_feature (1)..(549): n is a, c, g, or t
ttgccaatgatcagatcggccgaggggcggcgtctctttgttatgggcgcaaaagttgttatggccggaagcagcattgcggcttctcttttgtttatgatagtagttcccacattctttggagtaactataaatgaaatcagcaagggaaagatacctgcgcttgtctgtccatggtttgatccttttgccaagatatgccttatggcggtaattgcaactaacgcttcgattattgctcccggagtgaggtttatcgatcctctagtctggaagacggcagttattgtcattgcattaacatttgcaggcttttttgttatcaagtttactgccgttataggaagatgccgcagccctaaagatataagtatgataattgccggagggctaagaaacaacagcgctattatgacaatagccgttaatttttttccggaagcggctgccttgcctacattgttaagtattatgtttcaacagacaataatggcaattatgggaaaagtgttttcaagtcaacgcgaaaaagatagcgttacttactaa

SEQ ID NO: 27890 - protein, 182 aa, Unknown
  Obtained from environmental sample
  SIGNAL (1)...(27)
  misc_feature (1)..(182): Xaa is any amino acid
MPMIRSAEGRRLFVMGAKVVMAGSSIAASLLFMIVVPTFFGVTINEISKGKIPALVCPWFDPFAKICLMAVIATNASIIAPGVRFIDPLVWKTAVIVIALTFAGFFVIKFTAVIGRCRSPKDISMIIAGGLRNNSAIMTIAVNFFPEAAALPTLLSIMFQQTIMAIMGKVFSSQREKDSVTY

SEQ ID NO: 27891 - DNA, 882 bp, Unknown
  Obtained from environmental sample
  misc_feature (1)..(882): n is a, c, g, or t
atgaaaaaattgataattttaaccttaattttcttctccgttatgagtgtctttgggcagggaaaagcggggatttcaggctcggtagaatgggacacattgcgcattaacgcggcagtttcccttaatttggctcagtcggggttgaaacttcccgccggcagaacccagggggaagcccttttaagttcaaattatttacgccttatagagccgtgccttttggcgttgcaggtagattcttctacaacaatcgaagaccttgtaaactcaggagagttatcccttgaacatattgaggcaatctcccgcaggtcaaactcatcgtcccctgctctttcgcccgacatgaaaaatattaccacctctgtaacaataccaatttcaaatataagcgctacgcttttaacccataaaagagcttctcccgttttaaaaacattaatcccaatttccacggctcgttatacgggaataataattatcgcattggatcaactgcccatacatggaatgaacagcgccgccatgcccgntccctgcctgttccctaaaatctgggacagcgaaatgaatctcatttatgaacgtaatatgcttgaatcacggaatatttcaatggcacattattcgccgcttcagggtattttccaaagaaatccgtcagggctttctcctgaattacaggctgttgtgggagagaaaccgttaaagatatttgcaagcggcgtattcggaataaaacccacagaccttatcattgataaaaatgacgcaatgcttattatttcatctgaggaaaaccgccgtctgctttcacaggggaagattgctataattttggatgaatctgtgcttaaacaggaattttttagtaagtaa

SEQ ID NO: 27892 - protein, 293 aa, Unknown
  Obtained from environmental sample
  SIGNAL (1)...(19)
  misc_feature (1)..(293): Xaa is any amino acid
MKKLIILTLIFFSVMSVFGQGKAGISGSVEWDTLRINAAVSLNLAQSGLKLPAGRTQGEALLSSNYLRLIEPCLLALQVDSSTTIEDLVNSGELSLEHIEAISRRSNSSSPALSPDMKNITTSVTIPISNISATLLTHKRASPVLKTLIPISTARYTGIIIIALDQLPIHGMNSAAMPXPCLFPKIWDSEMNLIYERNMLESRNISMAHYSPLQGIFQRNPSGLSPELQAVVGEKPLKIFASGVFGIKPTDLIIDKNDAMLIISSEENRRLLSQGKIAIILDESVLKQEFFSK

SEQ ID NO: 27893 - DNA, 342 bp, Unknown
  Obtained from environmental sample
  misc_feature (1)..(342): n is a, c, g, or t
atgtcaaggaattacgggatagccgtaaatgtaattgaacagcacaatccggggatttccggcagatatttaaaaataggggaaacaattatcattcccgcattcggcaacacgcctgcgccagcaccgcaaggtacgcagcaaaattcgctgcaaaacagaccgataacaacgccgtccaactttacggatacccatattgtgcaaaaaggcgaaactttctggtctttgggcaggaaatacggggttgaaccaaaagtcctggcagaggcaaacgggctgaaattaaccgatattctgcatgaaggaagaacgattagagtgccgataatattacagtaa

SEQ ID NO: 27894 - protein, 113 aa, Unknown
  Obtained from environmental sample
  DOMAIN (66)...(109): LysM domain
  misc_feature (1)..(113): Xaa is any amino acid
MSRNYGIAVNVIEQHNPGISGRYLKIGETIIIPAFGNTPAPAPQGTQQNSLQNRPITTPSNFTDTHIVQKGETFWSLGRKYGVEPKVLAEANGLKLTDILHEGRTIRVPIILQ

SEQ ID NO: 27895 - DNA, 831 bp, Unknown
  Obtained from environmental sample
  misc_feature (1)..(831): n is a, c, g, or t
ttgtattcaaggaaatcttgtttcctagtcgatcttattgaaggagtggaaatttttattcctacgcctgtttcttacagggacggcacaaaggtaatacgttttccttccggcataactgttttggacggcgacaaggccggcgtttacgctacatacagcctgcccgatgaagacagcgatatggaagtattccgcaggcaccgtttcttcttaggccttcttaaccgtcagattcaaatgaatgaagagcttgagaatccggccgtggcgaagatgtattattcttttttcagaacaagcatgaaccagcgcacattaacgcggcttttcagggaatttgtccatatagacaccaaccgcgttaatatattatccgtaagcggaagtttgaaggaagtttcgggacagatgcttattattccccgctgggacggaattgtaaaagaagttgtacgccaaacctttggagcgttaacaagcgagattgaagatcattttattgacaacaatcttaccgtggaagttttaaacggaaccgccattaacgggcttgccggcagaacggcagatatgctgcgcagtttcggctatgatataatttccataggcaacgcggaccgcagtaattatgaaagcacggtggtctatcatttttccggagacgacgcgatggcaaaagcttttgccgatgttataaactgcgaaaatatcatagacgaaatgagtgacgaggaaggtcaaacgaatatgcagtctgttgactataaagcggatatcaggttaattatcggaagagattttaatgggcgatatgtcatcaaaaactga

SEQ ID NO: 27896 - protein, 276 aa, Unknown
  Obtained from environmental sample
  misc_feature (1)..(276): Xaa is any amino acid
MYSRKSCFLVDLIEGVEIFIPTPVSYRDGTKVIRFPSGITVLDGDKAGVYATYSLPDEDSDMEVFRRHRFFLGLLNRQIQMNEELENPAVAKMYYSFFRTSMNQRTLTRLFREFVHIDTNRVNILSVSGSLKEVSGQMLIIPRWDGIVKEVVRQTFGALTSEIEDHFIDNNLTVEVLNGTAINGLAGRTADMLRSFGYDIISIGNADRSNYESTVVYHFSGDDAMAKAFADVINCENIIDEMSDEEGQTNMQSVDYKADIRLIIGRDFNGRYVIKN

SEQ ID NO: 27897 - DNA, 363 bp, Unknown
  Obtained from environmental sample
  misc_feature (1)..(363): n is a, c, g, or t
atgggcgatatgtcatcaaaaactgaagaattaactcaaaccgccgaatcgttagctgaacttttacgggagcataacgggcaggatgtaaccctattgaaccttcgcggtattaacgattgggcggatttttttattattgccaccgtttcaagcggaacccacatggacggccttgaaaggcacattaaggatttttgccgcgggaaaggaatagatatattcggcgtctcgccgaaaagtacggacgacgaatggcgtttaatggatttgggttcaataattattcatttaatgaacagccgcgcgcgggatttctatgaactggaaaaactatggcgtaataatgccggcagtctgtaa

SEQ ID NO: 27898 - protein, 120 aa, Unknown
  Obtained from environmental sample
  DOMAIN (12)...(114): Domain of unknown function DUF143
  misc_feature (1)..(120): Xaa is any amino acid
MGDMSSKTEELTQTAESLAELLREHNGQDVTLLNLRGINDWADFFIIATVSSGTHMDGLERHIKDFCRGKGIDIFGVSPKSTDDEWRLMDLGSIIIHLMNSRARDFYELEKLWRNNAGSL

SEQ ID NO: 27899 - DNA, 435 bp, Unknown
  Obtained from environmental sample
  misc_feature (1)..(435): n is a, c, g, or t
atggaattttgctacgtggataacgccgtagacgggattattctggccggagaaaagagggaggccgccggagagctcttctatatctccgacgagcggtcgtattctataagggaagtcgtatcgaccatcgccgaaagctcgggaaagagagttttttttatcggtatccccgtcttcgcggcgaattttttgggattatgctgggagatagcggctaagatactgccttttccgcctattatctcaaaatactcaaggaaaccgtttttttccagagagaccgtgttttggaccaccagggacgtcaataccgtttccacggaaaagataaggcgcgttctcggatattcgcccgccgtcaacatcaaagaggggacgcgaaggacggctgagtggttaaacgagaatctgttccgtaaaacggctgaatag

SEQ ID NO: 27900 - protein, 144 aa, Unknown
  Obtained from environmental sample
  misc_feature (1)..(144): Xaa is any amino acid
MEFCYVDNAVDGIILAGEKREAAGELFYISDERSYSIREVVSTIAESSGKRVFFIGIPVFAANFLGLCWEIAAKILPFPPIISKYSRKPFFSRETVFWTTRDVNTVSTEKIRRVLGYSPAVNIKEGTRRTAEWLNENLFRKTAE

SEQ ID NO: 27901 - DNA, 468 bp, Unknown
  Obtained from environmental sample
  misc_feature (1)..(468): n is a, c, g, or t
atgaacattggaattaacgcgtcggcattgagcgctcaaaagggcggcgcgtcgttctatatattgaatatagttaaggctttggcccaaaccgataccgacgacaagtatttcatattcactacaaaagccgcgaaggatcaattttcggatctgccctcaaattttacggttgtgccttgcgcgccttctaaaacaatatttcgcttattttgggagcaatcgtccctgcctttgattatatgtagaaaatttaagataaaagtcttattctcccccaactatacggcgccgttgattcatttcggctttttttccgtggtaactatccatgacctgagtttctttccgttgtctaaatactatccgcgttccagacgtttttttaagcagataattcatttgtccgtgaaattctccgataaagttatcgccgttttcggaatttacaaagaacgacattcttaa

SEQ ID NO: 27902 - protein, 155 aa, Unknown
  Obtained from environmental sample
  misc_feature (1)..(155): Xaa is any amino acid
MNIGINASALSAQKGGASFYILNIVKALAQTDTDDKYFIFTTKAAKDQFSDLPSNFTVVPCAPSKTIFRLFWEQSSLPLIICRKFKIKVLFSPNYTAPLIHFGFFSVVTIHDLSFFPLSKYYPRSRRFFKQIIHLSVKFSDKVIAVFGIYKERHS

SEQ ID NO: 27903 - DNA, 741 bp, Unknown
  Obtained from environmental sample
  misc_feature (1)..(741): n is a, c, g, or t
atgccaaacgatatgaaagtctgtatagacagttggaaaaaatatatgccggaatataagccggtcttgtgggatatgaataaattcgacatcaactcgcacgtgttcgtcaaagaggcctgtcaggtaaggaagtgggcgttcgcgtcggattatatacggctgtacgcattgtacaccgaaggcggggtataccttgataccgatgtttatgtaaagaaaagctttaatgactttttgggagacggcttctttaccggggttgaatatcatgagggattcgttaaaaacggggctcatctgctgaatgaggatggaacgttaagaaataaaggcgagatatttacccacggcatacagatacaagccgcgattttgggaggcgttaaaggacatccgtttttgagagactgtttggattggtacaacggcaagcatttcattttggaagacggcagctattatgacaatctgatatcgccgtatatttacgcgcacgtcgctacggaatacgggttccgttataaaaatgagttgcagaaattgaagaataacatgaccgtttatccaacctccgtatttgccggaagtctggctcaatcgggagaagacacctacgccgtacaccgctgtgacggaacatggcgaagcaagcggtataaaatactatggtggctgaaaaagaaccggtttttgagaatgctcttcggaaagaagaaacttgaaaaatacgcgctttag

SEQ ID NO: 27904 - protein, 246 aa, Unknown
  Obtained from environmental sample
  DOMAIN (10)...(98): Glycosyltransferase sugar-binding region containing DXD motif
  misc_feature (1)..(246): Xaa is any amino acid
MPNDMKVCIDSWKKYMPEYKPVLWDMNKFDINSHVFVKEACQVRKWAFASDYIRLYALYTEGGVYLDTDVYVKKSFNDFLGDGFFTGVEYHEGFVKNGAHLLNEDGTLRNKGEIFTHGIQIQAAILGGVKGHPFLRDCLDWYNGKHFILEDGSYYDNLISPYIYAHVATEYGFRYKNELQKLKNNMTVYPTSVFAGSLAQSGEDTYAVHRCDGTWRSKRYKILWWLKKNRFLRMLFGKKKLEKYAL

SEQ ID NO: 27905 - DNA, 486 bp, Unknown
  Obtained from environmental sample
  misc_feature (1)..(486): n is a, c, g, or t
atgctaaacctcatcctaaaactccttgtcctctcttggcgaatcaaatttgaaaagcctttgccggagggttctattgttataggtttgtggcaccaggatttgcctgcctgccttgcggcgtttaaacggagagatatagcggttttgataagcaaaagcgatgatgggagcaagtttgcaaaactctcaaagagccttggatacgatgtttttaggggttctgggagcagggggcaaagcgaggttaggcatttgttgaaggcactcaaagagggtcgctcggcagggatggctctagatggtcccaaaggtccgcctctcgttgcaaagcccggtgcgcagtggcttgcccacaaggctttggtgccgctcatggaggttagcgtaaaatatagccacacccttaggctaaaaaaatcgtgggacaaaacctttatccctttgccttttagcagggtttttattatttattcaattaaatga

SEQ ID NO: 27906 - protein, 161 aa, Unknown
  Obtained from environmental sample
  DOMAIN (40)...(109): Domain of unknown function (DUF374)
  misc_feature (1)..(161): Xaa is any amino acid
MLNLILKLLVLSWRIKFEKPLPEGSIVIGLWHQDLPACLAAFKRRDIAVLISKSDDGSKFAKLSKSLGYDVFRGSGSRGQSEVRHLLKALKEGRSAGMALDGPKGPPLVAKPGAQWLAHKALVPLMEVSVKYSHTLRLKKSWDKTFIPLPFSRVFIIYSIK

SEQ ID NO: 27907 - DNA, 609 bp, Unknown
  Obtained from environmental sample
  misc_feature (1)..(609): n is a, c, g, or t
gtgtggcgcataacggatatacaaaagtttcacacaagcataggaaattatggcgcggcgcaaagacatcttaacgacctggcggcgactgcaaaaaacagcgttcttggaaattacagactttcttcgcttgtttctaccaatattgaagaaatcaggatagatgagatatgccgggctattgaggaaaaaacagcccaatccgcgcttgcaaattacggcattgaggttcaggccctcaaaataaaacggctcgcccttcctgaagccaacattaaaagcgtttttaatcagatgatagcggacaggcaaaagtatgtttcacagtacattgcggagggagaaagagacgcggcgataatcgtaggcgaggcggacgcgagagccgcggaaatcttcgcgcagggaaaacttgaagcttctcaaattgacgccgaaacggaaagaatggtcgcgcgtatctacggcgaggcctatgacagaaactcaaggttgtttgttttcctaaaaagactgcttgctcttgaaaattcggtaaacgcggacacgactattattatgcgcgcaaatgaatctccgtttgacataatcacaacaggatcaaattaa

SEQ ID NO: 27908 - protein, 202 aa, Unknown
  Obtained from environmental sample
  misc_feature (1)..(202): Xaa is any amino acid
MWRITDIQKFHTSIGNYGAAQRHLNDLAATAKNSVLGNYRLSSLVSTNIEEIRIDEICRAIEEKTAQSALANYGIEVQALKIKRLALPEANIKSVFNQMIADRQKYVSQYIAEGERDAAIIVGEADARAAEIFAQGKLEASQIDAETERMVARIYGEAYDRNSRLFVFLKRLLALENSVNADTTIIMRANESPFDIITTGSN

SEQ ID NO: 27909 - DNA, 651 bp, Unknown
  Obtained from environmental sample
  misc_feature (1)..(651): n is a, c, g, or t
atgaaaaacagggtctttattgtttttacccaaataatggaatacattatcaagtattttcagttgacagtatgttttgccgctgttttaattgttctttccggcatataccgcgttgaaagcagtcaaatcgccgttgtgcttcgtttcggcagacttgccggcagttccggcgaaaaacaaattaaaaagcccggacttcatttcgctttaccgttttttatagacagagtaataaaaataccggtacacacagtgcaggaaattgaagttactacgcactataaaccgcaaggactcgtagtttcctccgacatcgacagaaacggctatgttataacaggcgataaaaatgtaatacttataaaggcaaaaataaaatatcaaataaatgatcctgttcgttatgcgctattcacaagcgacactgcaagaataatagacggtataatcagcggagaattaacctgcatcgcctcgcattccgacgtagattcaatccttacaagcggcagagcgcagttgtcaagcgatgttatgcgatattcgcaaaacattatagacggattaaaattgggagttcttatttccggcgtagagctgacggaaattacagcgccagccgaaacaatccgctatttgaggaagtaa

SEQ ID NO: 27910 - protein, 216 aa, Unknown
  Obtained from environmental sample
  DOMAIN (35)...(212): SPFH domain / Band 7 family
  misc_feature (1)..(216): Xaa is any amino acid
MKNRVFIVFTQIMEYIIKYFQLTVCFAAVLIVLSGIYRVESSQIAVVLRFGRLAGSSGEKQIKKPGLHFALPFFIDRVIKIPVHTVQEIEVTTHYKPQGLVVSSDIDRNGYVITGDKNVILIKAKIKYQINDPVRYALFTSDTARIIDGIISGELTCIASHSDVDSILTSGRAQLSSDVMRYSQNIIDGLKLGVLISGVELTEITAPAETIRYLRK

SEQ ID NO: 27911 - DNA, 627 bp, Unknown
  Obtained from environmental sample
  misc_feature (1)..(627): n is a, c, g, or t
gtgataaccggcgataaaaacattgtgcttgtaaaggcaaaaataaaataccaaataagcgatcccgtgcgttatacgctattcataaacggcgccgaaaaaacaattgacggcataatcagcggagaattaacccgcatagccgcgaattcagacgtagacgctgttctgacaagcggcagggcgcgtttatcaggcgatgttacgcgaaattcacagacgcttatggatgcgttaaaattggggatacttatttccggcgtggaactgacagaaatcaccgcgccggccgaaactatccgttattttgaggaagtaagaaacgcgtccatttacaaggcaaccaattaccagcgggcgcaggaatacgcttctacgcggatacttggcgcggaggcggccggaaacacgctcaaacaaaccgctatttccgagcaggcggaaagactgactaaagcccgcggcgaaatggcggagttcaacggcctgtacgaccaatacgcgagaaacccgcaaatcatcatgtccggtacattcaggcagagagtgggcgaggtccttaaaaaagcgggcaaatatattgtgcttccggcaggctcggaaacgccgactttactgctgccataa

SEQ ID NO: 27912 - protein, 208 aa, Unknown
  Obtained from environmental sample
  misc_feature (1)..(208): Xaa is any amino acid
MITGDKNIVLVKAKIKYQISDPVRYTLFINGAEKTIDGIISGELTRIAANSDVDAVLTSGRARLSGDVTRNSQTLMDALKLGILISGVELTEITAPAETIRYFEEVRNASIYKATNYQRAQEYASTRILGAEAAGNTLKQTAISEQAERLTKARGEMAEFNGLYDQYARNPQIIMSGTFRQRVGEVLKKAGKYIVLPAGSETPTLLLP

SEQ ID NO: 27913 - DNA, 936 bp, Unknown
  Obtained from environmental sample
  misc_feature (1)..(936): n is a, c, g, or t
ttgggaaattttatacaggatgatgtaaaaaaattatttctccagcgtactgaagaaacaggacagcaaattactgatgaggctttggaatatgtgtgggaacaatctcaaggacaaccgtggataattaattcattgtttgagcgggttactatgcgtatattgagacgggacaattacagtaccgtaatgcgggaacatttagaacaggcccgcgagcaaatgatacttgcaagggaaacccatcttgattcccttgctgtcagaatacaggagccggccatccgtaaagtgatagaaagccttataaccggaacccccgacccggaacttacctccagtgaaggatttcgtatatgcacagatttggggcttgtaaaaaaagaacgaaacaccccgattgtcgcaaatccgatatatagggaagtgcttgcaaggcaattaacttattccgcgcaggatgccatcccagaaccggagtggcaatgggaaaagccagacggttccatcgatatggacgcgctgttacgggagtttcaggtgttctggcggcgcaattctgaaatgtgggaacaaaaaatgaattataccgaggcattcccccatctcttgttaatggcgtttcttcagcgtgtgttaaatggcgggggccatattgaacgcgaatacgctgcgggacgcggaagaatggatctggccgttgaatataataataaaatatacattattgaaataaagcttattcattactataataccccgcaggaaatacgggaagaaggattggaacaaataattaaatatcgggacaaaataaattcctccgccccctcctatcttgttcttttcgaccgccgccctgaagcaaaggaaaaactgtgggaagaaaaacttacatggcaatcagaaagaggaattacagtagttgggtgttaa

SEQ ID NO: 27914 - protein, 311 aa, Unknown
  Obtained from environmental sample
  misc_feature (1)..(311): Xaa is any amino acid
MGNFIQDDVKKLFLQRTEETGQQITDEALEYVWEQSQGQPWIINSLFERVTMRILRRDNYSTVMREHLEQAREQMILARETHLDSLAVRIQEPAIRKVIESLITGTPDPELTSSEGFRICTDLGLVKKERNTPIVANPIYREVLARQLTYSAQDAIPEPEWQWEKPDGSIDMDALLREFQVFWRRNSEMWEQKMNYTEAFPHLLLMAFLQRVLNGGGHIEREYAAGRGRMDLAVEYNNKIYIIEIKLIHYYNTPQEIREEGLEQIIKYRDKINSSAPSYLVLFDRRPEAKEKLWEEKLTWQSERGITVVGC

SEQ ID NO: 27915 - DNA, 699 bp, Unknown
  Obtained from environmental sample
  misc_feature (1)..(699): n is a, c, g, or t
ttgaaaacagagatattttatattttacagcctattatcgtttcgggttttgaaacaaccccctggtctctgcgaataggcatccctgtatcggaaataaaaaagccgattcgagccttgatgtcttattccataatatttgccgtcatccttttggcagtggcggcggttattactttgttagtagcaaccggcattgttaaaccgattatcaaagtaaccgctaccttaaaagacatatccgacggcgaaggcgacctgactcggactgtcgctgtcagttcaaaagatgaagtcggcgaccttgccatgtactttaataaaacacttggaaaaatcaaagacctggttcttctcattaaaaaacaggcaggcttgttatctgaaatcggagatgacctgtccagcaacatgaccgaaacggcggcggcagtgaacgaaattaccgccaatattcaaagcatcaaaagccgcgtcataaaccaaagcgccagcgttactgaaaccaacgcaactatggatcaagttgtcacaaacatcgacaaactcaacgaccatgttgaaactcaggtcagtaatctttctcaggcttcatctgccattgagcaaatggtagccaatatcaattctgtcaccaacacgcttgtcaacaacacaggcaatgtaaacacgttaaaagaatccgccgaagtaagatag

SEQ ID NO: 27916 - protein, 232 aa, Unknown
  Obtained from environmental sample
  DOMAIN (44)...(115): HAMP domain
  misc_feature (1)..(232): Xaa is any amino acid
MKTEIFYILQPIIVSGFETTPWSLRIGIPVSEIKKPIRALMSYSIIFAVILLAVAAVITLLVATGIVKPIIKVTATLKDISDGEGDLTRTVAVSSKDEVGDLAMYFNKTLGKIKDLVLLIKKQAGLLSEIGDDLSSNMTETAAAVNEITANIQSIKSRVINQSASVTETNATMDQVVTNIDKLNDHVETQVSNLSQASSAIEQMVANINSVTNTLVNNTGNVNTLKESAEVR

SEQ ID NO: 27917 - DNA, 645 bp, Unknown
  Obtained from environmental sample
  misc_feature (1)..(645): n is a, c, g, or t
gtggccgctgacattcaggaaatagcccgagaatccgagggccttatggaaattaactcggtaatggaaaacattgccagccagaccaacctgctttcgatgaacgcggcgattgaagccgcccacgcgggagaggcgggcaagggcttcgccgtagtcgcggacgagatacgcaaactggcggagagttccagtgagcagtccaagaccatcggcaatgttttgaagaagataaaatcatcgatggacaagataaccaaatccaccgaggtcgtactggccaggttcgaggcgattgacacgggcgtgaagacggtggcggatcaggaagaaaacatccgcaacgcgatggaggagcagggacaggggagcaagcaagttctgcaaagcgttggcagtttgaatgaccttaccaggcaggtaaagagcggcagcgaggagatgctgaacggcagccaggaagtgatgaaggaaagccataaccttgaaagggcgacgcaggagatcaccggcggcatgaacgagatggcctctggcgcggatcaggtgaacatagcggtacacaatgtcaacgaaataagcgtgaaaaaccgcgaaggcatagagtccttaatcaaggaagtgtcgaagtttaaagtagagtaa

SEQ ID NO: 27918 - protein, 214 aa, Unknown
  Obtained from environmental sample
  DOMAIN (2)...(170): Methyl-accepting chemotaxis protein (MCP) signaling domain
  misc_feature (1)..(214): Xaa is any amino acid
MAADIQEIARESEGLMEINSVMENIASQTNLLSMNAAIEAAHAGEAGKGFAVVADEIRKLAESSSEQSKTIGNVLKKIKSSMDKITKSTEVVLARFEAIDTGVKTVADQEENIRNAMEEQGQGSKQVLQSVGSLNDLTRQVKSGSEEMLNGSQEVMKESHNLERATQEITGGMNEMASGADQVNIAVHNVNEISVKNREGIESLIKEVSKFKVE

SEQ ID NO: 27919 - DNA, 900 bp, Unknown
  Obtained from environmental sample
  misc_feature (1)..(900): n is a, c, g, or t
atgcctcgttttattcgatttttagatgattatcctgtttttccaattacaaatatttggacagatattggcggtattcaaaatagggatgagggaaagttgtatgttgttcaaacagcagtaatggcaatccaacgctgcctcctcatgaccaccgaccccggcgaccttgtacttgacatcacctgtggcagcggaaccacagcctacgttgccgagcaatggggacgccgctggattacctgcgacacttcccgcattgccataaccttagcaaagaaacgcctcatgaccgcaacattcgactattacaaactggcgcaccctgaacaaggagtatcaagcggcttcgtatacaaaaccgttccacacattaccctaaagtcaatagcgaataacgagcctcccgaacaggagacgctttacgatcagcctgaaatagaaaaacgaaaagtccgcatttcaggcccctttacggtagaagcccttcctgcccctgtagtgaaaccactcgacgatgaagaaagccccgccccgttcttccatgaaaacgccgctaaaaaacaatccgattggatgcaggaattaaaagcgtcaggcatattgggccgcaaaggcgagaaaatcaaattttcccggatagaacctcttgaaaatacaaaatttcttcatgcggacgctgaaacagaagaaaccaaagaccatacagccagaaaacgagctgtaatatgcttcgccggagaaacccgcccgcttgatacccgcatggtaaatcaagcgttatacgaagcccaacatatcatcccgcagccttcttatttgattttcgccgctttccagtttgaccctgccgccgcaaaagtaattgacgaaaccaactggcctggcgtagttttatga

SEQ ID NO: 27920 - protein, 299 aa, Unknown
  Obtained from environmental sample
  misc_feature (1)..(299): Xaa is any amino acid
MPRFIRFLDDYPVFPITNIWTDIGGIQNRDEGKLYVVQTAVMAIQRCLLMTTDPGDLVLDITCGSGTTAYVAEQWGRRWITCDTSRIAITLAKKRLMTATFDYYKLAHPEQGVSSGFVYKTVPHITLKSIANNEPPEQETLYDQPEIEKRKVRISGPFTVEALPAPVVKPLDDEESPAPFFHENAAKKQSDWMQELKASGILGRKGEKIKFSRIEPLENTKFLHADAETEETKDHTARKRAVICFAGETRPLDTRMVNQALYEAQHIIPQPSYLIFAAFQFDPAAAKVIDETNWPGVVL

SEQ ID NO: 27921 - DNA, 831 bp, Unknown
  Obtained from environmental sample
  misc_feature (1)..(831): n is a, c, g, or t
atggaatatatagagggagaaaatatttcagattttattaataagaatccagaaaagattgatagtatctttgaacaaactataaacggatttaaatatctagaggaacacaatattttacatagtgatattagagatagtaacatattagtaacaaaagatggtactgtaaaaataattgactttggatttggaaaaaaaatagttttttctgctgatactgataaaagtataagtttaaattggtggtgtaatattcctgatgaattttctgagaaaaaatatgataaacagactgaattatattttgttggaaagttattcgaatacttattacgccaaaacaagatagaaacattttcatattattcagaattaaaatcaatgatcgagagcaatccgcaaaatagaatgaaatcattctcttctttacaaaataatttattacaaaataataaattattggatttcttttctgaggatgaaataattacttatagatattttgcggattctatgacagaaatgatctcaaaaattgaagaaaaatctacatataacaatacagacatgattttacaaaggctggaagatatttattggaagaatatgttggagaaagaaattcaaaatgcaagaactattattcatgtttttttgaaaggaacatattattacaataagaatgcatcaatggatgtctgggtactgaaaaattttattaatcttttgaaaagttgtagtacagaaaaaactaaaataataatgatgaatattcaaaaccgtcttgatggtctaaaaaggtatactgaagaggatattccattttaa

SEQ ID NO: 27922 - protein, 276 aa, Unknown
  Obtained from environmental sample
  misc_feature (1)..(276): Xaa is any amino acid
MEYIEGENISDFINKNPEKIDSIFEQTINGFKYLEEHNILHSDIRDSNILVTKDGTVKIIDFGFGKKIVFSADTDKSISLNWWCNIPDEFSEKKYDKQTELYFVGKLFEYLLRQNKIETFSYYSELKSMIESNPQNRMKSFSSLQNNLLQNNKLLDFFSEDEIITYRYFADSMTEMISKIEEKSTYNNTDMILQRLEDIYWKNMLEKEIQNARTIIHVFLKGTYYYNKNASMDVWVLKNFINLLKSCSTEKTKIIMMNIQNRLDGLKRYTEEDIPF

SEQ ID NO: 27923 - DNA, 357 bp, Unknown
  Obtained from environmental sample
  misc_feature (1)..(357): n is a, c, g, or t
atgaccgtattagaagctgttacattactggaagggcaattttttatcggagaagataattcaagtctggaagtggcctccgcctgcggagcggatttaatgagcgatgtaatggcatttgtaaaagacaaggttttgcttttaaccggccttgttaacccacaggtaatacgcaccgcggagcttcttgatattcatgtaataatatttgtcagaggaaaagtccccggcagagacatgatcgaaatggctgaagaatccgacattatccttgcagggacaaaacttccgatgtttatttcctgcggcaaactatacgaagcaggccttagaacaggcggcacacgggcaatttaa

SEQ ID NO: 27924 - protein, 118 aa, Unknown
  Obtained from environmental sample
  misc_feature (1)..(118): Xaa is any amino acid
MTVLEAVTLLEGQFFIGEDNSSLEVASACGADLMSDVMAFVKDKVLLLTGLVNPQVIRTAELLDIHVIIFVRGKVPGRDMIEMAEESDIILAGTKLPMFISCGKLYEAGLRTGGTRAI

SEQ ID NO: 27925 - DNA, 945 bp, Unknown
  Obtained from environmental sample
  misc_feature (1)..(945): n is a, c, g, or t
atgagaaagcttctgtttttgctctttccggcattggcaattctggcaatttttagctgtagcagcccggacgaaaatttgccctgccttagttgcagcgagccattcccgtcgcaaggcggctactaccctccgcagaatcagtatgcctattgccttaattatgatagctataatggctattataactgcagctatatgcctgctggcagctgcagtggatcgtattatggcagcgacaacacctgcggcggttactggtggcagtccagcaatccacagccaccgcccagcagctcttctcgccctagcagttcttcttctcgccctagcagttcttcttcatctcgtcctgcgagttcgtccagcgttgaatacacaggcggttcttgcaatgtgagtgattacggaagcgttcaaattggcgaccaagtatggatggccaagaactggggctgctatgcccctggtagcaaatgttatgacaatgaccctgccaactgcattaaatacgggaggctttacgactgggcaactgcgatgaacatagacaagaggtacaattacgaagaatggggcggcagcgacgtaaaccatcagggcatttgccctagcggttggcatttgtcaagagatagagaatgggacgatctgggaacacatgttgcgggatactatagcttgggtgcgagatatttgaaatcgcaaagcggctgggacggcgaggacacttacgggtttgcagctctgccgggcggctacagctactcagatgaccgtttcaactatgtcggcgacagaggcggctggtggagtgcttcggagaatttttctaactttgctggcttccggcaaatgttgagcaactacgaatacgttgataacagaggcggtgtaggtatagataaagactatttatttagtgttcgttgtgtgaaggattaa

SEQ ID NO: 27926 - protein, 314 aa, Unknown
  Obtained from environmental sample
  SIGNAL (1)...(22)
  misc_feature (1)..(314): Xaa is any amino acid
MRKLLFLLFPALAILAIFSCSSPDENLPCLSCSEPFPSQGGYYPPQNQYAYCLNYDSYNGYYNCSYMPAGSCSGSYYGSDNTCGGYWWQSSNPQPPPSSSSRPSSSSSRPSSSSSSRPASSSSVEYTGGSCNVSDYGSVQIGDQVWMAKNWGCYAPGSKCYDNDPANCIKYGRLYDWATAMNIDKRYNYEEWGGSDVNHQGICPSGWHLSRDREWDDLGTHVAGYYSLGARYLKSQSGWDGEDTYGFAALPGGYSYSDDRFNYVGDRGGWWSASENFSNFAGFRQMLSNYEYVDNRGGVGIDKDYLFSVRCVKD

SEQ ID NO: 27927 - DNA, 732 bp, Unknown
  Obtained from environmental sample
  misc_feature (1)..(732): n is a, c, g, or t
atgttagtccatgatatagtaaaacccgatgccttgtataaaaattgccggctttgcccgcgcagttgcggtgttgaccgccttgcgggttcccgtgggtattgcggggaggattcccggctcaggcttgcgttcgcggggcttcattctggcgaggaaccgccattgagcggaagcagcggctccggcacgatctttgtttcaggctgtaatctgggctgcggtttttgccagaaccggcaaatttcaagccctcatatggctgaacatttaggccgtgttgtttccatcgaggaattcgccgctatctgccttgagctgcaaaaaagaaacgcccaaaatattaatatcgttacaggcagccacgcggttccggccattgtccaggggcttgacgccgctgtatccgcgggtctgcgtgttccggcgctttggaattcatcgggctatgaaagcattgaaacacttgagcttcttggagacaggatcaaaacatatctccccgatctaaaaaccctggatacaaaactggccggcaaattcttaaacgctcaggattatccccaggctgccgtaagggcgattcaatggatgatgaaaacangcccggcgatgtcattatccgccacctttattttcccgggtatcttgaatcgacccgttcgtgctgcgctgtttgccgagaacgccgcggtaaagcgcagcttcactgatgagccgtacacgcaataa

SEQ ID NO: 27928 - protein, 243 aa, Unknown
  Obtained from environmental sample
  DOMAIN (64)...(227): Radical SAM superfamily
  misc_feature (1)..(243): Xaa is any amino acid
MLVHDIVKPDALYKNCRLCPRSCGVDRLAGSRGYCGEDSRLRLAFAGLHSGEEPPLSGSSGSGTIFVSGCNLGCGFCQNRQISSPHMAEHLGRVVSIEEFAAICLELQKRNAQNINIVTGSHAVPAIVQGLDAAVSAGLRVPALWNSSGYESIETLELLGDRIKTYLPDLKTLDTKLAGKFLNAQDYPQAAVRAIQWMMKTXPAMSLSATFIFPGILNRPVRAALFAENAAVKRSFTDEPYTQ

SEQ ID NO: 27929 - DNA, 840 bp, Unknown
  Obtained from environmental sample
  misc_feature (1)..(840): n is a, c, g, or t
atggctaacgattactttaagcgtgtgcatgacttaacggcgactcgttactggataaacaaccccacccgtgcgcaggcgaaaacggcgatggactgtggcgctgtaggttgtacgctcaacccttcgtacatgtccaaagttatcgaagaaccggatgaaaaagatttcgtgtatgaaaaaatccgtgagctcattaagacggaaaaggacgatacagccgtcgccgaaaaacttcaaacgtttcttgtcaccaatatcgcaaaaatgtttatgccggtttatgaagcgacaggcggttatcagggccgggtgagcattcagggcgaccccttcaacgaaaaggccgatcacataatcgcgtacggccgccataacgcggcactgtcgccgaacatcatcccgaaaattcccgtggttcccgagggccttaaggcgatagccgtgctgcttaaggaaggcatctcgattaactccaccgagattttcgcgatgcagcaatttatcgatgtggccgaagtgtacaagactgcaaccgccggcatgaaaaacccgccgactttgttttattcgcacatcatcgggatattcgatgaatatatcgagaactatgtgcgggataacaaggttgatattttacccgatattatctggcaggcgggaatggccgtcgcgaaaaaaatggaacagatccgcattgagcgcggttataaagtacggatgatttcaggcggcgcgcgcggacttcaacactttaccgaaatggtcggcgcggaaaccaacatcaccattaactggggcggcgcgtcagacaaactcctggaacctcggccgatctga

SEQ ID NO: 27930 - protein, 279 aa, Unknown
  Obtained from environmental sample
  DOMAIN (16)...(277): Transaldolase
  misc_feature (1)..(279): Xaa is any amino acid
MANDYFKRVHDLTATRYWINNPTRAQAKTAMDCGAVGCTLNPSYMSKVIEEPDEKDFVYEKIRELIKTEKDDTAVAEKLQTFLVTNIAKMFMPVYEATGGYQGRVSIQGDPFNEKADHIIAYGRHNAALSPNIIPKIPVVPEGLKAIAVLLKEGISINSTEIFAMQQFIDVAEVYKTATAGMKNPPTLFYSHIIGIFDEYIENYVRDNKVDILPDIIWQAGMAVAKKMEQIRIERGYKVRMISGGARGLQHFTEMVGAETNITINWGGASDKLLEPRPI

SEQ ID NO: 27931 - DNA, 885 bp, Unknown
  Obtained from environmental sample
  misc_feature (1)..(885): n is a, c, g, or t
ttgcacaaggccgtcaaaggggattgcgttcttaccgttttgctggggccgttacgaaaaaataacccttcagatcggaaacaactggaacaagcaggcattaccgtaatagagggagcttttccatctacggaaaattcgcaaagccctgtttttgatttgcaggaacatcttgcggattatgatctgattgtcacccattttgggcttaccgctttcgagtctctccatgccagggttccggtactgcttatcaatcccggagactaccacgaaaagctttcccgtcacgcgggatttgtttctttgggtacaggaaaatccgcccttataaagctgcatggtacggcggatttttccggaatgtaccggcgaagcgccgaacaaagtgaaaaaacggccaagcggtggggtttggaagaaacatcgggcggactggcagagatgcttttaaaggcaatgcctgttgttcactataactgccccctttgcggagcgtctgcgggacagaaaagccaccggtttcccggcagaacctaccgtctctgttcctgcggcacggttggtatggacaggcttagtccaccccaggtggagtataaccgggattatttttttgctgattatcaaaaacagtacggaaaaacgtatctggaagattttccccagttacagaagaccggggagacaaggcttcgccgtatcagcgcttcgcttggcgtgcaacgcaacacggatactgcccggaaaaaagtgagcctgctggatattggctgcgcttacgggcctttcttggccgctgcccgggaacagggttttgaggtcatggggatcgaccctgttcccgatgcggttgactatgttaaaaatacattgggggattaa

SEQ ID NO: 27932 - protein, 294 aa, Unknown
  Obtained from environmental sample
  misc_feature (1)..(294): Xaa is any amino acid
MHKAVKGDCVLTVLLGPLRKNNPSDRKQLEQAGITVIEGAFPSTENSQSPVFDLQEHLADYDLIVTHFGLTAFESLHARVPVLLINPGDYHEKLSRHAGFVSLGTGKSALIKLHGTADFSGMYRRSAEQSEKTAKRWGLEETSGGLAEMLLKAMPVVHYNCPLCGASAGQKSHRFPGRTYRLCSCGTVGMDRLSPPQVEYNRDYFFADYQKQYGKTYLEDFPQLQKTGETRLRRISASLGVQRNTDTARKKVSLLDIGCAYGPFLAAAREQGFEVMGIDPVPDAVDYVKNTLGD

SEQ ID NO: 27933 - DNA, 615 bp, Unknown
  Obtained from environmental sample
  misc_feature (1)..(615): n is a, c, g, or t
ttgccgggagaaacgcctccggtggtttttgcgacagcggtctctggcttcctgtttgagctgggcctgcctgagcaggtttcgtttacaattgtttctttggcggtttcatcttttgtattaaccacattggacacagtagcccgtttgggccgcctttcgttccaggaactgttttccatagaagaaggcggaaaagacaccggtaatttgatatttagcgctttaaaaagcaaaatctcttcttcagtttttacccttattcctgcttttctccttgcaattatgggctaccagacaatctgggcgctttttggtgcggcaaaccagcttttggccgcattaacccttattgcctgcacgatgttttttaagaaaaccaagaggaaaagtatcttactgctaatacctacaatcataatgctggtggttacatttacttctctggttctgtccattaaagatagggtagttttgattcaaaatggcagccaaaacatttcggtgctgggtatgcaaataggcatcgccgcgctgcttttggttttgggaattttggtagctatttcctgtacagcaaaacttttagaaaagagccccacagtcaaacaatga

SEQ ID NO: 27934 - protein, 204 aa, Unknown
  Obtained from environmental sample
  misc_feature (1)..(204): Xaa is any amino acid
MPGETPPVVFATAVSGFLFELGLPEQVSFTIVSLAVSSFVLTTLDTVARLGRLSFQELFSIEEGGKDTGNLIFSALKSKISSSVFTLIPAFLLAIMGYQTIWALFGAANQLLAALTLIACTMFFKKTKRKSILLLIPTIIMLVVTFTSLVLSIKDRVVLIQNGSQNISVLGMQIGIAALLLVLGILVAISCTAKLLEKSPTVKQ

SEQ ID NO: 27935 - DNA, 588 bp, Unknown
  Obtained from environmental sample
  misc_feature (1)..(588): n is a, c, g, or t
atgtctgctgacattttttccggcatcctgctttccctggcgcccggcgcgcttctggcgaacgccgtcggcgtggcgctgggcatcattttcggcgcgctgccgggcctgacggcgaccatgggcgttgcccttttcctccccttcaccttcggcatggatcccataggcgcctttgccttgctgctcggcatctactgcggcggcatttacggcggttccatcacggcgattctcatccgcacgccgggcacgccggcggcggcggcaacggttcttgacggctatcccctggcccagcagggacaggctttcggcgcgttgtccgcagcgaccattgcctctttcctcgggggtatcttcagttgtgtggtcctgattctgcttgccccgcaactggccagggttgccctggaattcgggccgccggaatatttcgccgtggggcttttcggcctgtccattgtcgcgagcctttcatccgacaacttgttgaaagggatgctggccgccatgttcggtctgatgctcgccactatcggcatggaccccatcaccgggctcacccgctataccttcggcaggtga

SEQ ID NO: 27936 - protein, 195 aa, Unknown
  Obtained from environmental sample
  SIGNAL (1)...(22)
  DOMAIN (17)...(195): Integral membrane protein DUF112
  misc_feature (1)..(195): Xaa is any amino acid
MSADIFSGILLSLAPGALLANAVGVALGIIFGALPGLTATMGVALFLPFTFGMDPIGAFALLLGIYCGGIYGGSITAILIRTPGTPAAAATVLDGYPLAQQGQAFGALSAATIASFLGGIFSCVVLILLAPQLARVALEFGPPEYFAVGLFGLSIVASLSSDNLLKGMLAAMFGLMLATIGMDPITGLTRYTFGR

SEQ ID NO: 27937 - DNA, 738 bp, Unknown
  Obtained from environmental sample
  misc_feature (1)..(738): n is a, c, g, or t
atggaaatgtcgattacaaccgcatacgagattaacaggcttatgtcacgttacggcgtgaagtttggaatctacaagaacggagagttcattgaacaactctttccctacgatgccataccacgcatcatttcgcatgccgaatacttgttgttaaacaatgggcttatccagcgggtggacgcgctgaactgctttttacgggacatctactctgacgcgaagattatcgcggaaaaggttgtgccggaagaatttgtctatatctccaaaggttacctgccgcaatgttcggggattgtcccgccggagggcgtgtacagccacatttcagggatcgatcttgtacaggcgaaggacggcgcgtggtacatactggaagacaaccttcgcataccgtcgggcgcgtcctatccgctgatggcccgggaactgagccggatcgccgacccggacgcttattcgaataacaacattgtggacacccgcaactactcggacttgctgcgcgagactatggaatttatgaactgcggcgggttaaacgtcatcctcacgccgggcagatacaacgccgcgtacttcgagcactcgtacctcgccgaacgcaccggagcgctgcttgtcaaggcgtcggaattgtccgtagaagacgcggttctgtacatgaatgattacctcggtgtcaaggcgaaagtcggcgcggtgtaccgctcgcatttccgacgagtaccttga

SEQ ID NO: 27938 - protein, 245 aa, Unknown
  Obtained from environmental sample
  DOMAIN (4)...(244): Domain of unknown function (DUF404)
  misc_feature (1)..(245): Xaa is any amino acid
MEMSITTAYEINRLMSRYGVKFGIYKNGEFIEQLFPYDAIPRIISHAEYLLLNNGLIQRVDALNCFLRDIYSDAKIIAEKVVPEEFVYISKGYLPQCSGIVPPEGVYSHISGIDLVQAKDGAWYILEDNLRIPSGASYPLMARELSRIADPDAYSNNNIVDTRNYSDLLRETMEFMNCGGLNVILTPGRYNAAYFEHSYLAERTGALLVKASELSVEDAVLYMNDYLGVKAKVGAVYRSHFRRVP

SEQ ID NO: 27939 - DNA, 1506 bp, Unknown
  Obtained from environmental sample
  misc_feature (1)..(1506): n is a, c, g, or t
atggccaacgacgtgcgccacagtgggcgcgacaaaaagtgggaagagctgtccgggcttttgcaggacgacccactgatggccccaggcggccatagggaaaaattgatcatattcaccgagcacagagacaccctgcactatctgactgacaaaataagatccatcctgctaaacaaaggcgcggttgtggccatgcacggcggcatgagcagggccgaaaggcgcgaagccgaagagtctttcaagcaggacaaagaagtgctggtgctggtggccaccgacgccgccggcgagggcatcaacctgcaaagggcccacctgatggtcaactacgacctgccctggaaccccaataggctagagcagcgctttggcaggatccaccgcattggccagaaagaggtttgccacctgtggaacctagtggcccaccaaacccgcgagggcatggtgttccagcggctgtttgaaaaattggagaacgtgcgcgaagccctgcagggcaaggtttatgacgtgctaggcaaagtgacctttggcaataggccattgcgcgagctgctgatagacgccatacgctatggcaacgaccccaaaaggagggaagagcttaaccaattggttgacagctccctagacatagacgagatacagcgcctgctggacgagcgctcccttaccaacgacgcaatggacgcaagccaggttcgcgccatccgcgaggagatggaaaggctggaggcccgcaagctgcagcccaatttcatagagtctttctttatagaggccctttcaacggccggcggcaaaattcgcccccgcgaaaacgggcgctttgaaataacccatgtgccatcttccattaggggccagcacgtccaagatgggctgcccggcccagtgttgcagcgttacgagcgcgtatgcttcgacaagcgcttttgcgccccgaccgggcaggtcccggccgcgctcttggcccctggccacccgctgctggaggccaccatagcccttgtccgcgaaagaaacaacgacctgctgaagcgcgggggcatatttattgacgaccgcgaccttggccaagacgccaggctgctgttttatatagaggccgtagtccaggatggtggcacggcccagaatggcggcaggcgcgtaatatccaggcgcgtccactttgtagagatatcgcaaagcggcgcggcccaaaacgctggatacgcgccctaccttgactaccgcccagccgagggcgacgaacaggccgccgtgcagtcctatttggcaagccaggcctggcttgcttctggcgtagaagacatggcgctgaattacgccatatcccagatagtccccgcccacctttcggaagtgcgccaaaaaaaactggcgctcatagaaaaaaccgccaaagccgtccaagagaggctcagcgcagaaagcgagcactggcacctgcgcgccgccgagctaaagctcggccgatctgatcattgttaa

SEQ ID NO: 27940 - protein, 501 aa, Unknown
  Obtained from environmental sample
  DOMAIN (56)...(132): Helicase conserved C-terminal domain
  misc_feature (1)..(501): Xaa is any amino acid
MANDVRHSGRDKKWEELSGLLQDDPLMAPGGHREKLIIFTEHRDTLHYLTDKIRSILLNKGAVVAMHGGMSRAERREAEESFKQDKEVLVLVATDAAGEGINLQRAHLMVNYDLPWNPNRLEQRFGRIHRIGQKEVCHLWNLVAHQTREGMVFQRLFEKLENVREALQGKVYDVLGKVTFGNRPLRELLIDAIRYGNDPKRREELNQLVDSSLDIDEIQRLLDERSLTNDAMDASQVRAIREEMERLEARKLQPNFIESFFIEALSTAGGKIRPRENGRFEITHVPSSIRGQHVQDGLPGPVLQRYERVCFDKRFCAPTGQVPAALLAPGHPLLEATIALVRERNNDLLKRGGIFIDDRDLGQDARLLFYIEAVVQDGGTAQNGGRRVISRRVHFVEISQSGAAQNAGYAPYLDYRPAEGDEQAAVQSYLASQAWLASGVEDMALNYAISQIVPAHLSEVRQKKLALIEKTAKAVQERLSAESEHWHLRAAELKLGRSDHC

SEQ ID NO: 27941 - DNA, 696 bp, Unknown
  Obtained from environmental sample
  misc_feature (1)..(696): n is a, c, g, or t
gtggttgacgaggacggcgcttcggtatactcggcaagcgacattgcccgcgaggaattccccgatcttgacctcaccatcagaggggctatttccataggacggcgtttacaggatccgctcgcggaactggtaaaaatcgatcccaagtccattggcgtagggctttaccagcacgatgtaaaccagaaaaaactatccgatacactggacgaggttgtctcatcggtggtaaacaatgtcggcgtcaaccttaacaccgcaagcgcctcgcttttaaaatacgtctcggggatcaacggctcgctcgcgagaaaaatcgtcaaataccgtgatgagaaaggtcgtatctgcagcagggcggaacttacatcggttcccggcatggggccgaaaagttttgagcagtgtgccggtttcctgaaaatccccgaaagcgccgagcctctggacaatacctgggttcaccctgaaaattacccggttgctcgggagatacgcaatgcaataaacggcggaggaacctctacagccaccgcaggccttggctccaataccgtaacaacgctcaaagaaaaatacagcgtaggggaaaccaccatccgggacattgccgaagagctgaaaaaaccgaaccgcgatccccgcgaaagctacccaaagcccattatgagaaaagagcgtggtgacatttga

SEQ ID NO: 27942 - protein, 231 aa, Unknown
  Obtained from environmental sample
  misc_feature (1)..(231): Xaa is any amino acid
MVDEDGASVYSASDIAREEFPDLDLTIRGAISIGRRLQDPLAELVKIDPKSIGVGLYQHDVNQKKLSDTLDEVVSSVVNNVGVNLNTASASLLKYVSGINGSLARKIVKYRDEKGRICSRAELTSVPGMGPKSFEQCAGFLKIPESAEPLDNTWVHPENYPVAREIRNAINGGGTSTATAGLGSNTVTTLKEKYSVGETTIRDIAEELKKPNRDPRESYPKPIMRKERGDI

SEQ ID NO: 27943 - DNA, 882 bp, Unknown
  Obtained from environmental sample
  misc_feature (1)..(882): n is a, c, g, or t
atgccgatggagtctcccgccgcgcctgtaatcgacaggggaagcgtggacaccccgcttcaaacaggctgcctctccatagacgcgatgatccccataggacgcggacagcgcgaattgataatcggcgaccgacagaccggaaaaacggcaatcgccattgacactataatcaaccagaaagggaaggacgttatctgcatatactgcgccatcgggcagaaagcgtcttcgatagtggcgattgtcaacaatcttgaaaaacacggcgcgatggactacacatttgtcgtgctggcggccgcttcagattcggctgcccttcagtatatcgcgccctattcggcggtagccatggcggaatattttttacgccagaaaaaagacgtgcttgtagtttacgacgatctttcaaagcacgcggtcgcctaccgcgcggtgagcctgcttctgcggcgcccgcccggacgcgaggcttttcccggcgacgtgttctaccttcattcgcggctcttggaacgcgccgtaaaactttcgccggggaaaggcggcggatcaatcaccgcgatgccgatcatcgagacgcaggcaggggacatttcggcatacattcccaccaacgtaatctcgattacagacgggcagatattcctggattctgaattgttcaattcgggtttccgccccgccatagacgtggggctttccgtaagccgcgtcggcggttcggcgcagacaaaggcgatgcgaaaaatctcgggccgcatcagactggaccttgcccagtaccgcgaaatggcggccttcgcccagttcggcagcgatttggataaggccacccgggaaaagctcgcgcagggcgaaaggcttatgaagttttaa

SEQ ID NO: 27944 - protein, 293 aa, Unknown
  Obtained from environmental sample
  DOMAIN (22)...(238): ATP synthase alpha/beta family, nucleotide-binding domain
  misc_feature (1)..(293): Xaa is any amino acid
MPMESPAAPVIDRGSVDTPLQTGCLSIDAMIPIGRGQRELIIGDRQTGKTAIAIDTIINQKGKDVICIYCAIGQKASSIVAIVNNLEKHGAMDYTFVVLAAASDSAALQYIAPYSAVAMAEYFLRQKKDVLVVYDDLSKHAVAYRAVSLLLRRPPGREAFPGDVFYLHSRLLERAVKLSPGKGGGSITAMPIIETQAGDISAYIPTNVISITDGQIFLDSELFNSGFRPAIDVGLSVSRVGGSAQTKAMRKISGRIRLDLAQYREMAAFAQFGSDLDKATREKLAQGERLMKF

SEQ ID NO: 27945 - DNA, 1053 bp, Unknown
  Obtained from environmental sample
  misc_feature (1)..(1053): n is a, c, g, or t
atgatcttcggtttgggcgtgagcacctacagcggcgcctcgggccaagcattagccgcgttcagcgacatcatgggcgaccaccgcgtcacactagccggcgacctccagatagacatatccgattacgcgcaactcttcgcttcctacgaatacctcaagcaccgcgtcaacattatggtcggaggcttctacaacaaatactacagctacgactggctggcaggcaacatctaccacgaccttgagacgggcggcatactggggttcagctacccattctcaatattctcgcgagcagacctagagtttttcggccgctacatcaagcgcgagccgttcataggcgacacggcggccgcggcgatagagtccaacgcgctcatgacaagcgtcggctactcgtttgacaacatcctctggggtataacgggcccgctcaccggcttacgcgcctccgtctccgcgcagatcgcccccccgctgccgttcactaacgaggcgtacctatccggcgacatagacgtacgccactacacgcacatactgggacgctacgtttgggctaaccggttgctgctgggcgcgagcgtcggcataggcgacagcgccaaaaccgcgagaaaatacttcttaggcggcaacgagaattggttcaactacggcgtcaacgcggaaaactacgaccaaaatttggactacagttactactcaagcctaatctcacctctgcgcgggtggaattacttcgacataacaggcagcaaggtaatgctcttgaactcggaattccgtttccccttcatacgcgaggtgacgactgtgtggccgatcccgctgcaaatcaagtacatcaacggcgcactgttcatagacgccggatacgcgtggacgggcgaaacgctcccgccggatatcgtaggcgggtacgggttcggtatgcgggcgaatttgggaatttttgttctgcgttatgatagaggctgggctactgattttaagggcctgtcaagaaagcctattaattatttctcactaggcgcggaattctaa

SEQ ID NO: 27946 - protein, 350 aa, Unknown
  Obtained from environmental sample
  SIGNAL (1)...(19)
  DOMAIN (45)...(350): Surface antigen
  misc_feature (1)..(350): Xaa is any amino acid
MIFGLGVSTYSGASGQALAAFSDIMGDHRVTLAGDLQIDISDYAQLFASYEYLKHRVNIMVGGFYNKYYSYDWLAGNIYHDLETGGILGFSYPFSIFSRADLEFFGRYIKREPFIGDTAAAAIESNALMTSVGYSFDNILWGITGPLTGLRASVSAQIAPPLPFTNEAYLSGDIDVRHYTHILGRYVWANRLLLGASVGIGDSAKTARKYFLGGNENWFNYGVNAENYDQNLDYSYYSSLISPLRGWNYFDITGSKVMLLNSEFRFPFIREVTTVWPIPLQIKYINGALFIDAGYAWTGETLPPDIVGGYGFGMRANLGIFVLRYDRGWATDFKGLSRKPINYFSLGAEF

SEQ ID NO: 27947 - DNA, 1068 bp, Unknown
  Obtained from environmental sample
  misc_feature (1)..(1068): n is a, c, g, or t
atggtgttgggaagcggtggccaagattttggccttcgttctctcaaaggaagagggatgaaaaaggtactagttacggatctcaaggaaggcgttgttttttcccagccggtttacattgacggacaaaacatccttgtacccgccggagtagcggtaagaaaaaaggatattgccaggctccattcatggggcatagaggcggtggaaaccgatggggaacctgttgttcccagcccgaaagccaaaaaagctccggatgcaggcgattccaaaactcaggagccggcgaaaaaagatacggcggggaaagcgtctgatcacaagaaaaaagcagccagcatgatttcacttcctgaggttcaggaaaattcgggggcttaccgcaattacataaacttaattgaacgcatggatgaagtctgcaaaaacatcgcggacggcatcaccatggaggcgcggtctatagataacatatcaggaaggcttctgcagtctgtccgggaagagagaaattcattcataggttatatcctgggcggagaaataaaaggccatgaaatggcaaaatctcaggttaatactgccattttatcggctatgatagcccttgaaatgaaaatacagaatcacaaggtcttacagatagtaaccggcgcgctgctccacgatgtgggaatgttgagaatgccaaaggaaattgttgagaaaagaggcggcctttcagaatctgagcttcagcgcatacagtcccacaccctttacgcgtacaaaatagtgaacaaagaactcctttacccggaagaagtggggcttatcgtccttcagcatcacgagcgctgggacggcgaggggtatcccaggcgtctttcangaacggcaattgatatcggcgctaggatcgtctctgtcgccgacgcttttgaggccatggtcagcaagaaaccctaccgcaattccatgatgggctaccaggccatgaaaaaccttctttccgataacttgagacgctttgacccggatgtgaataaagcctttatccaagacatgggggatttaccccgatag

SEQ ID NO: 27948 - protein, 355 aa, Unknown
  Obtained from environmental sample
  DOMAIN (188)...(311): HD domain
  misc_feature (1)..(355): Xaa is any amino acid
MVLGSGGQDFGLRSLKGRGMKKVLVTDLKEGVVFSQPVYIDGQNILVPAGVAVRKKDIARLHSWGIEAVETDGEPVVPSPKAKKAPDAGDSKTQEPAKKDTAGKASDHKKKAASMISLPEVQENSGAYRNYINLIERMDEVCKNIADGITMEARSIDNISGRLLQSVREERNSFIGYILGGEIKGHEMAKSQVNTAILSAMIALEMKIQNHKVLQIVTGALLHDVGMLRMPKEIVEKRGGLSESELQRIQSHTLYAYKIVNKELLYPEEVGLIVLQHHERWDGEGYPRRLSXTAIDIGARIVSVADAFEAMVSKKPYRNSMMGYQAMKNLLSDNLRRFDPDVNKAFIQDMGDLPR

SEQ ID NO: 27949 - DNA, 1731 bp, Unknown
  Obtained from environmental sample
  misc_feature (1)..(1731): n is a, c, g, or t
atgaatctggataccctggggaacgcctcatcgctggcggctttgtccgccatgctgcttaaaaaaatacttcttccgctggtaatcgtgtcattgatagtgatttttatgttaatccgctgcggtttctggtttttgtatgttatgcgtcataacaaacgcgcccgggccgtctgcctctggaaacacgcgcgccgcaggctggggcttgccggtttgggttatcccggagtaaagagcgggatatctgaatccgggtgggcgtcgggtattgacgccatggttaaaggctcctacgcgctgtaccttggatatgcggcagcccgtttcgcgcccgaatatgacgacggcgcttttgcttccatgcaggataactaccgcctgttctccgtctggtacgggaaggttcccctgtggcgcaggctgctggcgtggatctttccgccccttgcccttgcgcttaaaaagacaaattccgttaaccatatttcaaagaaacttgtttcccttttgtttttggttttcctccttgtaagcgtggacggcagggcgcagtcggacagggatctgtccgatgacgcgccatccgcggatgacgcgccatcttcggatggcgggcagtattttgacgatgaatattttaccgaagctgacgagttgtttaacaaagccgccgagtcagaatactccgaatattgggaaagggctattgatctgtacagggaaggcagggatagattccccgaagacgcgcgtttccccctggctcttggcaaccttttcttcaaccgttcgctttacagccttgcctgggacgaatacaggatcgcggaacagttgatgccttacgagccatatatactgcaaaggctggcgcatacggcgggcttcctgaacctcgataaaatttcagtgacatacctggaaaaactgctcctgattgatcctgacaatatggaagcgatcagctacctgggatggatgtattacaaggtgcaccgtcttgacgacggcgagaggctgataagcgaggcgcttgagcgttttggcgatgacgcggatctggccatgacacttggaactatctattcggatatgtaccggtatgacgaggggaaatactggtatcaaaaagctatagagcttggcgtgggggcccgcagtttcaccgccgtggcgcattacaatctttcgattctggaatcgcgcttttatctttacgctctttctatggatgaggccaacgcgtctatcgacgcgcagaaccgcgcgtcgggccttctcgcgaggggggaactccgcatgcgccggcttgatctggaagaagccctctcggatttccagacggcacgtgagattgaccggtcgccgctcgcgaaggtcaatcttgcccaggcttatcaaatttcgggccggctggaagaagcccgcctgtacgcacttgactgcctgaaaaccggcgaccagtcctggatggcgtattacggaatagaccccgtccgttacaagcgtgatcttcacgagattctctacaagacatattcagggcttgcgaaggcggagaagtttcagccctggggaactgttggaggcgttatacgatcaactgtcaaattgttatcataccggttttattacgccgtccatcataaactttaccaaaaatacagcctggcgtcgggcgacgcctacgacatccgcgaggccaacggccacccgcctcggcgataa

SEQ ID NO: 27950 - protein, 576 aa, Unknown
  Obtained from environmental sample
  misc_feature (1)..(576): Xaa is any amino acid
MNLDTLGNASSLAALSAMLLKKILLPLVIVSLIVIFMLIRCGFWFLYVMRHNKRARAVCLWKHARRRLGLAGLGYPGVKSGISESGWASGIDAMVKGSYALYLGYAAARFAPEYDDGAFASMQDNYRLFSVWYGKVPLWRRLLAWIFPPLALALKKTNSVNHISKKLVSLLFLVFLLVSVDGRAQSDRDLSDDAPSADDAPSSDGGQYFDDEYFTEADELFNKAAESEYSEYWERAIDLYREGRDRFPEDARFPLALGNLFFNRSLYSLAWDEYRIAEQLMPYEPYILQRLAHTAGFLNLDKISVTYLEKLLLIDPDNMEAISYLGWMYYKVHRLDDGERLISEALERFGDDADLAMTLGTIYSDMYRYDEGKYWYQKAIELGVGARSFTAVAHYNLSILESRFYLYALSMDEANASIDAQNRASGLLARGELRMRRLDLEEALSDFQTAREIDRSPLAKVNLAQAYQISGRLEEARLYALDCLKTGDQSWMAYYGIDPVRYKRDLHEILYKTYSGLAKAEKFQPWGTVGGVIRSTVKLLSYRFYYAVHHKLYQKYSLASGDAYDIREANGHPPRR

SEQ ID NO: 27951 - DNA, 504 bp, Unknown
  Obtained from environmental sample
  misc_feature (1)..(504): n is a, c, g, or t
atgaaacgtagaaattatatgaacgtactgtggattttaatagcgggtatatctttgtttattggctgtaaaaaaaaggagggaggtaatacggacgatcccgattatcccatagatatttctatattttcaacatcgacaatgcgacaacctccttccgataataaaatctacaaatggataaaagagaaatataacgttacttttacatgggatattctggtaggccaacgggatcaaaagattggggttatgattgcgggggaagattatcctgacttactcctgttagataaaagattccttgaagctaaagcgcttattccccttgaagacctgattgagaaatacgccccgcgcttaagacggcactatgatggaatctgggagaaactcaaagaagatgacggccatatttataatatgcctatttggggtgtgacctatggaaaggatcaaggtatatggtacggggatgccgcccttttatctcggccaatctga

SEQ ID NO: 27952 - protein, 167 aa, Unknown
  Obtained from environmental sample
  misc_feature (1)..(167): Xaa is any amino acid
MKRRNYMNVLWILIAGISLFIGCKKKEGGNTDDPDYPIDISIFSTSTMRQPPSDNKIYKWIKEKYNVTFTWDILVGQRDQKIGVMIAGEDYPDLLLLDKRFLEAKALIPLEDLIEKYAPRLRRHYDGIWEKLKEDDGHIYNMPIWGVTYGKDQGIWYGDAALLSRPI

SEQ ID NO: 27953 - DNA, 1023 bp, Unknown
  Obtained from environmental sample
  misc_feature (1)..(1023): n is a, c, g, or t
ttgcgccagcttctggaaaaagcccacggcaaacttgacggctcaagaaccctgcttaaagcaaaaagccaggagcgcgtcagtctggaaacatccttaaagacctacctggaagtagtaatggagcattttcccttgagcgatttccaggatgcgtttacgtgttacaacgattcccagaaaaagagttttaacgagattcaggaaataatcaggaacatgttgaaaaacgaccgtgaactcgccacattaataaaggattactaccaggcgcaggaagacgtagaagtcctgcgcgacaagcaggacgaagatgacgacgagggaaaggtgctggatcttcaggctttaaataccgagtttgacactatacggcaatctgtcaaaatgaccgtcggcagacaggggaaccatttcccaattctgacaagcgaatattttcgctgcggccctaatgatgtcgcttttcgggaaaacgtcataactatgttagccaagattgaaagcatagacaaggaagcgttctgccgtgtatataaaaacaaacttaaccgcattatcccatacgttgtgctgctcccctgttacggcgatacgggcgtttgctgggagccttttaacaagcacaacagggcgacaagcagggggcgcatttttgtccccatgtacccccacaatctctatatcgcggttctgagcgccgtcgccgatctacgctggcaggtcgctaaagaaaaggcatccttctactggatggaagaaggtctcaccggcaattactaccagtggttccaaggccagaaactgaaaggcgacataaaagaatattttattcaggactatataatgtggatgaccaaagaatcggaaggcatacaaaaactcgaaaaggaagtccggggaaccttctggcgctttatgcccttctcaaaggaaatcaaagaaaaactcaaaaaccgcaaccttatataccaggaactttaccagcgggacgtaaaccgctctatgtcagatggatattga

SEQ ID NO: 27954 - protein, 340 aa, Unknown
  Obtained from environmental sample
  misc_feature (1)..(340): Xaa is any amino acid
MRQLLEKAHGKLDGSRTLLKAKSQERVSLETSLKTYLEVVMEHFPLSDFQDAFTCYNDSQKKSFNEIQEIIRNMLKNDRELATLIKDYYQAQEDVEVLRDKQDEDDDEGKVLDLQALNTEFDTIRQSVKMTVGRQGNHFPILTSEYFRCGPNDVAFRENVITMLAKIESIDKEAFCRVYKNKLNRIIPYVVLLPCYGDTGVCWEPFNKHNRATSRGRIFVPMYPHNLYIAVLSAVADLRWQVAKEKASFYWMEEGLTGNYYQWFQGQKLKGDIKEYFIQDYIMWMTKESEGIQKLEKEVRGTFWRFMPFSKEIKEKLKNRNLIYQELYQRDVNRSMSDGY

SEQ ID NO: 27955 - DNA, 1143 bp, Unknown
  Obtained from environmental sample
  misc_feature (1)..(1143): n is a, c, g, or t
ttgtttccacggcgttttcccctgtatgcaaggcttgttgccgcacagccgctgaaacctcttgaaattgcagcttctgattttgccgcctggagttttggcggcgagcctaccgcgtcatggcagatacccatggccctttcggaaggggtttaccgcgccggttccgcttccgtaaacgcgggaggaatactggcggccgcggcccgttttgccgtaacccgcgccggccttcgcgatcttgtccgcgcggaagttttttcagctaacggcggcaacgccgcgtcgcccctcagccttatacgctctgtttctgatattgcctcttttcttgacagtaattccaacaccgccatgtggctcgcggataccctgccgcaggaacccgctgctctgcttgtttcctcttcctggtatcaaaaccagcttgccggacacgccgggatgattgatcaggaagaacttccgatccctcaggcggaaccggttatggaaccgcctttcccgcagatacgggtggcgggccttatgttcaccggcataaatggggggagtctcacgcaggcggaaccgtttctccatctcgtgccgatagaaccttttatgatatgctccacggtgattccctcgccggcttttgcggattttcttgacgcgaacccccaatggagccctgatcaaaaggaaacgttagaaagccgggggctggtaacagacgaatacctggccgactttgaacaggggacgggcagggtgattaccggcgtcagcgcggtatcatggtacgcagcgcgcgcctattgcgaatggcttggaacaaaactccccgattcgctttccggctacacagtaaggctgcctacggaagcggaatgggaatacgcggtaaaatcaagggaaaaggatcggcttgtcaggggaagcgcgtgggagtggtgcggggatccctattcgcatcttcctttcatttccgcgccgcccgaggcgataatcgccgtcggttcgcccgaatacccgttacgcggcggttccctgctgaacgctgtcacgccgggcaatcctgaaacaagggcgtccctgccgcctgaaagctgctcgccttttgtttccttccgccccgtgattgcccgtaaaggccgataa

SEQ ID NO: 27956 - protein, 380 aa, Unknown
  Obtained from environmental sample
  DOMAIN (172)...(375): Domain of unknown function (DUF323)
  misc_feature (1)..(380): Xaa is any amino acid
MFPRRFPLYARLVAAQPLKPLEIAASDFAAWSFGGEPTASWQIPMALSEGVYRAGSASVNAGGILAAAARFAVTRAGLRDLVRAEVFSANGGNAASPLSLIRSVSDIASFLDSNSNTAMWLADTLPQEPAALLVSSSWYQNQLAGHAGMIDQEELPIPQAEPVMEPPFPQIRVAGLMFTGINGGSLTQAEPFLHLVPIEPFMICSTVIPSPAFADFLDANPQWSPDQKETLESRGLVTDEYLADFEQGTGRVITGVSAVSWYAARAYCEWLGTKLPDSLSGYTVRLPTEAEWEYAVKSREKDRLVRGSAWEWCGDPYSHLPFISAPPEAIIAVGSPEYPLRGGSLLNAVTPGNPETRASLPPESCSPFVSFRPVIARKGR

SEQ ID NO: 27957 - DNA, 561 bp, Unknown
  Obtained from environmental sample
  misc_feature (1)..(561): n is a, c, g, or t
ttggcggcatttgtaacttatggctcagatcccggcggtacgcaggcggaactaagcaggatattaaaaaataaaaagatagactctctttactttggcaaaattcccgcaatggaaaattatattcctttctttggcccacccaatgataaaaaaatcgcaaaacgaaccgccatgcaggaagaagcgagtgaaaaggcggcacgttatgtgatggaaaggaaaacaaacaaaattaatacattccgtccgctgtccgcctttatttcatttcttttctcgcttggagtaaaaatattttacaaacattacaaggtaagcgataaatgtaacggatgcggcgtttgcgaaaaagtctgccctgtagccggaattgaaatgaaaaaaaaacgccctgtattcagcgataaatgtgaaaattgctccgcctgtatcaacatctgcccgttacgcgccattcagtttggacgcgctaaatttggcgcgaggggatattgccatccggggatcagtattaaggagcttggaagggtaccacttttcacttctaggaaggaataa

SEQ ID NO: 27958 - protein, 186 aa, Unknown
  Obtained from environmental sample
  DOMAIN (131)...(154): 4Fe-4S binding domain
  misc_feature (1)..(186): Xaa is any amino acid
MAAFVTYGSDPGGTQAELSRILKNKKIDSLYFGKIPAMENYIPFFGPPNDKKIAKRTAMQEEASEKAARYVMERKTNKINTFRPLSAFISFLFSLGVKIFYKHYKVSDKCNGCGVCEKVCPVAGIEMKKKRPVFSDKCENCSACINICPLRAIQFGRAKFGARGYCHPGISIKELGRVPLFTSRKE

SEQ ID NO: 27959 - DNA, 732 bp, Unknown
  Obtained from environmental sample
  misc_feature (1)..(732): n is a, c, g, or t
gtggttatcgggcttatggctgtaagggggctttccgtgtccggggcgcgggcggttattgatgagcgggaacggggcggggatttcgcctctttgaatgatttttcacggagggtaaaacttaaccgtgacgatattatcgccctttgcccagccggagtttttgacggtattgcggagggtttgcccagacatttgcaggcaagaagactgctggcaaataacaaggaacaaataataaataaaaaagggaatagaaatttagatttgtttgcattggaggtttctaccacttttgatattacgcaagaaaatgttattgcgccacaaataaaaagaactgttaagagcgataacgatttgtgggaagaatacaatgcccttgggtttttgcggaatactcatccgcttgcgttatggaaagacgacgtattggcggtaaagcgtcgggttaaggctttacatattggggaatatgtcgggcgaaatgttaaaatggtcggctggcccgttacgcaaaaagacgtatggacaaaggacggtttaaccatgtgttttttaagtttggaagatgaaacggcattgtatgaaacggttgtttttccgcaagtatatgaacgttacaatagactgctttttgatcagcaaccactgcttgtttttgggcttgtcactaatgacgagggggccgtttcccttgagattaaaaagattgaagtattggggaaataa

SEQ ID NO: 27960 - protein, 243 aa, Unknown
  Obtained from environmental sample
  DOMAIN (164)...(241): OB-fold nucleic acid binding domain
  misc_feature (1)..(243): Xaa is any amino acid
MVIGLMAVRGLSVSGARAVIDERERGGDFASLNDFSRRVKLNRDDIIALCPAGVFDGIAEGLPRHLQARRLLANNKEQIINKKGNRNLDLFALEVSTTFDITQENVIAPQIKRTVKSDNDLWEEYNALGFLRNTHPLALWKDDVLAVKRRVKALHIGEYVGRNVKMVGWPVTQKDVWTKDGLTMCFLSLEDETALYETVVFPQVYERYNRLLFDQQPLLVFGLVTNDEGAVSLEIKKIEVLGK

SEQ ID NO: 27961 - DNA, 681 bp, Unknown
  Obtained from environmental sample
  misc_feature (1)..(681): n is a, c, g, or t
atgacagattcgccagtacgacgcgttatctccggcttttcgagcaacgcgctccgcttcggcgtgcagatacccgtgcacgagaaggtgacgctcggtttcgccggcgagtacatgttacccgggcgcaacaacggcacggaggcgggcgggtactaccgctcagacgactcctcgaccctcggatcctacaataaaaaagtctctgtaacgctgccgccgtcaatgagcatcggcgcggcgtacaagccggacgaccactggcttttcgtggccgacgccaacaccgctctgtgggatttttacgaaaaatcttatgaaaacggaccggacaccgccataaaacccgaaagggaactcggcatatccgtcggggcgcgctacataccggcggcaaaccttctcagctcaaaatactgggaaaaaatccactacggcgtcggcgcgaggtacgccacgctgccaaacagtaaagcctacgacagagcgcacgagtacatgttctccgtaggcgccggactgccgatcccccgcgacggcgggatggtcgacatcgtcgtaagtttcggcagaaggtcggacccaaagtacagcaattacggagagagcctcgtaaagctgcaattgggcctaaacggcagccgcaactggttccaaaaagacgcgtcaaaagagtattga

SEQ ID NO: 27962 - protein, 226 aa, Unknown
  Obtained from environmental sample
  misc_feature (1)..(226): Xaa is any amino acid
MTDSPVRRVISGFSSNALRFGVQIPVHEKVTLGFAGEYMLPGRNNGTEAGGYYRSDDSSTLGSYNKKVSVTLPPSMSIGAAYKPDDHWLFVADANTALWDFYEKSYENGPDTAIKPERELGISVGARYIPAANLLSSKYWEKIHYGVGARYATLPNSKAYDRAHEYMFSVGAGLPIPRDGGMVDIVVSFGRRSDPKYSNYGESLVKLQLGLNGSRNWFQKDASKEY

SEQ ID NO: 27963 - DNA, 603 bp, Unknown
  Obtained from environmental sample
  misc_feature (1)..(603): n is a, c, g, or t
ttgattattttgatatacgtcgtcgcggctgtggtgatgccgtcgtttccaatcgtattgattgtttacgtggttaagatggaggtgttgatatatatcgtcaaagctgtagtgattgccgttatcccaatttatttgatgatagccgtgaccgccctcttgataattatcagcgccatgaagatattgttgttgattgttatggtcaaagttatagtgattgccgttatcccaatttatctgatgatagccgtgattgccatcttgataattatcaacgccgtgatgatattgttgttgattaccgccgtcaaagtcatagttgttgccgttatcccaattcatcggacggttgaacttattataatcgtattggctataatcttgttgataaccgccgctgtcgtctgtgtgtcgacaaatctccgcttggcgatgcttttgtttttcgttcagctgctgccctatcctgaccgcctcgtcgttccccacgtgcgccgttcccttgtccgcgaagaggctttggtcctcttggcccgtggcgggcaattcccagtagacgaaagtgctttgcgggtctttcggtatcgctctcacgtatga

SEQ ID NO: 27964 - protein, 200 aa, Unknown
  Obtained from environmental sample
  misc_feature (1)..(200): Xaa is any amino acid
MIILIYVVAAVVMPSFPIVLIVYVVKMEVLIYIVKAVVIAVIPIYLMIAVTALLIIISAMKILLLIVMVKVIVIAVIPIYLMIAVIAILIIINAVMILLLITAVKVIVVAVIPIHRTVELIIIVLAIILLITAAVVCVSTNLRLAMLLFFVQLLPYPDRLVVPHVRRSLVREEALVLLARGGQFPVDESALRVFRYRSHV

SEQ ID NO: 27965 - DNA, 414 bp, Unknown
  Obtained from environmental sample
  misc_feature (1)..(414): n is a, c, g, or t
atgatgaaaacaagtagtttgcgaaaaacaagagaacttaaattgatgattattccgatgattgacattattttctttttattggtgttttttatgatgagtactttatatatggtggaacaaaagaccatcccggtgcaattgcctcaggcttcaacccagcagattacaaccgagaagagcattccgatcacggttctgccaagcggcaagattatgtttgaacaagaagaaatcccggctaatttactgggcagaaggattcaggcggctcttagcataatggaaaatccggtttttattctgcgggccgatcaggttacggaataccgttatgtagtcggcgttattgacgaactgaaaaaagccggggtcaaacatttggctatcgccacagaaagaaaggcagagtga

SEQ ID NO: 27966 - protein, 137 aa, Unknown
  Obtained from environmental sample
  DOMAIN (8)...(135): Biopolymer transport protein ExbD/TolR
  misc_feature (1)..(137): Xaa is any amino acid
MMKTSSLRKTRELKLMIIPMIDIIFFLLVFFMMSTLYMVEQKTIPVQLPQASTQQITTEKSIPITVLPSGKIMFEQEEIPANLLGRRIQAALSIMENPVFILRADQVTEYRYVVGVIDELKKAGVKHLAIATERKAE

SEQ ID NO: 27967 - DNA, 948 bp, Unknown
  Obtained from environmental sample
  misc_feature (1)..(948): n is a, c, g, or t
gtgacagtatcgcgaaaagcagctttaagtcttcttatttctgttctgctttttgccgtatttatagtattagcctataccggactttttggctttctggaattgcggttttatagaccctcggttatctcttccctggactatgaactgaagcaaacggccgcaagcctggacagctttctcgactccctgcagactaagatttccggcgtcattgcggcagattcggtgaaacgcagctttcttccaggccagaaccctgaggatattctggagcgttccggatcatttcagaacctaatagaatccgaaagagggcttcaatggtgccgatttatcgattctcatggtatccggctttactattctaccaatccccaggatattttgcgtcaggatagagtttcagtaacttatcataattattatgaactctccatggctcatccttatgaagaaattgcatcccaatcagggggctcggctaaatacattcctgatccggggaatgacagtatactggtttctatccctttttatgacagcaatgggatttttcgcggtactgcgctcttttctctttctatccgggctctggtagaacagcttatcggcgatgaacgaataagtaccggagagtatatttctctcatctccaatcctcccgggctccttatagggaggcccgcgtatctggaaacaacgctgttgtcccagattactgccttatggaaagaacggcttcttagccccggtaagattgtgcacctcagtacgttgaattcgccctcctacgagcccctggtccttttttcagcggaaactaatcatggcttattcattttccgccctataaacgaaaatcttttaccattcccccaaacgatgaaaaccattctcttgatttgctttattcttacggctttccttatcgtctttctcatttaa

SEQ ID NO: 27968 - protein, 315 aa, Unknown
  Obtained from environmental sample
  SIGNAL (1)...(25)
  misc_feature (1)..(315): Xaa is any amino acid
MTVSRKAALSLLISVLLFAVFIVLAYTGLFGFLELRFYRPSVISSLDYELKQTAASLDSFLDSLQTKISGVIAADSVKRSFLPGQNPEDILERSGSFQNLIESERGLQWCRFIDSHGIRLYYSTNPQDILRQDRVSVTYHNYYELSMAHPYEEIASQSGGSAKYIPDPGNDSILVSIPFYDSNGIFRGTALFSLSIRALVEQLIGDERISTGEYISLISNPPGLLIGRPAYLETTLLSQITALWKERLLSPGKIVHLSTLNSPSYEPLVLFSAETNHGLFIFRPINENLLPFPQTMKTILLICFILTAFLIVFLI

SEQ ID NO: 27969 - DNA, 396 bp, Unknown
  Obtained from environmental sample
  misc_feature (1)..(396): n is a, c, g, or t
gtgtatgtgatgagaaagctgggaatatttgcatggtttagctatgacttaccgatagaagaatgtgtgcgaaaaataaagcgcgcgggatttgacgcgacttccctttggtggggtaacgaagacagggatatgcagccggatgtagccaggaaatcgggactggcaattgattacattcacgctccctttgataacgcgaacagcttttggacggacaattcagccggtgaggattatttacaaatgctcatctcttgtattgacgattgtaaaaggcacagtataccggtagtagtcatacacataactgatttctttaaatccccgccgattaccgagctgggtatgaccagagtaaaaaaaatcgttgagtatgtgaaaaacaggaaataa

SEQ ID NO: 27970 - protein, 131 aa, Unknown
  Obtained from environmental sample
  misc_feature (1)..(131): Xaa is any amino acid
MYVMRKLGIFAWFSYDLPIEECVRKIKRAGFDATSLWWGNEDRDMQPDVARKSGLAIDYIHAPFDNANSFWTDNSAGEDYLQMLISCIDDCKRHSIPVVVIHITDFFKSPPITELGMTRVKKIVEYVKNRK

SEQ ID NO: 27971 - DNA, 753 bp, Unknown
  Obtained from environmental sample
  misc_feature (1)..(753): n is a, c, g, or t
gtggaaaggaagattcatcggcttgaagaagagctggaacaactggcgcgccagaggcaggttcagaggaaaaagcgcgagcgcagcggcatccatgtttgcgccctggtaggctatacaaatgccggaaaatcctcgatcctgaacgcgctgaccggcgcagccgtttacgctgaggataagcttttcgcgaccctggattccacttcccgcagattgcatctgcccctgggcactgagattctgctggtggataccgtcgggttcataagacgcctgccccacagcctgatcaaggcctttcgttccaccctggaagaagcgcgcctttcggatctcctgattcaagtggtggacgcttcggatcccgacgctgccgcccactgggtaaccgcccttgcggtactccaggaactccaggccgcagatattcccagaatcacagtcctcaacaaggcggacaagatagaagcccgggaacgtcttggagatctggcgcagcagtatgaaaacgcgattcctgtttcagcatctaccggagaagggcttcctgaacttctgacccggatagagtctgcgttgtctggagatattcgcctttacgctttccctcaaagccgctcggatcttgcggctctgctccaccggagcgggacagtcctttcggaaaagtatgaaggtgaagagattgtgatggaagcccgggtaaatgaagtaactgcgggaagactaaaagaatttgttttaaactga

SEQ ID NO: 27972 - protein, 250 aa, Unknown
  Obtained from environmental sample
  DOMAIN (29)...(197): Elongation factor Tu GTP binding domain
  misc_feature (1)..(250): Xaa is any amino acid
MERKIHRLEEELEQLARQRQVQRKKRERSGIHVCALVGYTNAGKSSILNALTGAAVYAEDKLFATLDSTSRRLHLPLGTEILLVDTVGFIRRLPHSLIKAFRSTLEEARLSDLLIQVVDASDPDAAAHWVTALAVLQELQAADIPRITVLNKADKIEARERLGDLAQQYENAIPVSASTGEGLPELLTRIESALSGDIRLYAFPQSRSDLAALLHRSGTVLSEKYEGEEIVMEARVNEVTAGRLKEFVLN

SEQ ID NO: 27973 - DNA, 708 bp, Unknown
  Obtained from environmental sample
  misc_feature (1)..(708): n is a, c, g, or t
gtgaatacagccccatggcttatttctgattggccctttttgtacagggatataactcatgccaaaaatgtctggaccggcagtttttttgatgactttaaaaaagactttgaaaaagcctttccgacaacacgtatgctttccgttggtccaaacagttcgcgtacatttacttcaaataaacagcttaccggtatttctgattttcaggggcaaaaattccgtatgccttcaaaccccatccatgtaggaattgccactgaccttggggcaagcgtgcaaataatacctcttaacgaactttataacgcgttgaaagcaggggttgtcgacggacaggataatggtatggtaactgttttaagcgaaaaatttaatgaggtacaaaagtatctgtacgaaacaaaccacattatggcaattatggagttaattgtaaacgctcctttttttgataaattaagcgcggaacatcaaacgattatcagagacgcggcaaaagacgcggcggtgtgggcatgggacgaatatataaagtccgttgatgctgatcgcgcaacgattagaggaaatggcatcattgttacgcagttaacagccacagacatggatgattttatagcaaaaattcaacccacgcttacaaagctctattctgaaaatagctgggcggaagagcttgtcaacaaagtaaaaaatataccgtaa

SEQ ID NO: 27974 - protein, 235 aa, Unknown
  Obtained from environmental sample
  DOMAIN (1)...(221): Bacterial extracellular solute-binding protein, family 7
  misc_feature (1)..(235): Xaa is any amino acid
MNTAPWLISDWPFLYRDITHAKNVWTGSFFDDFKKDFEKAFPTTRMLSVGPNSSRTFTSNKQLTGISDFQGQKFRMPSNPIHVGIATDLGASVQIIPLNELYNALKAGVVDGQDNGMVTVLSEKFNEVQKYLYETNHIMAIMELIVNAPFFDKLSAEHQTIIRDAAKDAAVWAWDEYIKSVDADRATIRGNGIIVTQLTATDMDDFIAKIQPTLTKLYSENSWAEELVNKVKNIP

SEQ ID NO: 27975 - DNA, 882 bp, Unknown
  Obtained from environmental sample
  misc_feature (1)..(882): n is a, c, g, or t
ttgtatattatacaaataatgaatattgacaaatttacaataaaagcgcaggaagcgctgaacgaagcgaccgctatagcgcagagaaatgaccactctcaagtcgagaccgagcatgttctgctcgcgatacttcggcaggaaaacggaactgcggcgcccataatcgagaaaatagggggcgatgccgctaggcttgcgtccggcgttgaggcgcttgttaacgcaacgccgaaaatctacggagaggcggctcaggttttcttttcgtcggcggcgtcaaaggttctggcaaaggcggaagttgaggcctcggcgttaaaggacgagtatgtctccacagaacacattttactcgccatcgcctcgggggacggaaaggccgccgacttcttaaaaaaagcgggcgttacgaaaaacgcgattctgggcgcgctaaagcaagtacgcggaaacgcccgcgttaccgatcaaaatcccgaagaaaaataccaggtgctggaacgctattgcagagatttaaccgcgcttgcgcgtcaggaaaaactcgacccggtgattggccgcgacgaggaaatccgcagatgtatgcaggtgctgtcgcggcgcaccaagaacaaccccgtgcttatcggcgagccgggcgtgggaaagacagccattgttgaggggcttgcgcgccggatagtcgaaggcgacgtgccggaaggattaaaagggaaaaaactgctcgcgctggatttgggcgcgcttgtcgccggcgcgaaattccgcggcgagtttgaagagcgcctgaaagccgtcattcacgaagtgcaggcaaccgacggaaaaattattctttttattgatgagcttcatacgctgtctcggccgatctga

SEQ ID NO: 27976 - protein, 293 aa, Unknown
  Obtained from environmental sample
  DOMAIN (23)...(75): Clp amino terminal domain
  misc_feature (1)..(293): Xaa is any amino acid
MYIIQIMNIDKFTIKAQEALNEATAIAQRNDHSQVETEHVLLAILRQENGTAAPIIEKIGGDAARLASGVEALVNATPKIYGEAAQVFFSSAASKVLAKAEVEASALKDEYVSTEHILLAIASGDGKAADFLKKAGVTKNAILGALKQVRGNARVTDQNPEEKYQVLERYCRDLTALARQEKLDPVIGRDEEIRRCMQVLSRRTKNNPVLIGEPGVGKTAIVEGLARRIVEGDVPEGLKGKKLLALDLGALVAGAKFRGEFEERLKAVIHEVQATDGKIILFIDELHTLSRPI

SEQ ID NO: 27977 - DNA, 504 bp, Unknown
  Obtained from environmental sample
  misc_feature (1)..(504): n is a, c, g, or t
ttgactataattgatcaacttaccggtatttacaacaggcggtatcttgacggcagtttaaagaatataattaaattacattcccgcgccggcagtaaactaagcgtattattgttagatatagatcattttaaaaaatacaacgatacttacggtcacgacgcgggagatgaatgccttaaagaagtatcgtccgctctttctcaatgtgtaataagagacgaagattttgtcgcaaggtacggcggcgaggaatttgccgtagttttgcctaataccgatgagaacggcgcgcgtctggttgcggaaagaatattggaaaaaatgcgtgaacgtaatattcctcataaaacaaacgaagcggccgcttatgtaactgtctctatcggcggtacaaccaatgttattgatcatttacagcatggaagcgattatatcaaagtcgccgacaaagcgttatacgaatctaaaaagaacggccgtaacagatatacagcaagttga

SEQ ID NO: 27978 - protein, 167 aa, Unknown
  Obtained from environmental sample
  DOMAIN (1)...(163): GGDEF domain
  misc_feature (1)..(167): Xaa is any amino acid
MTIIDQLTGIYNRRYLDGSLKNIIKLHSRAGSKLSVLLLDIDHFKKYNDTYGHDAGDECLKEVSSALSQCVIRDEDFVARYGGEEFAVVLPNTDENGARLVAERILEKMRERNIPHKTNEAAAYVTVSIGGTTNVIDHLQHGSDYIKVADKALYESKKNGRNRYTAS

SEQ ID NO: 27979 - DNA, 828 bp, Unknown
  Obtained from environmental sample
  misc_feature (1)..(828): n is a, c, g, or t
ttggttcttggtttttgggcatctatgtacgaggcagcggttgacgaaattctgtttgaaaacatagaatccgaagatttgtctgcttctatgaagatagatgaaaagaaagaggataaaaagaaagagcaaaagaagaccgaaaagcctcgcaaaaagcagggcgcaggtggaaagcctcgcggcaagggtcagcccaatgctcctcagagccgtggtgttttgaaaatgctcaccgcaaaatctagcaaatccaatttcagcgcttataacctcatgaaagataaaaactttgccaaagacatagacaaagttttgaaaaatgttgcaggtcttcaaaccagcggtaaaacagagcttggcggcagacgtggttctgctacaggtggtttcaacgatggttatgcagaaggtggttccggtggtattggtgatatgcttggcggcttgatgggcggtagcgcaggtggtcttggcacaaaagccaaaggctctctaaaggctccgagcgcaagagatatagatatgggttctggtgatggttctcgctctaaagcggaaattatggccgttgttaatgcccgtatgccaggtttaaggaacatatacaacaagtatttgaagttgaaaccgggctttagcggcaaggttactctcaaatttaccattgctcctggtggcgatattgttagcattagcattgtgtcttctacaacaggctatggcgactttgataacgctgtcaaaaatatggtagcaacctggaaatggaaggttatcaagagcggcaataccactccaactataccattcaacttcaccgagtag

SEQ ID NO: 27980 - protein, 275 aa, Unknown
  Obtained from environmental sample
  misc_feature (1)..(275): Xaa is any amino acid
MVLGFWASMYEAAVDEILFENIESEDLSASMKIDEKKEDKKKEQKKTEKPRKKQGAGGKPRGKGQPNAPQSRGVLKMLTAKSSKSNFSAYNLMKDKNFAKDIDKVLKNVAGLQTSGKTELGGRRGSATGGFNDGYAEGGSGGIGDMLGGLMGGSAGGLGTKAKGSLKAPSARDIDMGSGDGSRSKAEIMAVVNARMPGLRNIYNKYLKLKPGFSGKVTLKFTIAPGGDIVSISIVSSTTGYGDFDNAVKNMVATWKWKVIKSGNTTPTIPFNFTE

SEQ ID NO: 27981 - DNA, 543 bp, Unknown
  Obtained from environmental sample
  misc_feature (1)..(543): n is a, c, g, or t
atgactacacctagtgactatgggttaccagagacaatagagcttgaacagtgggcttcgccatattttccagaatttcaggatacaaagataggcaatgaggaagtaaaagcatactctcccaccgtttcgtcttacaaagaggcacctacaggcaaagctggttttgatgtaaaccaagttcgcaaagattttcccatattaaacgaaaaagtgaacggcggtaaaccccttatatggcttgataatggcgcaacaacccaaaaaccaaatgcagtgatagatagaatttcttattactaccaacacgaaaattcaaatgtgcaccgcggggcgcacgaactcgcagcccgctccaccgatgcttacgaagctgctcgcgaaaccaccgctaaatttttaggggcaccctcaaaagacaatatagtgtttgtgcgcggaacaacagaggcaattaaccttgcagcgcagagctacgttaaaccattgctcaccccaggtgacgaaataatactgacccacctgaacaccacgcaaatatag

SEQ ID NO: 27982 - protein, 180 aa, Unknown
  Obtained from environmental sample
  misc_feature (1)..(180): Xaa is any amino acid
MTTPSDYGLPETIELEQWASPYFPEFQDTKIGNEEVKAYSPTVSSYKEAPTGKAGFDVNQVRKDFPILNEKVNGGKPLIWLDNGATTQKPNAVIDRISYYYQHENSNVHRGAHELAARSTDAYEAARETTAKFLGAPSKDNIVFVRGTTEAINLAAQSYVKPLLTPGDEIILTHLNTTQI

SEQ ID NO: 27983 - DNA, 420 bp, Unknown
  Obtained from environmental sample
  misc_feature (1)..(420): n is a, c, g, or t
ttgggagaccgaggtcatcatcagacataccttgatgtatgcccttaccctacccgtgcattattttttctttgggcgttttgttccgtatttggagcgacgctggtttcggccattcacacccgatgtatccagggcgccacgaatgatgtgataacgcacaccgggaaggtctttcacacgaccgccgcgaatcatcacgatggagtgttcctgcaagttgtgtccttcacccggaatgtaggcattcacctccttatggttggtcaaacggacccgagccactttacgcatggcggagttaggttttttcggtgttgtggtgtacacacgcacacaaaccccgcgtcgttgcggacaagaatccaatgccggagacttactcttatcggtaagtttcgtacggcctttgcgaactaa

SEQ ID NO: 27984 - protein, 139 aa, Unknown
  Obtained from environmental sample
  misc_feature (1)..(139): Xaa is any amino acid
MGDRGHHQTYLDVCPYPTRALFFLWAFCSVFGATLVSAIHTRCIQGATNDVITHTGKVFHTTAANHHDGVFLQVVSFTRNVGIHLLMVGQTDPSHFTHGGVRFFRCCGVHTHTNPASLRTRIQCRRLTLIGKFRTAFAN

SEQ ID NO: 27985 - DNA, 378 bp, Unknown
  Obtained from environmental sample
  misc_feature (1)..(378): n is a, c, g, or t
atgccaacaattcaacaattagttcgcaaaggccgtacgaaacttaccgataagagtaagtctccggcattggattcttgtccgcaacgacgcggggtttgtgtgcgtgtgtacaccacaacaccgaaaaaacctaactccgccatgcgtaaagtggctcgggtccgtttgaccaaccataaggaggtgaatgcctacattccgggtgaaggacacaacttgcaggaacactccatcgtgatgattcgcggcggtcgtgtgaaagaccttcccggtgtgcgttatcacatcattcgtggcgccctggatacatcgggtgtgaatggccgaaaccagcgtcgctccaaatacggaacaaaacgcccaaagaaaaaataa

SEQ ID NO: 27986 - protein, 125 aa, Unknown
  Obtained from environmental sample
  DOMAIN (2)...(123): Ribosomal protein S12
  misc_feature (1)..(125): Xaa is any amino acid
MPTIQQLVRKGRTKLTDKSKSPALDSCPQRRGVCVRVYTTTPKKPNSAMRKVARVRLTNHKEVNAYIPGEGHNLQEHSIVMIRGGRVKDLPGVRYHIIRGALDTSGVNGRNQRRSKYGTKRPKKK

SEQ ID NO: 27987 - DNA, 1173 bp, Unknown
  Obtained from environmental sample
  misc_feature (1)..(1173): n is a, c, g, or t
atggacaaaacggataaaaagctgtcgaagttttccgggctacgctccggcagtttcgggtttgacaacaaggcgcttcaagaagcggcccgcatagcggttgaggtttccctcaaggtgcaggcgggcgaacaggtactgataatcagcaacccaagacccgatgtcgccgccattgccgaagcgttgtacgacgccagccttgacgccgggggcaggccggcgctggtgtaccagccggtaaaaccacagctcgcctttgccgagccagcggtgctggcggccttcaacgcaaggccggaagtagtaatatccctgagcgatgaaaagctgggaaaagaccccgtcggcatcgcctcgccgtatatgcacaacggcgtgccatacgaccacatttttcactttcttatgtacggtgaaaaatgctgccgttctttctggtcaccttctactacggttgaatcttttatccgcacagtacccattgattacgccgaactgaaacgccgctgtgccgcaattaaacaaattctggacgaagcggaggaggtgcgcgttaccgcgccgggcggcacagacattgcaatcgggatgcggggcaggcaggcgaaagccgacgacggcaatttttcagtgccgggttcgggcggtaaccttcccgccggcgaaacctttatcagtccggaaaacctcaccgcaaaaggccgcatntgctacgacggatccatcagcgttaatgatggagagctaatcatcaacactccgattcaatgtctggtggaagacggttatgtgactaaaattctcggcgcgggagaagcggcctgtttattgaataccattgaatcagccgagaacaacgcctttgaatttgaaagagccgggaaactgcctcccggtcttggggaagtttacgcccgcaacgcccgcaacataggcgagcttggcattggcctgaaccctgcggcccgaataaccggcaagatgcttgaagacgaaaaagccttccgtacctgccatttcgccatcggctctaattacgatgaggacgcccccagccttattcatctggacggcctggtaaaaaatcccaccataatggcgatctttgacgacggaaccaaacagataattgagcgtgacggcgaactggacaccagcatactgtcttga

SEQ ID NO: 27988 - protein, 390 aa, Unknown
  Obtained from environmental sample
  misc_feature (1)..(390): Xaa is any amino acid
MDKTDKKLSKFSGLRSGSFGFDNKALQEAARIAVEVSLKVQAGEQVLIISNPRPDVAAIAEALYDASLDAGGRPALVYQPVKPQLAFAEPAVLAAFNARPEVVISLSDEKLGKDPVGIASPYMHNGVPYDHIFHFLMYGEKCCRSFWSPSTTVESFIRTVPIDYAELKRRCAAIKQILDEAEEVRVTAPGGTDIAIGMRGRQAKADDGNFSVPGSGGNLPAGETFISPENLTAKGRXCYDGSISVNDGELIINTPIQCLVEDGYVTKILGAGEAACLLNTIESAENNAFEFERAGKLPPGLGEVYARNARNIGELGIGLNPAARITGKMLEDEKAFRTCHFAIGSNYDEDAPSLIHLDGLVKNPTIMAIFDDGTKQIIERDGELDTSILS

SEQ ID NO: 27989 - DNA, 573 bp, Unknown
  Obtained from environmental sample
  misc_feature (1)..(573): n is a, c, g, or t
atgctgataaactgtcaaaacctttatttcgggtatgacggacatattgtcgtctgtggtcttaacttttcggtacaggccggggattttcttcttattgccggcgagaacggctcgggaaaatccactcttgtaaaaggtttattgcgcatcctgccccctatggaagggacaatcacctttaatccagattacaaacagtctgaaacaggctatctttcccagcaaacggccgcaaaacaggattttccggcgggagtctttgaaatcgtattgtcgggaaatttgggaaagaaagggttttggcccttatacacccattccgagaaacaaaaagcggaagaaaaactgcgcttgcttgacattgaggatttaaaggacaggtgttttcgggaactttcaggcggacagcaaaggcgcgtcttgcttgcgcgttctctttgcgcggcggaaaaactacttgtgcttgacgaacctttcgccggccttgacccgctgataagcgcgcagttgtaccgcctgcttgaaaaattaacaggaaacaaacataacgataatcatggtttcccatga

SEQ ID NO: 27990 - protein, 190 aa, Unknown
  Obtained from environmental sample
  DOMAIN (28)...(188): ABC transporter
  misc_feature (1)..(190): Xaa is any amino acid
MLINCQNLYFGYDGHIVVCGLNFSVQAGDFLLIAGENGSGKSTLVKGLLRILPPMEGTITFNPDYKQSETGYLSQQTAAKQDFPAGVFEIVLSGNLGKKGFWPLYTHSEKQKAEEKLRLLDIEDLKDRCFRELSGGQQRRVLLARSLCAAEKLLVLDEPFAGLDPLISAQLYRLLEKLTGNKHNDNHGFP

SEQ ID NO: 27991 - DNA, 834 bp, Unknown
  Obtained from environmental sample
  misc_feature (1)..(834): n is a, c, g, or t
ttgatgttaaaagttttattggagatgttcagttttacgtttcttgtcagggcttttattgtcggcactcttgtttcaatctgcgccgccctactcggtgtaagccttgttttaaaacgttactcgatgataggggacgggctttcccatgttggctttggttcgctcgccatcgccaccgcgcttcatgccgccccgttaagcgtggcgattccgatagtggtggccgcggctttcctccttctgcgaatgagcgaaaacagcagaatcaagggggatgccgcgattgccttaatctcaacaggctctcttgccattggagtcgtgataatttctcagacgacgggtatgaacaccgacgtgtgcaattatctctttggcagtatccttgcaatggcaaaagcggacgtttatttaagcatcgcactttcagtcgtcgtgctggttctatttatccttttctacaataaaatatttatcataacctttgatgaaacattcgccaaagcctcaggaataaaaacaggcctttacaatatgcttatcgcttttttaaccgcccttacaatcgtgcttggaatgcgcatgatgggggcgatgcttatttcaagtttgataatttttccggcattaagcgccatgcgtatttttaaaaaatttaaaagcgttaccatttgcgccgcaattatttccattatgtgcttttttacaggcgttattatttcgtatctatacgccactccgaccggcgcaagcgtcgtaacaatcaatataatcgtatttatactgttttatcttgttgagaatttgcgtanattcagaacattnnnataa

SEQ ID NO: 27992 - protein, 277 aa, Unknown
  Obtained from environmental sample
  DOMAIN (11)...(268): ABC 3 transport family
  misc_feature (1)..(277): Xaa is any amino acid
MMLKVLLEMFSFTFLVRAFIVGTLVSICAALLGVSLVLKRYSMIGDGLSHVGFGSLAIATALHAAPLSVAIPIVVAAAFLLLRMSENSRIKGDAAIALISTGSLAIGVVIISQTTGMNTDVCNYLFGSILAMAKADVYLSIALSVVVLVLFILFYNKIFIITFDETFAKASGIKTGLYNMLIAFLTALTIVLGMRMMGAMLISSLIIFPALSAMRIFKKFKSVTICAAIISIMCFFTGVIISYLYATPTGASVVTINIIVFILFYLVENLRXFRTXX

SEQ ID NO: 27993 - DNA, 930 bp, Unknown
  Obtained from environmental sample
  misc_feature (1)..(930): n is a, c, g, or t
atggctgacaacccgctgattgtgcaaggtgacaggactctgctgcttgatgttcacgcggaaaaggcggaacaggccagagcggcgattattccctttgcggaacttgaaaaatcacccgaacatatccatacctaccgtataacgccattgtccctgtggaacgccgcaagcgcgggcttcagccccggcgacatagccaaagcccttgccgaatacagccgctattccgttccctccggcattgttgaaagtttttccgataccatgtcccgttacggaaagataaggatgatagccgcgcccgaacccgccccggaaaatgacatgctgttcctggaaatagccgacaagactgtactggctgagattgaagcgattaaaactcttgataaatatttaattaaaaacgaggaagggtttttactgaggctggttgacaggggaacggtaaaacaggggcttatcaggcatggatggccggtgcaggacgaagcgccgctggtttccggcgacaacctggaaatcaacctgcgcgacagatgcctgtcgggaaagccttttgttccaagggattaccaaattgaggcggccagatcagtgcttggggacgggaagccggggacaggctacggcattgtggctctgccctgcggttcggggaagaccattgtcggcatggttataatgtcattgttaaaaaccaatacgctgattctgaccacaaatgtcgcggctgtgcatncatggatcgaggagttggttgataaaacagaattaagcaggggacagatagccgaatattcgggggacacaaaatccgtggcgcccgtcccattgccacataccagattatcacatggcggcccggacgcgacgccgatttcccgcatttcaggctgttcagggagcagcattgggggcttataa

SEQ ID NO: 27994 - protein, 309 aa, Unknown
  Obtained from environmental sample
  DOMAIN (187)...(296): Type III restriction enzyme, res subunit
  misc_feature (1)..(309): Xaa is any amino acid
MADNPLIVQGDRTLLLDVHAEKAEQARAAIIPFAELEKSPEHIHTYRITPLSLWNAASAGFSPGDIAKALAEYSRYSVPSGIVESFSDTMSRYGKIRMIAAPEPAPENDMLFLEIADKTVLAEIEAIKTLDKYLIKNEEGFLLRLVDRGTVKQGLIRHGWPVQDEAPLVSGDNLEINLRDRCLSGKPFVPRDYQIEAARSVLGDGKPGTGYGIVALPCGSGKTIVGMVIMSLLKTNTLILTTNVAAVHXWIEELVDKTELSRGQIAEYSGDTKSVAPVPLPHTRLSHGGPDATPISRISGCSGSSIGGL

SEQ ID NO: 27995 - DNA, 741 bp, Unknown
  Obtained from environmental sample
  misc_feature (1)..(741): n is a, c, g, or t
ttgcccgcgcctgtatttcgcgtaacggcggaattgcaagcggtcaggcgtttggggcttaccgcgacactaatccgcgaagacggcgcggaggacgcggtattcagcctggtaggccccaagcgttacgatgtgccgtggaaggatcttgaaggcaagggctggattgccgaagcggtctgtacggaaatcagaattgatcttccggaggagctgaaaataccatacgccgtagcttcacagcgtgagaagtaccgagtcgccagcgagaacccgttaaaggaagatattgtaacccaattaatcgaaaaccacggcgaagatcagattctcgtcatcggccaatacctttcccagctcgattcgctggcgaaactgcttaaagtgccgttaatcaccgggaaaacacctaacgccgagagagaaaggatttacggcgaatttaagcggggggaactcaggatcatcgtggtttcaaaggttgccaattttgccatcgatctgccggacgcctcaatggcgattcaggtttcaggttccttcggctcgcggcaggaagaggcccagcgtctggggcgcatcctgcggccaaaagacaaaaacgccaaacaccataacgcgctgttttttacccttgtctcgcgttacacggtagaagaagatttcgcggcaaacaggcataaattcctggccgagcaggggtacaaatattctattcaacactggaatacgacaaaatga

SEQ ID NO: 27996 - protein, 246 aa, Unknown
  Obtained from environmental sample
  DOMAIN (126)...(198): Helicase conserved C-terminal domain
  misc_feature (1)..(246): Xaa is any amino acid
MPAPVFRVTAELQAVRRLGLTATLIREDGAEDAVFSLVGPKRYDVPWKDLEGKGWIAEAVCTEIRIDLPEELKIPYAVASQREKYRVASENPLKEDIVTQLIENHGEDQILVIGQYLSQLDSLAKLLKVPLITGKTPNAERERIYGEFKRGELRIIVVSKVANFAIDLPDASMAIQVSGSFGSRQEEAQRLGRILRPKDKNAKHHNALFFTLVSRYTVEEDFAANRHKFLAEQGYKYSIQHWNTTK

SEQ ID NO: 27997 - DNA, 642 bp, Unknown
  Obtained from environmental sample
  misc_feature (1)..(642): n is a, c, g, or t
atgcttccggtcaacccgggtncaatgggaggccccgcgcccttattcgatcttaagctgttagacgaagacggcggcgtttgcgacaagggcatagtcggcaacatgagcattacaaaagccggcaaaaacatgtacgaaatcgaaggcgcaaagcccgacgcgccggttcccgtaatcggaatgtcggaaacccccggaatattccgaggctactggaaagacaaggaaataaccgagaccaactggaacaaaggcacctaccagacaggcgacatggcgtggagcgacgatgacggttatttatggtttgtaggccgcaacgacgatgtaataaaatgctccggctaccgcataggccccttcgaggtggaaagcgcccttatggaacatccctcggtactcgaatgcgccgtaacagccgcccccgacgccatgcgcggacaggtagtcaaagcgacgatagttctggcgcgcggctttaccgccagcgaagagttaatccgcgagttacaaaaccacgtaaaacgcgtaaccgccccctacaaatacccgcgcatcgttgaatttgtgccggaactgcctaagaccataagcggaaaaatacaaagaaacatgatacgcaagaaagattttaattaa

SEQ ID NO: 27998 - protein, 213 aa, Unknown
  Obtained from environmental sample
  misc_feature (1)..(213): Xaa is any amino acid
MLPVNPGXMGGPAPLFDLKLLDEDGGVCDKGIVGNMSITKAGKNMYEIEGAKPDAPVPVIGMSETPGIFRGYWKDKEITETNWNKGTYQTGDMAWSDDDGYLWFVGRNDDVIKCSGYRIGPFEVESALMEHPSVLECAVTAAPDAMRGQVVKATIVLARGFTASEELIRELQNHVKRVTAPYKYPRIVEFVPELPKTISGKIQRNMIRKKDFN

SEQ ID NO: 27999 - DNA, 1044 bp, Unknown
  Obtained from environmental sample
  misc_feature (1)..(1044): n is a, c, g, or t
atgaaacaggcattaaaagccgataaattagtagaggggcacatagatttgggagcaaactacggcaggggcttatataagcaactgcaagagacgatagaacaagtagaaaaactgacggcggaaatccgcgatataaaatcagcgcatcaaatagaaatcgcaggcctgaaagcagagaatgaaagcctgcggaaagaaaacgccgccctaagaaccgaaaaccaaaagctgaaagccatcatcaataaagacagcagcaactcaagcaagcccccgtcttctgacgggctcaagaagatattcaacagccgcgaaaaaaccggcaggaaacccggcgggcaaatgggccatccgggcagagttccggttctgtttgagaaccccgcgcacattatagaccacaggcgggaaagatgctgttgcggcggcacagtcgcatacggggaagagtatcaggcgaagcagatagtggaactggtaatcagggcggaggtaaccgagcaccgcagttataccggcgtttgcgagcactgcaacgcaacggcacaaaacgatatgccgttacaagacataatcacctacggcgaaacggtaaaagcgtttgccgctatgcttagcagcgaagggctggtctcaataaaccgcatacaggcgatgctttatgaaataaccggcggggcaatcgagctgtccgagggcactattgcgaagtggaacaaggaattaagcggcaaattagcgccatttatcgagaaaattaaggaaaagctgctgacgcagcctgttttgcggaaagacgagacagggatcagagttgccaacatcctgcaatggcttcacgtgctgagcaatgaggcgtatacgctgtatttttcacataaaaagcggggcaatgaagcggacgaagaaaccggcatactgcccgcgtacagcggggttctggtgcacgatcacctcaaagggctgtacagcttcgcctgcggacatgcgggatggcacgcccatatcctgcggtatttgaatccgccgcgaaacaaataa

SEQ ID NO: 28000 - protein, 347 aa, Unknown
  Obtained from environmental sample
  DOMAIN (145)...(333): Transposase IS66 family
  misc_feature (1)..(347): Xaa is any amino acid
MKQALKADKLVEGHIDLGANYGRGLYKQLQETIEQVEKLTAEIRDIKSAHQIEIAGLKAENESLRKENAALRTENQKLKAIINKDSSNSSKPPSSDGLKKIFNSREKTGRKPGGQMGHPGRVPVLFENPAHIIDHRRERCCCGGTVAYGEEYQAKQIVELVIRAEVTEHRSYTGVCEHCNATAQNDMPLQDIITYGETVKAFAAMLSSEGLVSINRIQAMLYEITGGAIELSEGTIAKWNKELSGKLAPFIEKIKEKLLTQPVLRKDETGIRVANILQWLHVLSNEAYTLYFSHKKRGNEADEETGILPAYSGVLVHDHLKGLYSFACGHAGWHAHILRYLNPPRNK

SEQ ID NO: 28001 - DNA, 663 bp, Unknown
  Obtained from environmental sample
  misc_feature (1)..(663): n is a, c, g, or t
ttgatggccgagctgattgatgagcgcgaccgctatcttgccgcaaaaatttgggccgcgaaaaacgaaacaggaagcacccttgccgttgtcggcgcggggcatttgcggggcatacaggcctggctggaaaaattcgcggcggaaccgccgagggacggcagtcttgcggagcttgaaaccattccccaaaagaccctgctttcaaaagccgccaaatggattatccccgtactaatcctggctgttattgccgcgggttttgtcatcagtttttcccgcggtgatttcagtgaatttcaaaatatgctgaagctctgggtgctgtggaacggctcgcttgccgcgctgggctgcattatcgcccttggccatcctctggcaatactggtttcttttttgggcgcgccaatcacctcccttaacccctttatcggcgtgggaattctgtcgggccttgtgcaggccgccgtccgcaagccccgggtctctgacgctgaaaatatttcggcggattcggcaagcctgaaaggcatataccgcaaccggataaccagggttctgctggtattctttttatcaagccttggcagttccatcgcgacatttgtttccggcgcgggggttataaattctttgataaaaatatttaagggagattga

SEQ ID NO: 28002 - protein, 220 aa, Unknown
  Obtained from environmental sample
  misc_feature (1)..(220): Xaa is any amino acid
MMAELIDERDRYLAAKIWAAKNETGSTLAVVGAGHLRGIQAWLEKFAAEPPRDGSLAELETIPQKTLLSKAAKWIIPVLILAVIAAGFVISFSRGDFSEFQNMLKLWVLWNGSLAALGCIIALGHPLAILVSFLGAPITSLNPFIGVGILSGLVQAAVRKPRVSDAENISADSASLKGIYRNRITRVLLVFFLSSLGSSIATFVSGAGVINSLIKIFKGD

SEQ ID NO: 28003 - DNA, 921 bp, Unknown
  Obtained from environmental sample
  misc_feature (1)..(921): n is a, c, g, or t
ttggccggtgaggatacaagcgcttacgcaggctatgatgatataaactatctcgatacaacagaaggttttatagatattcataataacattgtagcttttaattttatgagaaaaaacaccgaagccattacccttgtcgaaaagaacatagtcaaccgtaatgatgttgaaaccgcgctattgcttctgctcgcgggggaagcggctgttaattcaggccttgccgaagaagcaaaaaaatacgcggacatgttacttgatattactacaaggttgtcagatattattttattcgcaagagctctgtctcataaagctcatgtattacgcatgcagaaattattcaaagagtctctggatatgtttaataaagcaaagacgatattcttctctattggaaagttgaattactatttggccaccgaattaaacatagccagaataatgactcagttaggtcaagacgatgaagcggaagctctttataagttcattataaaaatctataacaagactgataacaagcgaaacctcattgcggctatgcagtatctgggaaatctgtattattcaaaagagatgtataaagacgcttatgatttatatattgagactagctacaaagtcaaggaaaacgaagaactaaacttatacggcggaattcttaacaatatcgctctttgtgccagcaaattaggaaacaatgaagaagccgaaagatgttttatcggtgcttttgaaactgctaaagagctggataactattacgatcttcanatggcgtctgcgggtataatagcgttttacgaagataataatttgttctcaaaggcgttaaaatatatccgtgaagtgcaggattatctgataaacaaggggagatatgatgtcctcaaagatcttattaaggagagatag

SEQ ID NO: 28004 - protein, 306 aa, Unknown
  Obtained from environmental sample
  misc_feature (1)..(306): Xaa is any amino acid
MAGEDTSAYAGYDDINYLDTTEGFIDIHNNIVAFNFMRKNTEAITLVEKNIVNRNDVETALLLLLAGEAAVNSGLAEEAKKYADMLLDITTRLSDIILFARALSHKAHVLRMQKLFKESLDMFNKAKTIFFSIGKLNYYLATELNIARIMTQLGQDDEAEALYKFIIKIYNKTDNKRNLIAAMQYLGNLYYSKEMYKDAYDLYIETSYKVKENEELNLYGGILNNIALCASKLGNNEEAERCFIGAFETAKELDNYYDLXMASAGIIAFYEDNNLFSKALKYIREVQDYLINKGRYDVLKDLIKER

SEQ ID NO: 28005 - DNA, 969 bp, Unknown
  Obtained from environmental sample
  misc_feature (1)..(969): n is a, c, g, or t
ttgcccatcaggcaaacncttttaaaatacgaagacgcgcgcaggcaggtttctattcagataacaaaaaggttctattcgttaatcgcggaaaaaaacaatttactgcttcttgaggaagttcttaatcttgcgcaaaggcagtttgaaagaaacgaagtctctttcagaaacgggcttgtaagggagcttgccgtaatacagagcaggctggccgttgagaacgcgcgttataaccttagcgcggcaaacacggcttatgcaaacagcatgggggattttcttgcgacgctgggcattgcctcagatgaccttgtatcattgttaggtgagattaagattacaaaaataaacgcaaacgcggacgcgctnatcggcgggtatcttccgggaagacctgatattgtaagctcaaaacgcgaaatcgaaaggcttattaacgcgcaaaagcagtcattattacaaaaccgcgccccttctcttactttatcaatggattggagtacgtcaaaattcagcccttttaccgattcattcagcgcgaccgcgcgccttagcattccgatagacccgtgggtgccgggcacttcaaaggatcagacagtccgcaaggcgtccgattcaattgaaaaggcaaagcttgatttaacaattacggaagattcggcgaagacgcagatccgttccttgtgcgcgcagcttgccaattcatgggacagtatcttaatcgcccgtcttggtctggaagcggcgcagataggctaccagctgacggaacaggggttcagaagcggaacagttgaatctcttgtgcttgaagacgcgcgtaacaatatggcaaacgcgagacatcgtttattgcagacggaactttcctattttaatatgatacttgacctttcctcggccattaacatggattggaaaaaccttatagaaacattcggagtgccaagtgaaaaagaataa

SEQ ID NO: 28006 - protein, 322 aa, Unknown
  Obtained from environmental sample
  DOMAIN (121)...(305): Outer membrane efflux protein
  misc_feature (1)..(322): Xaa is any amino acid
MPIRQTLLKYEDARRQVSIQITKRFYSLIAEKNNLLLLEEVLNLAQRQFERNEVSFRNGLVRELAVIQSRLAVENARYNLSAANTAYANSMGDFLATLGIASDDLVSLLGEIKITKINANADALIGGYLPGRPDIVSSKREIERLINAQKQSLLQNRAPSLTLSMDWSTSKFSPFTDSFSATARLSIPIDPWVPGTSKDQTVRKASDSIEKAKLDLTITEDSAKTQIRSLCAQLANSWDSILIARLGLEAAQIGYQLTEQGFRSGTVESLVLEDARNNMANARHRLLQTELSYFNMILDLSSAINMDWKNLIETFGVPSEKE

SEQ ID NO: 28007 - DNA, 327 bp, Unknown
  Obtained from environmental sample
  misc_feature (1)..(327): n is a, c, g, or t
gtggccggatcgctttcgggcggggagaggcggcgcacggagattgctcgcgctttggcgacggagcctaaattcctgctattggacgagccttttgccggtattgatcctattgcggtttacgagatcaagcagattatacgccgccttgccgaaaagggcataggcatacttattaccgaccacaatgtccgcgacactttggagattaccacggaggcgtttatcatcgcggagggttcgattgtcgccaggggcggacgggaggatattttggctaacgagatggtacgggaagtgtacctgggagcggagtttaagatgtag

SEQ ID NO: 28008 - protein, 108 aa, Unknown
  Obtained from environmental sample
  DOMAIN (1)...(80): ABC transporter
  misc_feature (1)..(108): Xaa is any amino acid
MAGSLSGGERRRTEIARALATEPKFLLLDEPFAGIDPIAVYEIKQIIRRLAEKGIGILITDHNVRDTLEITTEAFIIAEGSIVARGGREDILANEMVREVYLGAEFKM

SEQ ID NO: 28009 - DNA, 876 bp, Unknown
  Obtained from environmental sample
  misc_feature (1)..(876): n is a, c, g, or t
ttgctcgtcttcgccgccggccagcacatcacgcgccgcgacggggccgatgtagtgttcaatagggcgcagagcacgatggaaagcataaaaaacatgagcaaggatgagattttcagggtcaacctgcggcagtatatagcggagcccggcgtaaagctgggtaacaacaccaacctgatgatgacgccgagaaaccaaggctacgtgagcgccgtggagaccatggagggctacaaccaattccgcctcaaatacgccgtgctgccgctggacggctctaaattcaacaccatgctcgacctaatgaacgtcaggtactatctggacccgtcctcaaaagacggcggcgacgccgccgtactgcgcaacgaaacctgtttgccgcgcgcgaagctgttttataaggccgttgtcgttgacggtgttaatagtattgataataagagtattaataatgacggtacggattcattgataatcaattatatgaacagcccgaactacaatcaccgcagcgaagtcgtagttacagacccaagcctatcgaaattctccggcggcgccggaaccggttcggtgaaaatcgttaagcgtgattttaataggatagagctggacgttaataccgacaaagaggcgatcctatggttgagcgaaatttggtatcccgcgtggaaagcgacggtcaacgggaaaaaagtagacatcttcagagcgaattacagcttcagagcggtaaccgtccccgccggcacgtcgaaagtcgtattcaaattcgattctaccctattcaatatcggggctcttataagtttattgacactactatcagcattgacgtatctgacgatagtgtttatcaagaggaaataa

SEQ ID NO: 28010 - protein, 291 aa, Unknown
  Obtained from environmental sample
  misc_feature (1)..(291): Xaa is any amino acid
MLVFAAGQHITRRDGADVVFNRAQSTMESIKNMSKDEIFRVNLRQYIAEPGVKLGNNTNLMMTPRNQGYVSAVETMEGYNQFRLKYAVLPLDGSKFNTMLDLMNVRYYLDPSSKDGGDAAVLRNETCLPRAKLFYKAVVVDGVNSIDNKSINNDGTDSLIINYMNSPNYNHRSEVVVTDPSLSKFSGGAGTGSVKIVKRDFNRIELDVNTDKEAILWLSEIWYPAWKATVNGKKVDIFRANYSFRAVTVPAGTSKVVFKFDSTLFNIGALISLLTLLSALTYLTIVFIKRK

SEQ ID NO: 28011 - DNA, 582 bp, Unknown
  Obtained from environmental sample
  misc_feature (1)..(582): n is a, c, g, or t
atgaacacaaacccggtaaccgcttatctggcgtcaactccgcctgaaaaggtgaatataagtcttttagcctatctctgcaaccttaccgagaccgcgaaatcagcgccggaaatttcccattccattgtcagggaactggaaaaccagagaaaacggattaaacttattgccagtgaaaattactgttccatggcggtacagcttgccatgggaaaccttttgaccgacaaatacgccgaaggttttcccggccaccgtttttacgcggggaatgaaaatgtggacgctgtcgagtcccttgcccagaaggaagcccgcgaactttttggcgcggaatacgcgaatgtgcagccccattgcggcgcggacgcgaacgtgcttgcctattgggcggttcttcaaaccagagtcgagaaaaccctgatagaaaaattttcacgcctcagcggaaaccaaaatatnacctgtataaaatttcagacagccaatggaaaggactcaggctgcctttggaaaccagcgcatgttggggcaggattactattccggcgggcatttgacccacggttaccgttataa

SEQ ID NO: 28012 - protein, 193 aa, Unknown
  Obtained from environmental sample
  DOMAIN (32)...(193): Serine hydroxymethyltransferase
  misc_feature (1)..(193): Xaa is any amino acid
MNTNPVTAYLASTPPEKVNISLLAYLCNLTETAKSAPEISHSIVRELENQRKRIKLIASENYCSMAVQLAMGNLLTDKYAEGFPGHRFYAGNENVDAVESLAQKEARELFGAEYANVQPHCGADANVLAYWAVLQTRVEKTLIEKFSRLSGNQNXTCIKFQTANGKDSGCLWKPAHVGAGLLFRRAFDPRLPL

SEQ ID NO: 28013 - DNA, 711 bp, Unknown
  Obtained from environmental sample
  misc_feature (1)..(711): n is a, c, g, or t
atggttcacgttgatcagcaaaaggtggttgtcggttccgccggtaagcacctcaaggccgttcttcatgcaggcggcagccagatcgcggcagttttcaacaatgcgttgcgcgtaacgcttgaattccggcgaggcggcctcgcggaaggaaaccgccttggcggcgataacgtggggcagagggccgcccatggtcagcgggcagccgtgatccagagcttcggcaaattccgttttcgagagaaccaggccggcgcgggggccgcgcagggtcttatgcgtcgtggaagttacaatatgcgcccagggaacgggatcatattccccggtaaaaaccttgcccgccacaaggccggcgaagtgcgccatgtcaaccataaagaccgcgccggctttgtcggcaatctccctcatccgcttaaaattgatcttgcgggggtaggccgaataaccagccagcagaatcaacggccttacctcaagcgcctgtttttcaatttgatcatagtcaagaagcccggtttccctggacaccgagtagccgtacacatcaaaaagttttcccgaaaggttataacggtaaccgtgggtcaaatgcccgccggaatagtaatcctgccccaacatgcgctggtttccaaaggcagcctgagtcctttccattggctgtctgaaattttatacaggtnatattttggtttccgctga

SEQ ID NO: 28014 - protein, 236 aa, Unknown
  Obtained from environmental sample
  misc_feature (1)..(236): Xaa is any amino acid
MVHVDQQKVVVGSAGKHLKAVLHAGGSQIAAVFNNALRVTLEFRRGGLAEGNRLGGDNVGQRAAHGQRAAVIQSFGKFRFRENQAGAGAAQGLMRRGSYNMRPGNGIIFPGKNLARHKAGEVRHVNHKDRAGFVGNLPHPLKIDLAGVGRITSQQNQRPYLKRLFFNLIIVKKPGFPGHRVAVHIKKFSRKVITVTVGQMPAGIVILPQHALVSKGSLSPFHWLSEILYRXYFGFR

SEQ ID NO: 28015 - DNA, 915 bp, Unknown
  Obtained from environmental sample
  misc_feature (1)..(915): n is a, c, g, or t
atggcaatacaacancctgacatccagcctgctgttaaccatagcgttcaggtggcgatcgctggtgccggcccggttgggctgatgatggcgaactatctcggccagatgggcattgacgtgctggtggtggagaaactcgataagttgatcgactacccgcgtgcgattggtattgatgacgaggcgctgcgcaccatgcagtcggtcggcctggtcgatgatgttctgccgcacactacgccgtggcacgcgatgcgttttctcaccccgaaaggccgctgttttgctgatattcagccaatgaccgatgaatttggctggccgcgccgtaacgcctttattcagccgcaggtcgatgcggtgatgctggaaggggtgtcgcgttttccgaatgtgcgctgcttgttttcccgcgagctggaggccttcagtcagcaagatgacgaagtgaccttgcacctgaaaacggcagaagggcagcgggaaatagtcaaagcccagtggctggtagcctgtgacggtggagcaagttttgtccgtcgcactctgaatgtgccgtttgaaggtaaaactgcgccaaatcagtggattgtggtagatatcgccaacgatccgttaagtacgccgcatatctatttgtgttgcgatccggtgcgcccgtatgtttctgccgcgctgcctcatgcggtacgtcgctttgaatttatggtgatgccgggagaaaccgaagagcagctgcgtgagccgcaaaatatgcgcaagctgttaagcaaagtgctgcctaatccggacaatgttgaattgattcgccagcgtgtctacacccacaacgcgcgactggcgcaacgtttccgtattgatcgcgtactgctggcgggcgatgccgcgcacatcatgccggctcggccataa

SEQ ID NO: 28016 - protein, 304 aa, Unknown
  Obtained from environmental sample
  DOMAIN (15)...(302): FAD binding domain
  misc_feature (1)..(304): Xaa is any amino acid
MAIQXPDIQPAVNHSVQVAIAGAGPVGLMMANYLGQMGIDVLVVEKLDKLIDYPRAIGIDDEALRTMQSVGLVDDVLPHTTPWHAMRFLTPKGRCFADIQPMTDEFGWPRRNAFIQPQVDAVMLEGVSRFPNVRCLFSRELEAFSQQDDEVTLHLKTAEGQREIVKAQWLVACDGGASFVRRTLNVPFEGKTAPNQWIVVDIANDPLSTPHIYLCCDPVRPYVSAALPHAVRRFEFMVMPGETEEQLREPQNMRKLLSKVLPNPDNVELIRQRVYTHNARLAQRFRIDRVLLAGDAAHIMPARP

SEQ ID NO: 28017 - DNA, 609 bp, Unknown
  Obtained from environmental sample
  misc_feature (1)..(609): n is a, c, g, or t
gtggcgcaattaagcgaaggatttcgtgacgaacagtggatttctgcactggcggccccactgctgggcgatctgttgcgcgaagtggtatggccgacagatgtgtccacgctggatgttgatgcaatggtggtacgcgaaaccactcaccgtttcagccgcttatcctttcaccgggcaatggtcgggcgacgtttgccgcttctgaaaaccgcctcgggcctgacctggctggccttttgcccggaacaagaccgcaaggaattaatcgaaatgttagcctcccgccccggtgatgactatcaactggcacgggaaccgttaaagctggaagccattctggcgcgcgcgcgcaaagagggttacggacagaactaccgcggctgggatcaggaggagaagatcgcctctatcgccgtaccgctgcgcagtgaacaacgggtgattggctgtctgaatctggtgtatatggcgagcgcaatgaccattgaacaggcagcggaaaagcatcttccggcgctacaacgggtagcaaaacagatcgaagaaggggttgaatcgcaggctattctggtggccggaaggcgaagcggcatgcatttacgttga

SEQ ID NO: 28018 - protein, 202 aa, Unknown
  Obtained from environmental sample
  DOMAIN (54)...(184): Bacterial transcriptional regulator
  misc_feature (1)..(202): Xaa is any amino acid
MAQLSEGFRDEQWISALAAPLLGDLLREVVWPTDVSTLDVDAMVVRETTHRFSRLSFHRAMVGRRLPLLKTASGLTWLAFCPEQDRKELIEMLASRPGDDYQLAREPLKLEAILARARKEGYGQNYRGWDQEEKIASIAVPLRSEQRVIGCLNLVYMASAMTIEQAAEKHLPALQRVAKQIEEGVESQAILVAGRRSGMHLR

SEQ ID NO: 28019 - DNA, 996 bp, Unknown
  Obtained from environmental sample
  misc_feature (1)..(996): n is a, c, g, or t
atgcagttttttaggaaagcagaagttgtatatttacactggacgtattatacgccggattccattattcaaaaatttgaaagtgaatttaataccagaataatttacgacgaatttgcctctaacgaggatatgttcgctaaattaaaatccagcaggtccaagcggggcagttacgacattgtgttcccgtccaaggattttgtgcctattatgatcaggcaaaatatgctggaaaaaatcgacagtacaaaaataccaaacttaaaaaacattgacccggatcttttaaaaagagccaattatgatcctaacatggaatattccgtaccatatttctacggtgccgcgggcattatagtaaataccgcaaaggttcctgtttatgaaaacagctggtccattttcgcgaggcaggacttaagaggccgtatgacaatgcttgacgatatgcgcgaagtattcggcggcgcgcttgcttatctgggctattcggtgaataccgtagagcctgcgcgcgttaccgccgccataaacattattaacaactcatggaaacccaaccttgtaaaattcgactccgaggcttttgccaaaggatacgccaacggcgatttttgggtagtacacgccttccccgaagctgtctttgaggaaatagaaaataacgaacagctgttaaaggacactgttttctttatccctcgcgagggggggccgtcttatattgacagcatgtgcatttttaaggaagccagaaatatagaaactgctcataaatttattgactttatccaccgccctgaaatttacgcggagtttgccgacatctttggttttcctgcaaccgcaaatatccctgcgcgtagttttaaaaccggagactcatggtataccgaagcggaacttgccaatgtagaagtaaagaaagatattggaaatgatctggaactctataacgaagcatggttcaattcgataagaattgacaaatga

SEQ ID NO: 28020 - protein, 331 aa, Unknown
  Obtained from environmental sample
  misc_feature (1)..(331): Xaa is any amino acid
MQFFRKAEVVYLHWTYYTPDSIIQKFESEFNTRIIYDEFASNEDMFAKLKSSRSKRGSYDIVFPSKDFVPIMIRQNMLEKIDSTKIPNLKNIDPDLLKRANYDPNMEYSVPYFYGAAGIIVNTAKVPVYENSWSIFARQDLRGRMTMLDDMREVFGGALAYLGYSVNTVEPARVTAAINIINNSWKPNLVKFDSEAFAKGYANGDFWVVHAFPEAVFEEIENNEQLLKDTVFFIPREGGPSYIDSMCIFKEARNIETAHKFIDFIHRPEIYAEFADIFGFPATANIPARSFKTGDSWYTEAELANVEVKKDIGNDLELYNEAWFNSIRIDK

SEQ ID NO: 28021 - DNA, 597 bp, Unknown
  Obtained from environmental sample
  misc_feature (1)..(597): n is a, c, g, or t
ttgagaataaaattcagctatattgtacttgcggcggcgcttttaatgcccgccattgtatcctgcggtttttttggaaagcaaaagttgtatatttacaactggacgtactatacaccggattctattattgaaaaatttgagaaagaatttaacaccagaataatttatgacgaatttgcctctaacgaggatatgttcgccaaacttaaatccagcagatctaagaggggcagttacgacattgtattcccgtcaaaagattttgtaccgattatgatcaggcaaaacatgctggaaagaatcgataaatcaaaaattccaaacttaaaaaacatcgatccggaactgttgaaaagagccaactatgatccgaatatggaatattccgttccctatttttacggagcggccggaatagtagtaaacaccgccagagtaagcgattatgaaacaagctggtcaattttcgcaaggcatgaccttcgcggccgcatgacaatgcttgacgatatgcgcgaagtattcggcggcgcgcttgcttgtttgggctattcggtaaatacggtagaccccgcccatgtaacggcgccatga

SEQ ID NO: 28022 - protein, 198 aa, Unknown
  Obtained from environmental sample
  SIGNAL (1)...(26)
  misc_feature (1)..(198): Xaa is any amino acid
MRIKFSYIVLAAALLMPAIVSCGFFGKQKLYIYNWTYYTPDSIIEKFEKEFNTRIIYDEFASNEDMFAKLKSSRSKRGSYDIVFPSKDFVPIMIRQNMLERIDKSKIPNLKNIDPELLKRANYDPNMEYSVPYFYGAAGIVVNTARVSDYETSWSIFARHDLRGRMTMLDDMREVFGGALACLGYSVNTVDPAHVTAP

SEQ ID NO: 28023 - DNA, 639 bp, Unknown
  Obtained from environmental sample
  misc_feature (1)..(639): n is a, c, g, or t
gtgaagataggtactcagacttggatggcacagaatttaaactacaacgcaacgaatagcgtatgttacaataatttatcctccaactgtacgacttacggcaggctttacaactgggctactgctatgaatttgtctgtcacttgcaacagcagtacttgcgctacccaagtgcaatcaaagcatcagggcatttgccccagcggttggcatatcccaagcgatgcggattggaataaactgcttctttatgtggatttggagaacgatgggaatgggtcttatacttatgaggggcagtacgagagttggactgctggcaaatatttgaagtcgaagactggctggaaaaattctggtaatggtgaggacaaatacggttttacggctctgccgggcggtctcttagagcctggagcttattcaagagccggttatgtcagccatatgtggagttcctatgaatacgaaatagaagacggaggcaaaacctactgctatgacatggataatactctatgttatgaaatcccagaaagcgaaatcggcgcttcgaccattatctacggctacgattcggtaatgataagtggcggtaaggagggccactttagaagtgttcgttgcatcaaggactga

SEQ ID NO: 28024 - protein, 212 aa, Unknown
  Obtained from environmental sample
  misc_feature (1)..(212): Xaa is any amino acid
MKIGTQTWMAQNLNYNATNSVCYNNLSSNCTTYGRLYNWATAMNLSVTCNSSTCATQVQSKHQGICPSGWHIPSDADWNKLLLYVDLENDGNGSYTYEGQYESWTAGKYLKSKTGWKNSGNGEDKYGFTALPGGLLEPGAYSRAGYVSHMWSSYEYEIEDGGKTYCYDMDNTLCYEIPESEIGASTIIYGYDSVMISGGKEGHFRSVRCIKD

SEQ ID NO: 28025 - DNA, 819 bp, Unknown
  Obtained from environmental sample
  misc_feature (1)..(819): n is a, c, g, or t
atgaagagcgacagggacggcatacgttttgccgaccttgaatggaaagagaagatggaacagctcgataaagttgatcgggattttcttgttccgtacattgataaactaaggcccatggtcatcgaccttgctacttttatatcgcaccgaaagaatatgcagatactttttgaaggcgctcagggaacgcttcttgatctggatcacggaacctatccttatgtgtcaagcggtacatcctgcgcggcaggggctgcccttggaggctgcataggtccgcgggcgctggacaaggttatcggggttttcaaggcttactcaaccagagtgggcaacgggccctttcccagcgaatttaacgatacttccgaagatgagctttgccgctttatcagggatacaggcagggaatacggcgttactaccggaaggccaagaaggtgcggctacctggatctggtagcgttgcgctacgcctgcctgactaattccttcgatagccttgttatgacccatctggatgtatatgacacccttggcgaaataaaagcctgcgtggcttaccgtattaacggcaaagtggtggaaagtttccccacttcaatcgacgcccttaacaacgcggaacctgtgcttcgcagttttccgggctggaagaaaccattgtcaaacgcgcttacatatacggagttccccattgaagcaatggagtacatcgcgtttattcagcgtttctgtgaaacgccaattgagattgtttcggtgggctatgaacggaaagaaaccattgtcataaaaagcccctggacgcggtaa

SEQ ID NO: 28026 - protein, 272 aa, Unknown
  Obtained from environmental sample
  DOMAIN (2)...(265): Adenylosuccinate synthetase
  misc_feature (1)..(272): Xaa is any amino acid
MKSDRDGIRFADLEWKEKMEQLDKVDRDFLVPYIDKLRPMVIDLATFISHRKNMQILFEGAQGTLLDLDHGTYPYVSSGTSCAAGAALGGCIGPRALDKVIGVFKAYSTRVGNGPFPSEFNDTSEDELCRFIRDTGREYGVTTGRPRRCGYLDLVALRYACLTNSFDSLVMTHLDVYDTLGEIKACVAYRINGKVVESFPTSIDALNNAEPVLRSFPGWKKPLSNALTYTEFPIEAMEYIAFIQRFCETPIEIVSVGYERKETIVIKSPWTR

SEQ ID NO: 28027 - DNA, 600 bp, Unknown
  Obtained from environmental sample
  misc_feature (1)..(600): n is a, c, g, or t
gtgggcagccgcactagagacaaaggggtgctgctcttcgcccaaaacgcgctggacaagccaaagggcgcgtacacgggcgaagtcagcatggcgcaattgaaggacgtgggatgccacggcgtgatactggggcactcagagcgccgccagtactatggggaaacagagaccacgctcacgccaaaaatcgccgccgcgatggaacatggtctgctgccgctgttctgcataggcgagacgctggcccagcgcgaggcaaacgaaaccctcgaagtcgtcagccgccagttggctatactctcccaagtgggcaatagtcccatctggatagcatacgagccggtctgggccataggcacgggccgcgtcgccacgccggcgcaagtggaagaagtccacgtcttcatcagaaaagagctagtccgcctcaaaggcgagcctgggcgcgaaatccccatactctatggcggtagcgtcacgcccgacaacttcccagagctgctgcaaacgaaagaagtggctggcggactggtgggcggcgcgagcctcgacccggcaaagttcagcaagttggtcggacaggcacagggccaataa

SEQ ID NO: 28028 - protein, 199 aa, Unknown
  Obtained from environmental sample
  DOMAIN (1)...(193): Triosephosphate isomerase
  misc_feature (1)..(199): Xaa is any amino acid
MGSRTRDKGVLLFAQNALDKPKGAYTGEVSMAQLKDVGCHGVILGHSERRQYYGETETTLTPKIAAAMEHGLLPLFCIGETLAQREANETLEVVSRQLAILSQVGNSPIWIAYEPVWAIGTGRVATPAQVEEVHVFIRKELVRLKGEPGREIPILYGGSVTPDNFPELLQTKEVAGGLVGGASLDPAKFSKLVGQAQGQ

SEQ ID NO: 28029 - DNA, 609 bp, Unknown
  Obtained from environmental sample
  misc_feature (1)..(609): n is a, c, g, or t
ttgaggaacgcttggcaaaacgcctcagcgtcggcacgcaggtggttcatcttccagttggctactaccgcctttggtgctttcatctatagctccagtgccttcacgccgggaagctctatgcccgacaaaaattcaaggctggcaccgccgccagtgctgatgtgcgttatgcgggacgccacgccagctttgttgacggcggccacgctgtctccgccgcccaccagcacgaacgcgcctgaatccgccgcttttgccatttcttcggctatggtcagggttccggttgcaaatggattcatttcaaagacgcccatgggaccgttccagattagggtcttagcgcccttgatttcggccagatacgcggctatcgtttcgggccctatgtccagccccatttgtccatcggggatgtccacgccgttggtgatcgaggcgggcgagtcctctttgaactctggtgccaccacgtggtcaaggggcagcagcagctttgtgcccttggcttttgcctccgccaatatctctttggagtgctccagcttgtcctcttcgcaaaggctcttgcctatttgtttgcccatggcttttagaagcgtgtag

SEQ ID NO: 28030 - protein, 202 aa, Unknown
  Obtained from environmental sample
  misc_feature (1)..(202): Xaa is any amino acid
MRNAWQNASASARRWFIFQLATTAFGAFIYSSSAFTPGSSMPDKNSRLAPPPVLMCVMRDATPALLTAATLSPPPTSTNAPESAAFAISSAMVRVPVANGFISKTPMGPFQIRVLAPLISARYAAIVSGPMSSPICPSGMSTPLVIEAGESSLNSGATTWSRGSSSFVPLAFASANISLECSSLSSSQRLLPICLPMAFRSV

SEQ ID NO: 28031 - DNA, 540 bp, Unknown
  Obtained from environmental sample
  misc_feature (1)..(540): n is a, c, g, or t
ttggcggcgccactgagctacacgcttctaaaagccatgggcaaacaaataggcaagagcctttgcgaagaggacaagctggagcactccaaagagatattggcggaggcaaaagccaagggcacaaagctgctgctgccccttgaccacgtggtggcaccagagttcaaagaggactcgcccgcctcgatcaccaacggcgtggacatccccgatggacaaatggggctggacatagggcccgaaacgatagccgcgtatctggccgaaatcaagggcgctaagaccctaatctggaacggtcccatgggcgtctttgaaatgaatccatttgcaaccggaaccctgaccatagccgaagaaatggcaaaagcggcggattcaggcgcgttcgtgctggtgggcggcggagacagcgtggccgccgtcaacaaagctggcgtggcgtcccgcataacgcacatcagcactggcggcggtgccagccttgaatttttgtcgggcatagagcttcccggcgtgaaggcactggagctatag

SEQ ID NO: 28032 - protein, 179 aa, Unknown
  Obtained from environmental sample
  DOMAIN (1)...(177): Phosphoglycerate kinase
  misc_feature (1)..(179): Xaa is any amino acid
MAAPLSYTLLKAMGKQIGKSLCEEDKLEHSKEILAEAKAKGTKLLLPLDHVVAPEFKEDSPASITNGVDIPDGQMGLDIGPETIAAYLAEIKGAKTLIWNGPMGVFEMNPFATGTLTIAEEMAKAADSGAFVLVGGGDSVAAVNKAGVASRITHISTGGGASLEFLSGIELPGVKALEL

SEQ ID NO: 28033 - DNA, 534 bp, Unknown
  Obtained from environmental sample
  misc_feature (1)..(534): n is a, c, g, or t
gtgagcgccgtcttagccggcatacacaggatggttagcgaaaaaaagagcgagataagcgtgggcggcatgtcaacaaagctgaaagccgccgagatggtcacgcgagccggcattccggcgctcatcggcgacggcttcaaccagagcctgctgacggtgctgaccgacgagtccagcgcgacgctcttcctgccgtccgcaaaaaaaatcccgtcaaggcagcgctggatagcctttaccgggcaaccggcggggagcgtgaccgtggatgccggcgcgtctaaggcggtaacggaacggggcaaaagcctgctggccgccggaatcacatcggtcagcggaaggttcaacgccggagacatggttgacatcgtcaatccgcagggggatgtcatagccaaaggattggtaaatttttctgcggacgagattgaggctatacgcgggtgcaagacggcggaggtggagaaaaagctcggcgcagtaaggttcaacgaggtcatactaagggataatatagtagtttcatag

SEQ ID NO: 28034 - protein, 177 aa, Unknown
  Obtained from environmental sample
  DOMAIN (86)...(160): PUA domain
  misc_feature (1)..(177): Xaa is any amino acid
MSAVLAGIHRMVSEKKSEISVGGMSTKLKAAEMVTRAGIPALIGDGFNQSLLTVLTDESSATLFLPSAKKIPSRQRWIAFTGQPAGSVTVDAGASKAVTERGKSLLAAGITSVSGRFNAGDMVDIVNPQGDVIAKGLVNFSADEIEAIRGCKTAEVEKKLGAVRFNEVILRDNIVVS

SEQ ID NO: 28035 - DNA, 1095 bp, Unknown
  Obtained from environmental sample
  misc_feature (1)..(1095): n is a, c, g, or t
atgaaaacgctgtatttaatatttattttctttgttttttgcggcattttgagctttggtgagaatgacacgcatgaagaagtagagttcttgctgtttttgccaaacagcagtaataactttgtaaatgaagaacaatcctttattcagcttgataaactggcgcggtatttatcgaataaaaatcttaatcccggtcaaattattgtttatgggtatgccgcattctccccaattgatattgagcctattgatctgtcaagagaaagggctttttttgtaataaaagaacttcaaaaacgcggaatttcagaagagttgttttcagagccagtaggatacggatcggtgtatctatggggtgacaataccgatgaaaatgacagaaaactcaatagacgcgttagaattttattaggcggtgaatctcccatacaaattactcaggaaattattaacaatgaaacagaaaccgtaatttctgacagggcgcaagaagcgccgattacgcagaaagatacgccggaaaaatcaagttttaaattcccatggtggcttttgcttctgttgcttattttgcttcttctgcttctaattcttaaaaaaagatccaaaaaaacgacacataaaaatgtaactgaaaatacgcagccgcagattccaaaaacagatacagcgcctaaatcggtaaccgctcctgttcctgcggctgcttccgctcccgaaccagtaccctctcccgctcatactcccgaaccggttcctgctcccgtagttgcttctgttcctccggctgttcccacgcccgaaccagcaccaactcctgctcccaaacctgttcccactcctatagttatccctgtatcggaaactaaacctgaaacggcagcgccttctcccgcaattaaaacaattacggtgaatctggatgaagaaattcgtctttgcgcttatgaatattttctgcggcgtaacggagagggcgattatcgggatcaggactggtatgacgctntacgtgaagtatccgcaaggtatacgccccaaagctattccgttttttttgacaacgggtactggtggggcaaacgttag

SEQ ID NO: 28036 - protein, 364 aa, Unknown
  Obtained from environmental sample
  SIGNAL (1)...(20)
  DOMAIN (32)...(133): OmpA family
  misc_feature (1)..(364): Xaa is any amino acid
MKTLYLIFIFFVFCGILSFGENDTHEEVEFLLFLPNSSNNFVNEEQSFIQLDKLARYLSNKNLNPGQIIVYGYAAFSPIDIEPIDLSRERAFFVIKELQKRGISEELFSEPVGYGSVYLWGDNTDENDRKLNRRVRILLGGESPIQITQEIINNETETVISDRAQEAPITQKDTPEKSSFKFPWWLLLLLLILLLLLLILKKRSKKTTHKNVTENTQPQIPKTDTAPKSVTAPVPAAASAPEPVPSPAHTPEPVPAPVVASVPPAVPTPEPAPTPAPKPVPTPIVIPVSETKPETAAPSPAIKTITVNLDEEIRLCAYEYFLRRNGEGDYRDQDWYDAXREVSARYTPQSYSVFFDNGYWWGKR

SEQ ID NO: 28037 - DNA, 1305 bp, Unknown
  Obtained from environmental sample
  misc_feature (1)..(1305): n is a, c, g, or t
atggtaaccctcaaaacaataatggttagggaaaaacccaagggttacatacttattatgtccgatgtaagcgtttaccattccatgatttcggaaataaacattcaaaatgcgcggcttgcggaacttcgtagggaagcggaagcggcatcaatggcaaaaggcgctttccttgcgaacatgagtcatgaaatacgcaccccccttaacgcggtgattggcatggcccttatcgcccaaaagaacgctgaaagtcaaaaaacattgtcggcaattaaagagatagaaaccgcttccgtacatcttttgggattactgaacaacgtgttggatatgtcaaaaatcgaatcaggcaaattcgagcttatcaatgaatcattttctttaaagaccgccatggacgaggtggtgaatcttataacgcttcgttgcgctgaaaaaaacatacgtctggaaactaatttagaaaatattaaaaattaccgcattatgggggacaaattgcggcttaatcaaatactgataaatctgctgggaaacgccgtaaaatttaccgcaaaggacagcatggtaattttttccctcaaagcgcgggaagaagaagcgtccgtaaaaatacaatttataatttcagataacggtatcggaatgtccgatgaacagatgagccgtctttttcaatctttcagtcagggggattccggtatttttaaccagtatggcggaacagggctgggactgtcaataagccagaatcttgcaaaaatgatgggcgggcatatcacggtaaaaagcaaaccgggcgaaggttccacatttgaatttaagctgtgtttcccgattgttgaagaaaagcaggagaaagccgtcggagaaattacccttgatctttccggcaagcgcatacttatcgtggaagacgtgcagataaaccgctatattttaacggagcttcttgcggataccaatgtggaaattgatgaagccctggacggggaggcggccgtcgccctttttagcgggaagccgcaaaattattacgatcttatctttatggatatacagatgcccataatggacggctatgaagccacccgtcaaatcagggccgtcgaagcggaaataattaaggatgaagaaactaaaggcggtaaaggacagtacgggcaaatacccattattgccatgacagctaacgcatacaaggaagacattgaaagagcccttgcctcaggaatgaacggtcatctggcaaaacccattgatatcaacgccgtaatgcatactctcgcggaaataatatag

SEQ ID NO: 28038 - protein, 434 aa, Unknown
  Obtained from environmental sample
  DOMAIN (53)...(118): His Kinase A (phosphoacceptor) domain
  misc_feature (1)..(434): Xaa is any amino acid
MVTLKTIMVREKPKGYILIMSDVSVYHSMISEINIQNARLAELRREAEAASMAKGAFLANMSHEIRTPLNAVIGMALIAQKNAESQKTLSAIKEIETASVHLLGLLNNVLDMSKIESGKFELINESFSLKTAMDEVVNLITLRCAEKNIRLETNLENIKNYRIMGDKLRLNQILINLLGNAVKFTAKDSMVIFSLKAREEEASVKIQFIISDNGIGMSDEQMSRLFQSFSQGDSGIFNQYGGTGLGLSISQNLAKMMGGHITVKSKPGEGSTFEFKLCFPIVEEKQEKAVGEITLDLSGKRILIVEDVQINRYILTELLADTNVEIDEALDGEAAVALFSGKPQNYYDLIFMDIQMPIMDGYEATRQIRAVEAEIIKDEETKGGKGQYGQIPIIAMTANAYKEDIERALASGMNGHLAKPIDINAVMHTLAEII

SEQ ID NO: 28039 - DNA, 1623 bp, Unknown
  Obtained from environmental sample
  misc_feature (1)..(1623): n is a, c, g, or t
atggcccgtaaatatcctgaagttctgcgtgtgaatacggacggatccaaacgaaaattcggcgacaggcagaattcctgtcccaacagcccaatataccgccggtactcaacgctgctggcccgtaaactggcggaacgttacggcaaactcgacaaccttgccgcctggcatatctccaatgaatacggcggttattgttactgcgaaaattgtgaaaaagcttttcgtaaatggcttgagcggaaatataaaacaatagcggcgttaaacgaagcgtggaacacggctttttggggacacacttactacgaatgggacgatattgtcataccaagttatttgggcggagagtggccgtataaccgcagttcctgccagatacagtccattgactacagacgcttcaattccgacagcctgctggaatgctgccttgccgaggccgctgttttaagagaggtaaaccccaatatcccaattacaaccaacatgatggggactttttgggatttggattattttaagtggggaaaaaatatggattttatttcctgggacaattatccttcgccggggactccctatacccgcaccgccatgaaccacgcgcttatgcggggctgcggcgggggcaagcctttctggttgatggaacaaacgcccagcgttaccaattggcagccctataattccctcaaacgtcccggtgttatgcgcttgttgagctatcaggcgcttgcccacggctcggacacggtgatgttttttcagatgcgccgttcccgcggctgctgcgaaaaattccacggggctgttatcgatcactatgcaactgaaaacacgcgggtattccgcgaagttgccgctttgggagaagaactaaaaaaactgggcgatgtgtttttggacagcgttcttgtttccgaagcggcggttctttacgactgggacaactggtgggcaacgcagctgtcagcaggaccgactgttgaaatgaattatcccgaagaagtttacagatattacaatgcgattgcgaagcaaaatatttccgtagatataataggcgttgacactcctcttgaaaaatacaaggttctttttgcgcctgtgctttatatgataaaacccggatatgcggaaaaattgaaagcctttgtcagtaacggcggcgtgcttattactacctatttttccggtatgacggacgaacgcgaccttgttacgcaggacggttacccgggagaactgcgttctctctgcggtatctgggtagaggaaacagacgctttgactcaaggcaaaactaacggctttgtgataaagaacgccccgtgggataaaaccgcccttgcaggaacgtggaaggctgagatgttatgcgacattatccacagtgaaggcgccgaagtaatcgcggcttatgaaagcgatttttacgcgggaactcctgtcctgtgccgcaataaatacggcaaggggcaggtttggtatttcggcgcaagaccggaagcggcattgctggagcgtgtcaccgcccttatttgcaatgaaagcggaataaagcctgtattccccgcgcaggaaggaatgaagcctcgtgccgctcggccaatctga

SEQ ID NO: 28040 - protein, 540 aa, Unknown
  Obtained from environmental sample
  DOMAIN (309)...(523): Beta-galactosidase trimerisation domain
  misc_feature (1)..(540): Xaa is any amino acid
MARKYPEVLRVNTDGSKRKFGDRQNSCPNSPIYRRYSTLLARKLAERYGKLDNLAAWHISNEYGGYCYCENCEKAFRKWLERKYKTIAALNEAWNTAFWGHTYYEWDDIVIPSYLGGEWPYNRSSCQIQSIDYRRFNSDSLLECCLAEAAVLREVNPNIPITTNMMGTFWDLDYFKWGKNMDFISWDNYPSPGTPYTRTAMNHALMRGCGGGKPFWLMEQTPSVTNWQPYNSLKRPGVMRLLSYQALAHGSDTVMFFQMRRSRGCCEKFHGAVIDHYATENTRVFREVAALGEELKKLGDVFLDSVLVSEAAVLYDWDNWWATQLSAGPTVEMNYPEEVYRYYNAIAKQNISVDIIGVDTPLEKYKVLFAPVLYMIKPGYAEKLKAFVSNGGVLITTYFSGMTDERDLVTQDGYPGELRSLCGIWVEETDALTQGKTNGFVIKNAPWDKTALAGTWKAEMLCDIIHSEGAEVIAAYESDFYAGTPVLCRNKYGKGQVWYFGARPEAALLERVTALICNESGIKPVFPAQEGMKPRAARPI

SEQ ID NO: 28041 - DNA, 312 bp, Unknown
  Obtained from environmental sample
  misc_feature (1)..(312): n is a, c, g, or t
ttggttgtaagggagcttttggaagaacgcgccgttcccatcatcaccgattgcaaagccctttcagatgccaagagggatttaagcgatgttttagacaaggttcaattaacggaagacccttacgaggcggcaaaagatgcccatgccattttgctctgcaccgaatggcagcaatacgcagatttggattggaaaaaaatttacaattccatgagcaagcctgctttggtttttgacggacgcaatattctaaacggtgaagagttaaagaaaattggttttgaatttatcagcattggcaaggcgtga

SEQ ID NO: 28042 - protein, 103 aa, Unknown
  Obtained from environmental sample
  DOMAIN (2)...(87): UDP-glucose/GDP-mannose dehydrogenase family, UDP binding domain
  misc_feature (1)..(103): Xaa is any amino acid
MVVRELLEERAVPIITDCKALSDAKRDLSDVLDKVQLTEDPYEAAKDAHAILLCTEWQQYADLDWKKIYNSMSKPALVFDGRNILNGEELKKIGFEFISIGKA

SEQ ID NO: 28043 - DNA, 606 bp, Unknown
  Obtained from environmental sample
  misc_feature (1)..(606): n is a, c, g, or t
ttgtttgacgggcttaaaaagggcaaccccgactccaccctgtacggttttaacggtggaccaagcgggcttatcaacaataaaacaactattcttacttccgaaattatcgacgaataccgcaacaccggcggctttgacataataggttccgggcggacaaaaatagaaaccgcggaacaattcgcgtcttcttttgaaaccgcaaaaaaattaaaccttgacgctattgtcgtaataggaggagacgactccaacacgaacgccgcgttgttagctgaatattttgtcgctaacggctcttccgtccaggtaatcggatgtccaaagacaatagacggcgacctaaaaaacgaacatatcgaaacttctttcgggtttgataccgcctgtaaaacatactcggagcttatcggcaacctttgcagagacacgaacagcgcgaaaaaatattggcactttgtaaaacttatgggccgcgccgcaagccacatcgcgcttgaatgcgcttttcagacacagccgaatatctgccttatttcggaagaaattgaagccaagggaatgtctcttaacgctatagtcgataaatttgcgcctcaatag

SEQ ID NO: 28044 - protein, 201 aa, Unknown
  Obtained from environmental sample
  DOMAIN (3)...(199): Phosphofructokinase
  misc_feature (1)..(201): Xaa is any amino acid
MFDGLKKGNPDSTLYGFNGGPSGLINNKTTILTSEIIDEYRNTGGFDIIGSGRTKIETAEQFASSFETAKKLNLDAIVVIGGDDSNTNAALLAEYFVANGSSVQVIGCPKTIDGDLKNEHIETSFGFDTACKTYSELIGNLCRDTNSAKKYWHFVKLMGRAASHIALECAFQTQPNICLISEEIEAKGMSLNAIVDKFAPQ

SEQ ID NO: 28045 - DNA, 579 bp, Unknown
  Obtained from environmental sample
  misc_feature (1)..(579): n is a, c, g, or t
atgttaatggagtcgcttcctccggaaatttccggacagtttttgatggacagggacccgcatggaaacgtacaggtttcaagaatcgagactgaaaagttactggtaggaatggtagagaaaaaactttctacaatgaaacaacaaaaactgtataatggtaagttcagcgctctgacccatttcttcggctatgaaggcaggtgcgctttcccgtcaaattttgacgctgattattgctacagcctgggcttcagcgcttttgttttgatagcgtcgggattaacgggctatatttcaagcgtaaaaaacctaatcgctccggcagatcaatggtcagctggcggcattccgttaacgatgatgatggatcttgaacaccgccacggtacccaaaaaccggtcataaagaaagcgttggttgaacttgacggcaagccgtttaaaactttcacctccaaacgcgatctttgggcggaaaaaacctgctttatcgtccccggcgcgattcaatattgggggccgcaggaagtatgcgaccagccgacaattacgctcaaacttgaacatgaaaaataa

SEQ ID NO: 28046 - protein, 192 aa, Unknown
  Obtained from environmental sample
  misc_feature (1)..(192): Xaa is any amino acid
MLMESLPPEISGQFLMDRDPHGNVQVSRIETEKLLVGMVEKKLSTMKQQKLYNGKFSALTHFFGYEGRCAFPSNFDADYCYSLGFSAFVLIASGLTGYISSVKNLIAPADQWSAGGIPLTMMMDLEHRHGTQKPVIKKALVELDGKPFKTFTSKRDLWAEKTCFIVPGAIQYWGPQEVCDQPTITLKLEHEK

SEQ ID NO: 28047 - DNA, 945 bp, Unknown
  Obtained from environmental sample
  misc_feature (1)..(945): n is a, c, g, or t
gtggataaaagccaagaacgccgtangtacaagcggattcagccttgttgcaagcggaaaaccaatagccaatgccacagcgccaaccttgagcgcgggcaacggacaactatccgtaacatggacagccatagccggagcggatcaatacgaagtgttttgcggaacaggaacaacccgccggaaagcgcgtcgcanacggttaacgccccagcaacatcggctgttataagcagtttggtcaacggcacaacgtacaatgtgtgggtacgtggcaaaaactcaacaggaaccggagcaatgagcaatgtcatcagtgctaaaccagttggcaatatggggacggttgcactgacatctggcaatggacaaatttcaataagttggtctattgttgctggagcagttcaatatgaagtgtactacagtacaaataattcaataccatcaagccggacgcaatccataacaacaaacacggcaaatatatgtagtctaagcaatggaactacgtattatgtatgggttaaatcaaaaaatgccaatggtacaggaaacacaagtacggtagtagccggcaatccactcggtacaccaggaacaccgacagtaagtcctgcctacaaaggattgctggtaacatggactgctgttgcgggagcggatcaatatgaagtgtattacgggataggcacggcgacaacactcgcaacaacaactactggaattacggcaactattaccggactgactgccgatactacttaccatatttgcttgcgggccaaaaatgccaatggggtttctgactatggaccaattgtaagcggcgtacctaataataaccttagtgttggattatacagaggaactcaaaaaattggtaatcaaaaccttacagattcgttaaccatatatttctaccaacgcagtcagtggagataa

SEQ ID NO: 28048 - protein, 314 aa, Unknown
  Obtained from environmental sample
  DOMAIN (107)...(188): Fibronectin type III domain
  misc_feature (1)..(314): Xaa is any amino acid
MDKSQERRXYKRIQPCCKRKTNSQCHSANLERGQRTTIRNMDSHSRSGSIRSVLRNRNNPPESASXTVNAPATSAVISSLVNGTTYNVWVRGKNSTGTGAMSNVISAKPVGNMGTVALTSGNGQISISWSIVAGAVQYEVYYSTNNSIPSSRTQSITTNTANICSLSNGTTYYVWVKSKNANGTGNTSTVVAGNPLGTPGTPTVSPAYKGLLVTWTAVAGADQYEVYYGIGTATTLATTTTGITATITGLTADTTYHICLRAKNANGVSDYGPIVSGVPNNNLSVGLYRGTQKIGNQNLTDSLTIYFYQRSQWR

SEQ ID NO: 28049 - DNA, 843 bp, Unknown
  Obtained from environmental sample
  misc_feature (1)..(843): n is a, c, g, or t
gtgacgcttaacaatcttgtcaacgacacaacatactacatttgggtaaaagcgaaaaataatattggcgcaagcgaattcagcccgcgggctaatggaacaccatcggcatttgcggcgactccgtccgcgccgccggacgcgccaacgattatcgccggaagcggacagcttacggtaagctggcaacaggcggaaggggcgaacagctatgaagtatgggctggaactgatcataacccaacgatagcttcaaagcgcggtgatgatgtcacgggtttgtcctcggtaattaccggattaaccaacggaactacatattatgtctgggtaaaggcgaagaacacggtaggcacaagtaatttcagcccgatggcaacaggtacgccgtcggaatttagtgtaacaccgcaggccccggcggctccgtcggtcagtataggcaacggacagataaccgttacctgggaggctgtggaaggcgcggcggcctatgaagtgtggacgggtacggtaagtaattccgagtcagcgacaaagtacggcgctgatgttagttcggcgttttccgtaacaatagaaagcctaactaacggaaccgcatattatgtgtggataaaagccaagaacgccgtangtacaagcggattcagccttgttgcaagcggaaaaccaatagccaatgccacagcgccaaccttgagcgcgggcaacggacaactatccgtaacatggacagccatagccggagcggatcaatacgaagtgttttgcggaacaggaacaacccgccggaaagcgcgtcgcanacggttaacgccccagcaacatcggctgttataa

SEQ ID NO: 28050 - protein, 280 aa, Unknown
  Obtained from environmental sample
  DOMAIN (137)...(218): Fibronectin type III domain
  misc_feature (1)..(280): Xaa is any amino acid
MTLNNLVNDTTYYIWVKAKNNIGASEFSPRANGTPSAFAATPSAPPDAPTIIAGSGQLTVSWQQAEGANSYEVWAGTDHNPTIASKRGDDVTGLSSVITGLTNGTTYYVWVKAKNTVGTSNFSPMATGTPSEFSVTPQAPAAPSVSIGNGQITVTWEAVEGAAAYEVWTGTVSNSESATKYGADVSSAFSVTIESLTNGTAYYVWIKAKNAVXTSGFSLVASGKPIANATAPTLSAGNGQLSVTWTAIAGADQYEVFCGTGTTRRKARRXRLTPQQHRLL

SEQ ID NO: 28051 - DNA, 837 bp, Unknown
  Obtained from environmental sample
  misc_feature (1)..(837): n is a, c, g, or t
atgcccgacatgaacgatgttgaacttaaagtaaaatacaatgattccatcgcgggtatactccttatcaatcctgacaaccctaccggcgcggtgtatcctgtggaggttcttctggattttgtgcggattgcccgtaactacgggctcttcatcgtctgcgatgaaacgtacgcgaacatcatttacggcggatcaaaaacagcagccttatcacaagtcatcggcgatgtgccggctctggctttgcgctccatttccaaggaggttccctggcccggcgcgcgctgcggatggacggaaatttataaccgcaaggccgaccctcgttttgactcttatgtcaagagtcttctggattcaaaacgtctggaagtatgttccactagccttccccagctttgcatccccgctataatgggggactcccgctacagtaaacatctggaaacaagagccgccatgtttgagaaaagagcggacgaaatggaaaaggcttttgcgggcgtatccggaatccggataaaaaaacccaacggcgctttttatgtttccgcggtttttgacgatgttataaaaaagaatcccggcagccgttccctgccagtcattgatttaagtttacggaattacatcggcgcggaaatttccgggcttaaaccagacaagcagtttgtctactggcttctggcttcctccggaatatgcgtggttccgctttcgggctttgccagcgaccttccgggttttcgttttacattattggaacacaacgatgaaaagcgaaaatggattttcaagaccattgctgaagcgattcaaaattacttaagatga

SEQ ID NO: 28052 - protein, 278 aa, Unknown
  Obtained from environmental sample
  misc_feature (1)..(278): Xaa is any amino acid
MPDMNDVELKVKYNDSIAGILLINPDNPTGAVYPVEVLLDFVRIARNYGLFIVCDETYANIIYGGSKTAALSQVIGDVPALALRSISKEVPWPGARCGWTEIYNRKADPRFDSYVKSLLDSKRLEVCSTSLPQLCIPAIMGDSRYSKHLETRAAMFEKRADEMEKAFAGVSGIRIKKPNGAFYVSAVFDDVIKKNPGSRSLPVIDLSLRNYIGAEISGLKPDKQFVYWLLASSGICVVPLSGFASDLPGFRFTLLEHNDEKRKWIFKTIAEAIQNYLR

SEQ ID NO: 28053 - DNA, 471 bp, Unknown
  Obtained from environmental sample
  misc_feature (1)..(471): n is a, c, g, or t
atgctctgcgtttatacgctttcaaaatcaggctcccttgccggattgcgcaccggctttgcggtcggtagcgaggaattgatcaatgggcttcgccgcgttcgggactccttcaattcttacacccttgaccggcttgctctcgcaggcgcgacagccgcgctttcagacgccgcgtattacaatgatataaacagccgggtcgcaaagacgcggaaaagggtgacagaaaacctacggagcatgggttttacagtccttccgtcggcggcaaattttatttttatgaagtgcaatttatccaatataaacggagccgatttcttttccgcgctccgtgaaaaagggattcttgtaaggcattttaacaaggaacggatttcagatttcctcagggtcagcatgggaacggatgacgatatggatgtattcctcggcgcatgcggggaaattatcagtcatcttaagtaa

SEQ ID NO: 28054 - protein, 156 aa, Unknown
  Obtained from environmental sample
  misc_feature (1)..(156): Xaa is any amino acid
MLCVYTLSKSGSLAGLRTGFAVGSEELINGLRRVRDSFNSYTLDRLALAGATAALSDAAYYNDINSRVAKTRKRVTENLRSMGFTVLPSAANFIFMKCNLSNINGADFFSALREKGILVRHFNKERISDFLRVSMGTDDDMDVFLGACGEIISHLK

SEQ ID NO: 28055 - DNA, 801 bp, Unknown
  Obtained from environmental sample
  misc_feature (1)..(801): n is a, c, g, or t
atgttcaacgcctccaacggctttaacaccgacgcccttcgcgacaaactcctgtccggcccggtcggcaaaaagatcgtaatcctaaacttccccaacaacccgacaggctacacgccgacggtcgccgaggccaaggccatagcggatattatcatagagtcggcaaacaagggcaacaacgtagtggcgctgatagacgacgcctacttcggcctcgtcttcgaagagggcatcttcaaggaatcgatcttctccctgctcgccgacgctcatgagcgtattctcgccgtcaagatagacggccccacaaaggaagactacgcttggggcatgcgcataggcttcgtaaccatcgcctcggcacgcggcggcgcggccttctacggcgcaatggagtcgaaactcggcggaagcatcaggggaagcacgtcaagctcgtcgagcatcgggcaagctatgttgctcaacgcttacaagtcgcctacgtacgaaaaggaaaaagaagagaaataccaaattctgttgcgccgatataggaagataaaagatatcttagacaaccgcaaagagtacgccgagtacatccgccctctgccgttcaattccggctacttcatgtgcctgaaggtgctgagcggaaaagcggaggaggtcaggcggacgttgcttgataggtacgataccggcgtgatagccctatacaacttactgcgcgtcgctttttcgtctacgccgtatgaacagttggagaagttgttcgataacatctatcgggcggctaaagaagttagcgggtag

SEQ ID NO: 28056 - protein, 266 aa, Unknown
  Obtained from environmental sample
  misc_feature (1)..(266): Xaa is any amino acid
MFNASNGFNTDALRDKLLSGPVGKKIVILNFPNNPTGYTPTVAEAKAIADIIIESANKGNNVVALIDDAYFGLVFEEGIFKESIFSLLADAHERILAVKIDGPTKEDYAWGMRIGFVTIASARGGAAFYGAMESKLGGSIRGSTSSSSSIGQAMLLNAYKSPTYEKEKEEKYQILLRRYRKIKDILDNRKEYAEYIRPLPFNSGYFMCLKVLSGKAEEVRRTLLDRYDTGVIALYNLLRVAFSSTPYEQLEKLFDNIYRAAKEVSG

SEQ ID NO: 28057 - DNA, 471 bp, Unknown
  Obtained from environmental sample
  misc_feature (1)..(471): n is a, c, g, or t
ttggtcaagaatttcaaaaacgacgcgggtcttctggacgacgtatatatcggcggaatgttacacgacatgggaaaaatcgttttctccaatgtacatcccgatcttttaaacaggattaaaggtttctgtaacgaaaagaatcttcccgttgcggcgtttgaagatatttccgccggtatgaatcacgcggaacttggcgctcttatcgccgaaaaatggaattttccggataaattggttgcggcaatacggtatcatcacgatcctgaatccgcgccttttgattgtaaagacctgatcgatactgtttatcttgccaatatgttctgcgaatatgaaaacaacaatatcagttttgatcagcttgaaacggaaccgcttgaaaactacggtttaaagaaccaaaaacaaattgacacattgattgaacggctttccgcgggattcaacaaagaaggacagctttaa

SEQ ID NO: 28058 - protein, 156 aa, Unknown
  Obtained from environmental sample
  misc_feature (1)..(156): Xaa is any amino acid
MVKNFKNDAGLLDDVYIGGMLHDMGKIVFSNVHPDLLNRIKGFCNEKNLPVAAFEDISAGMNHAELGALIAEKWNFPDKLVAAIRYHHDPESAPFDCKDLIDTVYLANMFCEYENNNISFDQLETEPLENYGLKNQKQIDTLIERLSAGFNKEGQL

SEQ ID NO: 28059 - DNA, 411 bp, Unknown
  Obtained from environmental sample
  misc_feature (1)..(411): n is a, c, g, or t
ttgcctacgccggtgtcccaaaaaagctctcgtaaatcttttagccgaacctgcgccccattgataaaatattcgctttccccggaacggtacagccgtcgcttgatttcgatttccggcatatccattggcagaagacctgtttcattcgcgatggcaagggagacttcagccacattgaggggttttctggcttccgtgccgccaaaaataacgtcttccattttttccgcgcgaagggattttatcgcgtgttcgcctagaacccatttgattgcgtcaactacgttggattttccgcagccgtttggtcccaagagagcggtgatgccgtcgttaaattcaatgtcggtgcggtctgcaaaagatttgaagccgagaatcgtaagacgcttaaggaacataaattaa

SEQ ID NO: 28060 - protein, 136 aa, Unknown
  Obtained from environmental sample
  misc_feature (1)..(136): Xaa is any amino acid
MPTPVSQKSSRKSFSRTCAPLIKYSLSPERYSRRLISISGISIGRRPVSFAMARETSATLRGFLASVPPKITSSIFSARRDFIACSPRTHLIASTTLDFPQPFGPKRAVMPSLNSMSVRSAKDLKPRIVRRLRNIN

SEQ ID NO: 28061 - DNA, 996 bp, Unknown
  Obtained from environmental sample
  misc_feature (1)..(996): n is a, c, g, or t
atgttccttaagcgtcttacgattctcggcttcaaatcttttgcagaccgcaccgacattgaatttaacgacggcatcaccgctctcttgggaccaaacggctgcggaaaatccaacgtagttgacgcaatcaaatgggttctaggcgaacacgcgataaaatcccttcgcgcggaaaaaatggaagacgttatttttggcggcacggaagccagaaaacccctcaatgtggctgaagtctcccttgccatcgcgaatgaaacaggtcttctgccaatggatatgccggaaatcgaaatcaagcgacggctgtaccgttccggggaaagcgaatattttatcaatggggcgcaggttcggctaaaagatttacgagagcttttttgggacaccggcgtaggcaaaaccgcctattcggttatggaacagggaaaaatcgatcagatactttcttcaaaaccggaagaacggcgttacttgtttgaagaagcggcgggcattacacgctaccgggaacgcggagcggaagctgagcgtaaccttgccaagactgaggaaaatgtgcgccaagttgatttgatactgaacgaagtaaaacgcgcccatgacagtttaaaaatacagtcggaaaagacgcttaagtaccgcacactccgcgatgaaatttttaactatgaattagacatacaacttttacgtttaaaacaatttaagtatgaaagagacgaaaagaacgaaaccttaagacgcagaacgcaagaccgcgacaggatacgctcggaaatggaagcggaaaacaaagccatggaagagcacatggacgaagtaaactccatggaagcgcggcttgtagagcttcaaaaaaatatttacggtcttgcgctggaaaaaaacgccagagaaaacgaagtgcgcctgttcaacgaacagcgcggcgaaaataaagttagaatcggtcaaaacgaagaacgcgaaaaacaggctgtcaaaaaataa

SEQ ID NO: 28062 - protein, 331 aa, Unknown
  Obtained from environmental sample
  DOMAIN (2)...(327): RecF/RecN/SMC N terminal domain
  misc_feature (1)..(331): Xaa is any amino acid
MFLKRLTILGFKSFADRTDIEFNDGITALLGPNGCGKSNVVDAIKWVLGEHAIKSLRAEKMEDVIFGGTEARKPLNVAEVSLAIANETGLLPMDMPEIEIKRRLYRSGESEYFINGAQVRLKDLRELFWDTGVGKTAYSVMEQGKIDQILSSKPEERRYLFEEAAGITRYRERGAEAERNLAKTEENVRQVDLILNEVKRAHDSLKIQSEKTLKYRTLRDEIFNYELDIQLLRLKQFKYERDEKNETLRRRTQDRDRIRSEMEAENKAMEEHMDEVNSMEARLVELQKNIYGLALEKNARENEVRLFNEQRGENKVRIGQNEEREKQAVKK

SEQ ID NO: 28063 - DNA, 1602 bp, Unknown
  Obtained from environmental sample
  misc_feature (1)..(1602): n is a, c, g, or t
atggaagcggaaaaccaagccctggaagcgcacatggacgaagtaaattccatggaagcgcggcttgtggaacttcaaaaaaatatttacggtcttgcgcttgaaaaaaacgcaagggagaacgaaatgcgcctgttcaacgaacagcgcagtgaaaataaagttaaaatcggacaaaacgaagaacgcgaaaaacaggccgttcaaaaaataacggaattaaacgctgacgctgaggggcaggacgcggttgtacaggatttaagaaaacaatgtaaaagcatagaagaaaatattcgctcatttgaagaaaatatccaacttgccgcaggacgcatcagcgaaaacgacaaagaatcgcacagggcggaaactgaaattcacggcatagaaaaagaacttgccgcttttgaaaaagagcttgccataataacagacgacattgtagcggaattggacgcgggcttaaaaaaagcgggctattcagccacagaacgcaaaaatgcggaagaagctttacgcgaaacgcttgtccgcctgaacaccctcctctccggcagggaggcgatgataggcgaccttgccgcagcttcaaacactacaggcggtgtagacgcggcggaaataaaacgtattaccgatattctgcaaaaaagccttgcggaagccgcagccggggcgaataaagccgtagaactttttaacagttaccgtgaacattcgccaacctttattgatgaatttttagctcctcaaggaattatcacaaagaaacgctctttggatacgcaaatcagaaacgcgaaagacggcatagaggaaagacgccaacgcattaaaaaactgcgcgaagataacgtcaacctaatggcgaaaatgaatgaataccgcgcaacccttgaagatttgaaagtcaaccgcgcgcaaatgaacgcccgcgcccagtccgccgaagatcaggctcggcttatcaggcgcgaactgtcagggcaggaaggacttttaaaaaatatccgcgacgaactttccctgtaccgcaaaagacaggaagaacttaacgagcgcattacggcggctcaaacggaaatcgcggggattgaggaaaagactaaagcgtactcctccgatttggaaaaattggaaaacgatatccgcaaaagaaacgacaatgtcgccagtaagaaagaaacgattaacaagcggactttggaactttccaaagtgcaggaatcgctggaaaaaattcacttggaaattgtccagtccgacatggaaataaaaaacattcaggagaatttcagagagacccattccagagatttaatggagtttgaggaacgcatattcagcattacaaccgctccggcagtactacgcgaaaaacttgcctcttcgcgcgcaaagatgaaagaactcggctcagtaaatctcatggctcccgaagaattcgccgaaacaaaacagcgatacgactttcttaacaatcaaatggcggacttacaaaaagcgcgcaaagaccttgaagaccttacggcggaaatacggcaggaaacttcgcagttattcattgacacttacaatcgcatactcggccgaatctga

SEQ ID NO: 28064 - protein, 533 aa, Unknown
  Obtained from environmental sample
  misc_feature (1)..(533): Xaa is any amino acid
MEAENQALEAHMDEVNSMEARLVELQKNIYGLALEKNARENEMRLFNEQRSENKVKIGQNEEREKQAVQKITELNADAEGQDAVVQDLRKQCKSIEENIRSFEENIQLAAGRISENDKESHRAETEIHGIEKELAAFEKELAIITDDIVAELDAGLKKAGYSATERKNAEEALRETLVRLNTLLSGREAMIGDLAAASNTTGGVDAAEIKRITDILQKSLAEAAAGANKAVELFNSYREHSPTFIDEFLAPQGIITKKRSLDTQIRNAKDGIEERRQRIKKLREDNVNLMAKMNEYRATLEDLKVNRAQMNARAQSAEDQARLIRRELSGQEGLLKNIRDELSLYRKRQEELNERITAAQTEIAGIEEKTKAYSSDLEKLENDIRKRNDNVASKKETINKRTLELSKVQESLEKIHLEIVQSDMEIKNIQENFRETHSRDLMEFEERIFSITTAPAVLREKLASSRAKMKELGSVNLMAPEEFAETKQRYDFLNNQMADLQKARKDLEDLTAEIRQETSQLFIDTYNRILGRI

SEQ ID NO: 28065 - DNA, 1236 bp, Unknown
  Obtained from environmental sample
  misc_feature (1)..(1236): n is a, c, g, or t
ttgccttgcggaaagaggctttattccctggaaaaaggcatggccataaggggcggcgaaaaaatttatttcagccgcaggggcaaggccgtgattttctgtacggttggaaagaaaagtttttcccggggtatttctatcgccgccgcacatatagattcccctcggctggatctaaaaatgcttccgctttatgaagattccggcatggctttttttgacacccattattacggaatgttaaaaccttggcagtggacgggcattccccttgccctgcacggttatattatccgcgcggacgggcaggggctggccatacggatcggcgaagatcctggcgaccctcgcttttttatagcggatctccttccacatctcagcggggaacagatgaagaagccggcgaaagacgcggttccggcggaaagccttgatatccttgccgggcttaattccgcgccgggagaaaacggggagggcgcggttaaactcaatatactccgactgttatacgataaatacggaattactgaaaaagattttgtcagcgccgagatttgcgcggttccggcgtttccagcttcggatcttggattcgacaggagcatggtaggagcctatggccaggatgacaaggcatgcgcctacccgggccttaccgcgttcctttccgtaaaagaaccggaatacgcctcgtgccttattctcgccgacaaggaagaaaccggttccgctggaatcagcgggatgcagtcggcttttttcccggcctttatcagcgagcttgttgaagccgcgagagaaaaccagtgcgtaggagtttacgaagttttttcaaattcattatgcgtttccgctgatgttaatgcctgctggcatcctctgtataaagaaattcttgacgaacatggggaggcaaaactaaaccacggcgttatacttttccgctattggggggaaaaggggaaagaaaacacaaacgacgctgacgcccagactgccgcggcgttaataaaaattcttgatgaagcgaagattctctggcagacaggggaggggggaagggttgacgccggaatcagcggaaccttgtcacggtttctcgccaaccttgatattcccgttattgatcttggcgtgccgcttctttcaatgcattccccgcttgaaggggccgcgaaagccgacatttacatggcgcatcgggctttcacggctttcttcaaccgctaa

SEQ ID NO: 28066 - protein, 411 aa, Unknown
  Obtained from environmental sample
  DOMAIN (3)...(409): Aminopeptidase I zinc metalloprotease (M18)
  misc_feature (1)..(411): Xaa is any amino acid
MPCGKRLYSLEKGMAIRGGEKIYFSRRGKAVIFCTVGKKSFSRGISIAAAHIDSPRLDLKMLPLYEDSGMAFFDTHYYGMLKPWQWTGIPLALHGYIIRADGQGLAIRIGEDPGDPRFFIADLLPHLSGEQMKKPAKDAVPAESLDILAGLNSAPGENGEGAVKLNILRLLYDKYGITEKDFVSAEICAVPAFPASDLGFDRSMVGAYGQDDKACAYPGLTAFLSVKEPEYASCLILADKEETGSAGISGMQSAFFPAFISELVEAARENQCVGVYEVFSNSLCVSADVNACWHPLYKEILDEHGEAKLNHGVILFRYWGEKGKENTNDADAQTAAALIKILDEAKILWQTGEGGRVDAGISGTLSRFLANLDIPVIDLGVPLLSMHSPLEGAAKADIYMAHRAFTAFFNR

SEQ ID NO: 28067 - DNA, 447 bp, Unknown
  Obtained from environmental sample
  misc_feature (1)..(447): n is a, c, g, or t
atgcctaacagaattaccgttattagagattctgttttttccgaatgcagaaatcttaccgatataacgataccggacagcgttactggcatagggctggatgctttttgcgattgttataatcttgtcagcgtaacatttaaaggtaagattaagagagagtttaaaaataaaactgatgaagaaaaagcaaattatagaaagattaaatattacgctgatgatgatgaagaaaatgtaaattataaaaagtttgaatatttcgatgatgatgatgaaactgaagatattaatgattactttatatctgtcttcgacggagcgtttattggtaatttgcatgaaaaattttacgaagaagacgcggagtatggaacgcccggaacatacaccgcagaagcgtctgcgcccttataccacggaacaggatggataagacagccgtaa

SEQ ID NO: 28068 - protein, 148 aa, Unknown
  Obtained from environmental sample
  misc_feature (1)..(148): Xaa is any amino acid
MPNRITVIRDSVFSECRNLTDITIPDSVTGIGLDAFCDCYNLVSVTFKGKIKREFKNKTDEEKANYRKIKYYADDDEENVNYKKFEYFDDDDETEDINDYFISVFDGAFIGNLHEKFYEEDAEYGTPGTYTAEASAPLYHGTGWIRQP

SEQ ID NO: 28069 - DNA, 360 bp, Unknown
  Obtained from environmental sample
  misc_feature (1)..(360): n is a, c, g, or t
ttgggacaacggcgcggcacgggagtagcccgtaattatcctgtttatgtcgcggcaaaaaataccgccgccaatacgctggtgttaggcgatgattcgtctttgtattcgtcaggttttaccgcgcggcaaataaatcttattgcctgtgaaaatctttttcagccgcagaaccttaccgtaagaatccgttatctgcaaaaagaacagcgcgcaagagtagagcagactggtcccgataccatccgtgttgattttgaagaacctcaacgggcaattacacccggacaggcggcggtattttacgatggggacacggtagtcggcggcggcacgatagaggttaatactaataaataa

SEQ ID NO: 28070 - protein, 119 aa, Unknown
  Obtained from environmental sample
  DOMAIN (1)...(113): tRNA methyl transferase
  misc_feature (1)..(119): Xaa is any amino acid
MGQRRGTGVARNYPVYVAAKNTAANTLVLGDDSSLYSSGFTARQINLIACENLFQPQNLTVRIRYLQKEQRARVEQTGPDTIRVDFEEPQRAITPGQAAVFYDGDTVVGGGTIEVNTNK

SEQ ID NO: 28071 - DNA, 459 bp, Unknown
  Obtained from environmental sample
  misc_feature (1)..(459): n is a, c, g, or t
atggcgacgcggcttaatgcgcagcttgtaaaggcggcgatgggggaattgtgcgttcaggacgttgttacaaacccaggtcatattgatcctttaacaggacgcgtgcttgtcgccgccggatggaaaccgggcttttcaacagactacgacgcggttctgcttgccgagcgttttcaggcggatgccgttattaatctttccaacattgaaaaagtatacaccgccgatccaaagacagaccctaacgcccgcccaatcgacaaaatatcgtgggcggaatttcgcgctatggtaggcgatgactgggttcccggcaaaaatgttccgtttgatcctgtggcaagccgccattcggaaaaaatcggcttaaaagtgatctgcgcttccggtaaaaatcttgaaaacctgaaaaatattctttccgggaatgaatttaccggaactgttatttattag

SEQ ID NO: 28072 - protein, 152 aa, Unknown
  Obtained from environmental sample
  misc_feature (1)..(152): Xaa is any amino acid
MATRLNAQLVKAAMGELCVQDVVTNPGHIDPLTGRVLVAAGWKPGFSTDYDAVLLAERFQADAVINLSNIEKVYTADPKTDPNARPIDKISWAEFRAMVGDDWVPGKNVPFDPVASRHSEKIGLKVICASGKNLENLKNILSGNEFTGTVIY

SEQ ID NO: 28073 - DNA, 609 bp, Unknown
  Obtained from environmental sample
  misc_feature (1)..(609): n is a, c, g, or t
ttgagcgcgctcaggggcagtgcgcaaatgataagctacgaagtttcgcttgccttgattatgctttttgtggttatgatttctggcagtgcttctttgaacgatattatagctgcgcaaagcggtacggttttggattggtggatttttaaattgccgcttcttgggtttgtggcttttgtggtgtttatgtgcgttagcacagcagagttaaaccgcgccccattcgacatagcggaatctgagcaggaactcaccgcaggtttccacacagaatacacgggaaccgcttttgcaatgttttatttaaccgagtacataaacataataggtgcctctgctcttgggtcaattttctttttgggcgggtggcaagcacctctaataggcattcccattgtggacgaaaaattattgctcgttccagatttggtttggatgtttgttaaaatttattttcttatatggctttatatgatgttccgctggacttggctaagacctcgcgttgaccagctcatgaattttgaatggaagtttttgctgccctcaaatttaattttgcttgggcttggagcactcttcatagcaatgggttgggttttatga

SEQ ID NO: 28074 - protein, 202 aa, Unknown
  Obtained from environmental sample
  DOMAIN (2)...(197): NADH dehydrogenase
  misc_feature (1)..(202): Xaa is any amino acid
MSALRGSAQMISYEVSLALIMLFVVMISGSASLNDIIAAQSGTVLDWWIFKLPLLGFVAFVVFMCVSTAELNRAPFDIAESEQELTAGFHTEYTGTAFAMFYLTEYINIIGASALGSIFFLGGWQAPLIGIPIVDEKLLLVPDLVWMFVKIYFLIWLYMMFRWTWLRPRVDQLMNFEWKFLLPSNLILLGLGALFIAMGWVL

SEQ ID NO: 28075 - DNA, 525 bp, Unknown
  Obtained from environmental sample
  misc_feature (1)..(525): n is a, c, g, or t
atggaagtttttgctgccctcaaatttaattttgcttgggcttggagcactcttcatagcaatgggttgggttttatgactgtttctaaatattttcacgccgtgataactggtcccattagcttgctaaaagggatgtctgttactctcaaatattttataaacccaaaaagaatagtaaccgaacaatatccagaaaacaaagcaacccttaaaatgcacgagcgttttagagggcgtgttgaactaatccacgatgaaaacggcttgcacgcttgcacggcttgcggaatgtgcgaaaaagcctgccccaataattccataaatgtgctcacaacaaaaaacttggctggcaaaaaaattctcggcaaatatctctatcgcatggacacttgcactcaatgcggtctgtgcatagagagctgcccctttggctgcttaaaaatggcacacgattttgaaatggcttctacagacagaaaaacgttcaatatggttttaaacaaatgcgaagggcagggttaa

SEQ ID NO: 28076 - protein, 174 aa, Unknown
  Obtained from environmental sample
  DOMAIN (86)...(109): 4Fe-4S binding domain
  misc_feature (1)..(174): Xaa is any amino acid
MEVFAALKFNFAWAWSTLHSNGLGFMTVSKYFHAVITGPISLLKGMSVTLKYFINPKRIVTEQYPENKATLKMHERFRGRVELIHDENGLHACTACGMCEKACPNNSINVLTTKNLAGKKILGKYLYRMDTCTQCGLCIESCPFGCLKMAHDFEMASTDRKTFNMVLNKCEGQG

SEQ ID NO: 28077 - DNA, 774 bp, Unknown
  Obtained from environmental sample
  misc_feature (1)..(774): n is a, c, g, or t
gtggttatggacggctcttccgatccctggtatgtgctttcagtcagggacagagacattgccatgcggtcaaggaatacggtaattacggtaattttggcaagttccgcagtcattattgtgcttgccctatttattgtttttttcatcgcaagaactatcagctctccggtaaaggcgatccgcctggttctggaaaaggtaaaggacggggattttaccaaaaaagtaaccgtacaatccaatgatgagattgggaatttggcggcttacttcaaccttacgatagaaaacataagaaacctcgtaggggcaataaaatacaagatcaacggccttaaccataccagttttgaactttccgtcaatatgagaaaaacctcgacagccgtagaacagattgcatctaatcttgacaatatggaaaaccttgtagtccaacaggaaaacggcgcgttggtagcaggcgaggctgtaggggctattaaaacaaatattgacagcctgaacagaatgatagaacaacaggctgaaagcgtagacatgtcatcttccgcaatagaggaaatgaccgctaacattcattcggtaacccagacgcttgctgaaaacagtaaaaacgtcggtgttttggtcgaagcgtcggaaaacggcaaaacaggactccagaccgtagcgcaagaaatacgggaaatagcccatgattccgaaggactgctggaaataaactcggtgatgaacaatatcgcagccagaccaatctgctttcgatga

SEQ ID NO: 28078 - protein, 257 aa, Unknown
  Obtained from environmental sample
  DOMAIN (32)...(101): HAMP domain
  misc_feature (1)..(257): Xaa is any amino acid
MVMDGSSDPWYVLSVRDRDIAMRSRNTVITVILASSAVIIVLALFIVFFIARTISSPVKAIRLVLEKVKDGDFTKKVTVQSNDEIGNLAAYFNLTIENIRNLVGAIKYKINGLNHTSFELSVNMRKTSTAVEQIASNLDNMENLVVQQENGALVAGEAVGAIKTNIDSLNRMIEQQAESVDMSSSAIEEMTANIHSVTQTLAENSKNVGVLVEASENGKTGLQTVAQEIREIAHDSEGLLEINSVMNNIAARPICFR

SEQ ID NO: 28079 - DNA, 891 bp, Unknown
  Obtained from environmental sample
  misc_feature (1)..(891): n is a, c, g, or t
atgaacgccgcgatagaggcggcccatgccggagaggccggcaaaggcttcgctgtagtcgctgatgaaattcgcaagctcgccgagtcatcggggcatcagtcaaaaaccacagctgcgatgctcaaaaagattaaagcgtccatagataatattaccaaatcttctgacgaagtgttgacgcgttttggggctatagactcaagcgtgaaaacagtatccgagcatgaacaaaatattctcagtgcgatggaagagcaggaggtaggcggcaaacaaatactggaatccattggccgcctgcgggacataactttttcggttaaaaaagggtctgacaacatggctgaatcgggagagactcttgttaaggagacagatggatttataaaaaccagcaaagaaactgtagaaggaatgaacgagatactgataggcattaaccagataaatgtttctgtgaaccatgtcaacgaaatgagtttggaaaacaaccggaacttcgagtcgttaaagcaggaaacgcaaaaatttaatgataccgttggcaatgagaagcaaaagctcctcgtagtggatgatgaccttatccatcttgaaatggtgcaagcggttctgtcaggcgaatatgaggtatcgtgtgccaaatcgggtaaagaagcgctgggcttgttctaccaaggacttgttccccaattgatactattggacttgataatgccggacatggatgggtgggatacttacaacagaataaaagccattagtaacctacacgataccccgatagcgtttttcacatcttcaaacgatccaaaagacatacaacatgcgcataaaattggtgcggttgattttatnaaaagccctataataaagacgacttattag

SEQ ID NO: 28080 - protein, 296 aa, Unknown
  Obtained from environmental sample
  DOMAIN (187)...(296): Response regulator receiver domain
  misc_feature (1)..(296): Xaa is any amino acid
MNAAIEAAHAGEAGKGFAVVADEIRKLAESSGHQSKTTAAMLKKIKASIDNITKSSDEVLTRFGAIDSSVKTVSEHEQNILSAMEEQEVGGKQILESIGRLRDITFSVKKGSDNMAESGETLVKETDGFIKTSKETVEGMNEILIGINQINVSVNHVNEMSLENNRNFESLKQETQKFNDTVGNEKQKLLVVDDDLIHLEMVQAVLSGEYEVSCAKSGKEALGLFYQGLVPQLILLDLIMPDMDGWDTYNRIKAISNLHDTPIAFFTSSNDPKDIQHAHKIGAVDFXKSPIIKTTY

SEQ ID NO: 28081 - DNA, 474 bp, Unknown
  Obtained from environmental sample
  misc_feature (1)..(474): n is a, c, g, or t
atggattccgggaaacttgtagatgatgaaacgacaatcgcccttgtaaaagagcggcttgcgatggatgatgtgcagaaaggctatattctggacggtttcccacgcacaattccccaggcaaaagcgcttgcggaattttccgtcgtagacaaggttgtaaactttgatatacctgacgcgaatgtaattgagcgtttaagcggacggagagtctgccgtaaatgcggttataatttccatgtaatttttaacaagacggcaaaagaaggcgtatgcgatcattgcggcggagaagtgtatatccgcgatgacgataaacccgaggctgttcagaaacggcttgaagtgtaccgcgcccaaacagccccgttaattgattattaccgagggaaaggcttgctattagatatagacgcaaaaccgatgatcgatcaaattgtaatcaattttaagaaggcaatgggaatataa

SEQ ID NO: 28082 - protein, 157 aa, Unknown
  Obtained from environmental sample
  DOMAIN (70)...(105): Adenylate kinase, active site lid
  misc_feature (1)..(157): Xaa is any amino acid
MDSGKLVDDETTIALVKERLAMDDVQKGYILDGFPRTIPQAKALAEFSVVDKVVNFDIPDANVIERLSGRRVCRKCGYNFHVIFNKTAKEGVCDHCGGEVYIRDDDKPEAVQKRLEVYRAQTAPLIDYYRGKGLLLDIDAKPMIDQIVINFKKAMGI

SEQ ID NO: 28083 - DNA, 822 bp, Unknown
  Obtained from environmental sample
  misc_feature (1)..(822): n is a, c, g, or t
gtggtcattcccgctaccttcgccggtaaacccgtaatttctattgccggatatgcgttctcaaaaaacgccaatattaccagcgtaaccatccctgaaaatgtggctactatttatgcaaggtcgttcctggactgtaatggcctgaccagcattaccatccccgcaagcgtgacaaagatcgactatgacgccttccgggattgcgcaaaacttaacagcgttactttccggggaaaagttactgacatacaaaacagtagcttccccggcgatttagcttccaaacacaaagacggaggcgcgggaatctacacgcgccaggccggcaacacctggaaaaagcaaagcgacattaccgcgcccgggcagccaacgctggacaagctgacgtttgccgaaagcaaagagggtaatttaaatggttatcaggtaaaacagggaagcgacaagataagcggcgatgtggtcattcccgctaccttcgccggtaaacccgtaatttctatcgccggatatgcgttctcaaaaaacgccaatattaccagcgtaatcatcccagaatatgtgtctactatttatgcaaggtcgttcctggactgtaatggcctgaccagcattaccatccccgcaagcgtgacaaagatcgactatgacgccttccgggattgcgcaaaccttaatagcgtaactttccggggaaaagttaccagcatacaggacagtagcttccccggcgatttagctgccaggcacaaagcaggaggcgcgggaatctacacgcgaaaagccggaagcaatacctgggaaaagaataattaa

SEQ ID NO: 28084 - protein, 273 aa, Unknown
  Obtained from environmental sample
  misc_feature (1)..(273): Xaa is any amino acid
MVIPATFAGKPVISIAGYAFSKNANITSVTIPENVATIYARSFLDCNGLTSITIPASVTKIDYDAFRDCAKLNSVTFRGKVTDIQNSSFPGDLASKHKDGGAGIYTRQAGNTWKKQSDITAPGQPTLDKLTFAESKEGNLNGYQVKQGSDKISGDVVIPATFAGKPVISIAGYAFSKNANITSVIIPEYVSTIYARSFLDCNGLTSITIPASVTKIDYDAFRDCANLNSVTFRGKVTSIQDSSFPGDLAARHKAGGAGIYTRKAGSNTWEKNN

SEQ ID NO: 28085 - DNA, 1092 bp, Unknown
  Obtained from environmental sample
  misc_feature (1)..(1092): n is a, c, g, or t
ttgaaccacgcgattaccggcgagtgtttatgccccttaattgcagccctgtgcaaaaaagccgcggtgacagaagggcaaatttacagggcggcgattgcggctaacaccaccatgacccatctttttttgggcgtcagccccgaatatgtaaggcttgagccgtatacgccggcgttttttgagtgcggccccctgcggagcggcctgcccctgcatccggaggcggacacgctgatcgccccctcaacagggagttatgtgggcggtgatattacggccggcgtttattccagcatggctttcaatacgcagggcatctccctgcttattgacctggggacaaacggggagcttgtcctcggcaacgaggacttccttatgagctgcgcctgttccgccggcccggcgtttgagggcggcgacataagctgcggcatgagggcgacagacggcgcgattgaggcctgcgcgatagacgaagacacaatggaaccgcggataaaggtaataggcgctgagggccaaaaaccgttagggctctgcggttcagggttaattgacatcgtaggtgagttgttccgctgcgggataatcaacgcgaggggcaaattttcaaaagacgggaaacgcgtacgccgcgatgaatggggcaccgcttcctatattatcgcgttttcaggtgagtctgccgatggtacggagatcagcttgaatgaaactgatattgacaattttatccgcgcaaagggggatattttttccgcgatacggacaatgctcgccgcgctggagcttgacgttaatgttattgaaaatgtgtacgtggcgggcggcataggcggcggaatcaatatacagcaggctatacggatcgggatgctgcttaatctgcagaatgaaaaataccattacatcggcaacagttcccttcacggggcatattcaatgctggtatcgccggaggccgccgagattatccaaaagaccggcagaaccatgacttatatcgagctttcaacccatccggggtacatggacgaatttgtcgccgcctgtttcctgccgcatacaaatcggagggctttttga

SEQ ID NO: 28086 - protein, 363 aa, Unknown
  Obtained from environmental sample
  misc_feature (1)..(363): Xaa is any amino acid
MNHAITGECLCPLIAALCKKAAVTEGQIYRAAIAANTTMTHLFLGVSPEYVRLEPYTPAFFECGPLRSGLPLHPEADTLIAPSTGSYVGGDITAGVYSSMAFNTQGISLLIDLGTNGELVLGNEDFLMSCACSAGPAFEGGDISCGMRATDGAIEACAIDEDTMEPRIKVIGAEGQKPLGLCGSGLIDIVGELFRCGIINARGKFSKDGKRVRRDEWGTASYIIAFSGESADGTEISLNETDIDNFIRAKGDIFSAIRTMLAALELDVNVIENVYVAGGIGGGINIQQAIRIGMLLNLQNEKYHYIGNSSLHGAYSMLVSPEAAEIIQKTGRTMTYIELSTHPGYMDEFVAACFLPHTNRRAF

SEQ ID NO: 28087 - DNA, 378 bp, Unknown
  Obtained from environmental sample
  misc_feature (1)..(378): n is a, c, g, or t
ttgcttaacgtgggaatagaagacaagcctttgaaactatatggcaataaacttttaagcaaaatgaaaaagcataatttcaaagctacagacttaaaagacttgcctaattccatagctgaccctattgctatattcaaaggtagcagacccgatactttcgctatattgaccgaaataaaaatcaacggcaataatgcccttgtatcgcttgaagttggaaaggatgaggacgcaagttttaatataattacttctacctatgggaaagcaaacaagagcatttctaactggataaatgaaggcaggctattgtatgggaataaagaaaaagccccagctatctacgttttcccgctccaattgcgggcacaatag

SEQ ID NO: 28088 - protein, 125 aa, Unknown
  Obtained from environmental sample
  misc_feature (1)..(125): Xaa is any amino acid
MLNVGIEDKPLKLYGNKLLSKMKKHNFKATDLKDLPNSIADPIAIFKGSRPDTFAILTEIKINGNNALVSLEVGKDEDASFNIITSTYGKANKSISNWINEGRLLYGNKEKAPAIYVFPLQLRAQ

SEQ ID NO: 28089 - DNA, 636 bp, Unknown
  Obtained from environmental sample
  misc_feature (1)..(636): n is a, c, g, or t
atggttggcgaaactaccagatatttcagggcgagtatcggtccggtgtatgcaagaaacaaagcccaggtggccaagattattcttttggcagagattacagacagtgttaatttaatgaaagaattagaaaacgcggcttatattgacggtcttacaggcctttataaccggaaacatttttcagagcttgcaaacgctgatgtagaaagggcgcaaaggctcaaccaaacaatttatacggcaatgctggatcttgatttttttaagaaagtgaacgatacctatgggcatgccgcaggagatatagtattgaaaaccacagccggggttattcggcagacaatcagggcgtatgatcttttgtgccgttatggaggcgaggaatttgcccttttgattttagaccttaacgcttttgatgcttttaatctggtggagagaatacgtgaaaatattgaatcggcaataatcaactacgaaggtattgagataaaggtaacctgcagcatcgggattgcgaattttctgcggacggatactctggaatcatcaataaaaaagtccgacgaagccctgtatgccgccaaaaattccggtcgtaaccaggtgaagatgtttgagaaggatggttga

SEQ ID NO: 28090 - protein, 211 aa, Unknown
  Obtained from environmental sample
  DOMAIN (43)...(203): GGDEF domain
  misc_feature (1)..(211): Xaa is any amino acid
MVGETTRYFRASIGPVYARNKAQVAKIILLAEITDSVNLMKELENAAYIDGLTGLYNRKHFSELANADVERAQRLNQTIYTAMLDLDFFKKVNDTYGHAAGDIVLKTTAGVIRQTIRAYDLLCRYGGEEFALLILDLNAFDAFNLVERIRENIESAIINYEGIEIKVTCSIGIANFLRTDTLESSIKKSDEALYAAKNSGRNQVKMFEKDG

SEQ ID NO: 28091 - DNA, 537 bp, Unknown
  Obtained from environmental sample
  misc_feature (1)..(537): n is a, c, g, or t
gtgggtatacacctggggctggccacacagcgtccctcaattgacataatcacagggcttataaaagcaaatatacccagccgtatcgcttttatggtggcaagcaaaatggatagcaggatcatcatcgacatggtgggggctgaaaaactcctgggaaaaggtgatatgctctacgcaggagcggtagatccgttcccggtacgaatgcagggggcatttgtctcggaagaagaagtcgagagggttgtcgattacgtcaaaggccttggcgagccggattacatcgacgatgatatgttttacgacgatgaagaagaagccgatccgtccctctcttccgaaggcgacgatccgctttacgaaaaagctctggagattgtcatgcaacagggtaaggccagcgcaagttatattcagcggcggcttaagatcggttataatagggctgcgcgccttgtcgaagtaatggaacatcacggggttgtagggcccgcacaggggtctaaaccaagagaattactgcgcgcgccctga

SEQ ID NO: 28092 - protein, 178 aa, Unknown
  Obtained from environmental sample
  misc_feature (1)..(178): Xaa is any amino acid
MGIHLGLATQRPSIDIITGLIKANIPSRIAFMVASKMDSRIIIDMVGAEKLLGKGDMLYAGAVDPFPVRMQGAFVSEEEVERVVDYVKGLGEPDYIDDDMFYDDEEEADPSLSSEGDDPLYEKALEIVMQQGKASASYIQRRLKIGYNRAARLVEVMEHHGVVGPAQGSKPRELLRAP

SEQ ID NO: 28093 - DNA, 417 bp, Unknown
  Obtained from environmental sample
  misc_feature (1)..(417): n is a, c, g, or t
atgtacttttttgacacgaatatttgcatctattttctaaaaggaatttttcccgagcttcagaaaaaggtgttggtaacgcaaccggacaagatcaggattccggcaatggcagccgctgaattgatctatggcgcgcagaaaagcgtgaaagcggcggagacgatggataaggtaaagcgttttttagagcccctgcaaattatcccgtttgatgaagaagcagcgtttttttacggcagcatcagagcttctctggaaaaagccggaaataccataggtttaaatgatattatcatagccgctactgtcttggcgcataacggcacactggttaccaataacatcggagagttttcccgtataaaaggcttgagcatggaaaactggacgaaaaaatcaacaaccccgccctga

SEQ ID NO: 28094 - protein, 138 aa, Unknown
  Obtained from environmental sample
  DOMAIN (2)...(130): PIN domain
  misc_feature (1)..(138): Xaa is any amino acid
MYFFDTNICIYFLKGIFPELQKKVLVTQPDKIRIPAMAAAELIYGAQKSVKAAETMDKVKRFLEPLQIIPFDEEAAFFYGSIRASLEKAGNTIGLNDIIIAATVLAHNGTLVTNNIGEFSRIKGLSMENWTKKSTTPP

SEQ ID NO: 28095 - DNA, 627 bp, Unknown
  Obtained from environmental sample
  misc_feature (1)..(627): n is a, c, g, or t
atgggggcgcagatggtgaaggaggtcgcctccaagacatccgacgcggcgggggacgggaccacgaccgccaccgtgttggcgcaggtcatcgcccgtctcggcataaagaacgtgaccgccggggccgacgctatggcggtcaagcgggggatcgataaggcggttaaggttatcgtcaagaggcttaagaaggattcaaagcccatctccggaaagaacgagatcgcccaggtcggcgccataagcgcgaacaacgactcggagatcggggatttgatcgccaacgctatggatacggtcggcaaggacggggtcatcacggtggaggaggccaaggggattgacactaatttagaggtggtggaggggatgcagtttgaccgcggctacacctcggcctacttcgtgacaaacggcgacacgttggagtgcgagctggacgacgcgcttatccttatatacgacaagaagatcagcggcatgaaggacatgctcccaatccttgagaaggttgcgcagatggggcgggcgttgctcatcatagccgaggaggtggagggcgaggcgctggcgactctggtgctgaacaaaactgcgcggcacgctgaagatagccgccgttaa

SEQ ID NO: 28096 - protein, 208 aa, Unknown
  Obtained from environmental sample
  misc_feature (1)..(208): Xaa is any amino acid
MGAQMVKEVASKTSDAAGDGTTTATVLAQVIARLGIKNVTAGADAMAVKRGIDKAVKVIVKRLKKDSKPISGKNEIAQVGAISANNDSEIGDLIANAMDTVGKDGVITVEEAKGIDTNLEVVEGMQFDRGYTSAYFVTNGDTLECELDDALILIYDKKISGMKDMLPILEKVAQMGRALLIIAEEVEGEALATLVLNKTARHAEDSRR

SEQ ID NO: 28097 - DNA, 489 bp, Unknown
  Obtained from environmental sample
  misc_feature (1)..(489): n is a, c, g, or t
atgctgcccacacgcgccttgatgtccgccggttttccgccgccctctattatagtggtgttctctttatcgataactatgcgcttcgccttgcccaacatatcaatagtcgcgttctcaagcttgtacccggcctcatcggagatgagcgccccgccggtcagcaccgctatatcctccagcatcgccttacgcctgtcgccgaagccgggagctttaacggcggctatcttcagcgtgccgcgcagttttgttcagcaccagagtcgccagcgcctcgccctccacctcctcggctatgatgagcaacgcccgccccatctgcgcaaccttctcaaggattgggagcatgtccttcatgccgctgatcttcttgtcgtatataaggataagcgcgtcgtccagctcgcactccaacgtgtcgccgtttgtcacgaagtaggccgaggtgtagccgcggtcaaactgcatcccctccaccacctctaa

SEQ ID NO: 28098 - protein, 162 aa, Unknown
  Obtained from environmental sample
  misc_feature (1)..(162): Xaa is any amino acid
MLPTRALMSAGFPPPSIIVVFSLSITMRFALPNISIVAFSSLYPASSEMSAPPVSTAISSSIALRLSPKPGALTAAIFSVPRSFVQHQSRQRLALHLLGYDEQRPPHLRNLLKDWEHVLHAADLLVVYKDKRVVQLALQRVAVCHEVGRGVAAVKLHPLHHL

SEQ ID NO: 28099 - DNA, 849 bp, Unknown
  Obtained from environmental sample
  misc_feature (1)..(849): n is a, c, g, or t
gtgggcagagcacgtctctacgggaatgtcgcagatcacgcactccgtggtcaagaccaaacccgctatggacgcggcgttttccagcgccgtgcgggttactttggtcgggtcgataacaccggccttgaccaaatcctcgtactttccggtgtaagcgttgaaaccgtaggcgcccttgccgccctttacgtcattggccaccaccgaggcctcaagacctgcgttggccactatcatccgcaacggctcctcgcaagcgcggcggataatgtccacgcctatctgttcgtcgccatccaatttcaaaccgtcaagatcggaagcggccctgatgagcgccacgccgccgccggcgacgataccctcctccaccgccgctctggtcgcgtgcaaagcgtcttcaacacgcgccttcttctccttcatctccgactccgtcgccgcgccgatattgatcaccgccacgcctccggcgagcttggccagacgctcctgaagcttctcgcggtcaaagtcggacttcgtttcgtcaacctgcttctttatgctgcccacacgcgccttgatgtccgccggttttccgccgccctctattatagtggtgttctctttatcgataactatgcgcttcgccttgcccaacatatcaatagtcgcgttctcaagcttgtacccggcctcatcggagatgagcgccccgccggtcagcaccgctatatcctccagcatcgccttacgcctgtcgccgaagccgggagctttaacggcggctatcttcagcgtgccgcgcagttttgttcagcaccagagtcgccagcgcctcgccctccacctcctcggctatga

SEQ ID NO: 28100 - protein, 282 aa, Unknown
  Obtained from environmental sample
  misc_feature (1)..(282): Xaa is any amino acid
MGRARLYGNVADHALRGQDQTRYGRGVFQRRAGYFGRVDNTGLDQILVLSGVSVETVGALAALYVIGHHRGLKTCVGHYHPQRLLASAADNVHAYLFVAIQFQTVKIGSGPDERHAAAGDDTLLHRRSGRVQSVFNTRLLLLHLRLRRRADIDHRHASGELGQTLLKLLAVKVGLRFVNLLLYAAHTRLDVRRFSAALYYSGVLFIDNYALRLAQHINSRVLKLVPGLIGDERPAGQHRYILQHRLTPVAEAGSFNGGYLQRAAQFCSAPESPAPRPPPPRL

SEQ ID NO: 28101 - DNA, 813 bp, Unknown
  Obtained from environmental sample
  misc_feature (1)..(813): n is a, c, g, or t
atgctggaggatatagcggtgctgaccggcggggcgctcatctccgatgaggccgggtacaagcttgagaacgcgactattgatatgttgggcaaggcgaagcgcatagttatcgataaagagaacaccactataatagagggcggcggaaaaccggcggacatcaaggcgcgtgtgggcagcataaagaagcaggttgacgaaacgaagtccgactttgaccgcgagaagcttcaggagcgtctggccaagctcgccggaggcgtggcggtgatcaatatcggcgcggcgacggagtcggagatgaaggagaagaaggcgcgtgttgaagacgctttgcacgcgaccagagcggcggtggaggagggtatcgtcgccggcggcggcgtggcgctcatcagggccgcttccgatcttgacggtttgaaattggatggcgacgaacagataggcgtggacattatccgccgcgcttgcgaggagccgttgcggatgatagtggccaacgcaggtcttgaggcctcggtggtggccaatgacgtaaagggcggcaagggcgcctacggtttcaacgcttacaccggaaagtacgaggatttggtcaaggccggtgttatcgacccgaccaaagtaacccgcacggcgctggaaaacgccgcgtccatagcgggtttggtcttgaccacggagtgcgtgatctgcgacattcccgtagagacgtgctctgcccacggcggcggcggtatgcctgatatgggcgggatgggaggcatgggaggtatgggcggaatgggcggaatggggatgatgtga

SEQ ID NO: 28102 - protein, 270 aa, Unknown
  Obtained from environmental sample
  DOMAIN (1)...(237): TCP-1/cpn60 chaperonin family
  misc_feature (1)..(270): Xaa is any amino acid
MLEDIAVLTGGALISDEAGYKLENATIDMLGKAKRIVIDKENTTIIEGGGKPADIKARVGSIKKQVDETKSDFDREKLQERLAKLAGGVAVINIGAATESEMKEKKARVEDALHATRAAVEEGIVAGGGVALIRAASDLDGLKLDGDEQIGVDIIRRACEEPLRMIVANAGLEASVVANDVKGGKGAYGFNAYTGKYEDLVKAGVIDPTKVTRTALENAASIAGLVLTTECVICDIPVETCSAHGGGGMPDMGGMGGMGGMGGMGGMGMM

SEQ ID NO: 28103 - DNA, 321 bp, Unknown
  Obtained from environmental sample
  misc_feature (1)..(321): n is a, c, g, or t
ttgccgccctttacgtcattggccaccaccgaggcctcaagacctgcgttggccactatcatccgcaacggctcctcgcaagcgcggcggataatgtccacgcctatctgttcgtcgccatccaatttcaaaccgtcaagatcggaagcggccctgatgagcgccacgccgccgccggcgacgataccctcctccaccgccgctctggtcgcgtgcaaagcgtcttcaacacgcgccttcttctccttcatctccgactccgtcgccgcgccgatattgatcaccgccacgcctccggcgagcttggccagacgctcctga

SEQ ID NO: 28104 - protein, 106 aa, Unknown
  Obtained from environmental sample
  misc_feature (1)..(106): Xaa is any amino acid
MPPFTSLATTEASRPALATIIRNGSSQARRIMSTPICSSPSNFKPSRSEAALMSATPPPATIPSSTAALVACKASSTRAFFSFISDSVAAPILITATPPASLARRS

SEQ ID NO: 28105 - DNA, 798 bp, Unknown
  Obtained from environmental sample
  misc_feature (1)..(798): n is a, c, g, or t
ttgcgctgtttccgaaaagtaatggttattgaggaaggccagccttttatagaagaaaaactccggggcatcctgccccagtcaatagaaattatcggcaggctggatccaggggccgaagggaataaaattccccggatgggcgaactcgaccccgacaacgtgagagccgcgctgggactgccgccgcgcccctcggtaagcggctttggctcatcaacacttccggcgcgtccgcctcagctctgcaagggctgcccccacgcggacagttatgagactatcaaaaaagtggtggaagaactggatccgcgcccgggccatcccgacgtggcggtcaactcggacatcggctgttattcgctcggcgccgcgccgccttacgaggttcccgaaagcatagtctgcatgggcgcgtcggtgggcatggcaaaaggcgcggctgacgcggggctgccctacagcatagcggtaatcggcgactccacgtttatccattcaggcataaccgcccttatcgacacggtcgcgtctgacacccccatgacccttgtcatacttgacaactccatcgtggcaatgacgggctgccagcccaccatggttccttcggaaagtctgcgcagtctgcttctcggatgcggcgttaaacaggaacatttgctggaactggaagcgaaaaagcagcttattgaggagaacgccgcgcggctaaaaaaagaaatcgaataccgcggcctttcggtggtggtattcaaacgcgagtgcctggaagccgcgaggaaatcgcggaaatag

SEQ ID NO: 28106 - protein, 265 aa, Unknown
  Obtained from environmental sample
  DOMAIN (116)...(252): Thiamine pyrophosphate enzyme, C-terminal TPP binding domain
  misc_feature (1)..(265): Xaa is any amino acid
MRCFRKVMVIEEGQPFIEEKLRGILPQSIEIIGRLDPGAEGNKIPRMGELDPDNVRAALGLPPRPSVSGFGSSTLPARPPQLCKGCPHADSYETIKKVVEELDPRPGHPDVAVNSDIGCYSLGAAPPYEVPESIVCMGASVGMAKGAADAGLPYSIAVIGDSTFIHSGITALIDTVASDTPMTLVILDNSIVAMTGCQPTMVPSESLRSLLLGCGVKQEHLLELEAKKQLIEENAARLKKEIEYRGLSVVVFKRECLEAARKSRK

SEQ ID NO: 28107 - DNA, 423 bp, Unknown
  Obtained from environmental sample
  misc_feature (1)..(423): n is a, c, g, or t
atgaataaagttctcctgaagcagtccatacgaaacgcctctcagatcagcttctcccggtccggcggcccgggagggcagaatgtcaacaagcttaatacgaaagtgaccttgcgcctgcgccttgcagatattgccggactttcggaagccgaactggtgagggtgagggaagtgctgtcaaaccggattagctccggggacgagattgttatcaactctgacgaagagcgttctcagcgtaccaatctggaaagggcgtatttccgcgttgaggcgctaataacccaggcggcgcggctgcccaaacaccgccgccctacaaaaccgtcaaaggccagccgcgagaaaaggctccatgtaaagcagttgcaaagccgcaaaaaagagttaaggcgtccggagcatacgccggaagattaa

SEQ ID NO: 28108 - protein, 140 aa, Unknown
  Obtained from environmental sample
  DOMAIN (4)...(132): Peptidyl-tRNA hydrolase domain
  misc_feature (1)..(140): Xaa is any amino acid
MNKVLLKQSIRNASQISFSRSGGPGGQNVNKLNTKVTLRLRLADIAGLSEAELVRVREVLSNRISSGDEIVINSDEERSQRTNLERAYFRVEALITQAARLPKHRRPTKPSKASREKRLHVKQLQSRKKELRRPEHTPED

SEQ ID NO: 28109 - DNA, 333 bp, Unknown
  Obtained from environmental sample
  misc_feature (1)..(333): n is a, c, g, or t
ttgattaactcgttttcacttttgattaagctgtcttcactttttgttaactcgtcttcacttttgattaagccgtcttcacttttgaataagccgtcttcacttttgattaagccgtcttcacttttgattaagctgtcttcactttttgttaagctgtcttcacttttgattaagccgtcttcacttttgattaagccgtcttcacttttgattaagccgtcttcacttttgattaagccgtcttcactttttttgaggattgctctcaaattcaacaacttattggggttttttaataagttctgtcgtattttagcgcaaataggttaa

SEQ ID NO: 28110 - protein, 110 aa, Unknown
  Obtained from environmental sample
  misc_feature (1)..(110): Xaa is any amino acid
MINSFSLLIKLSSLFVNSSSLLIKPSSLLNKPSSLLIKPSSLLIKLSSLFVKLSSLLIKPSSLLIKPSSLLIKPSSLLIKPSSLFLRIALKFNNLLGFFNKFCRILAQIG

SEQ ID NO: 28111 - DNA, 381 bp, Unknown
  Obtained from environmental sample
  misc_feature (1)..(381): n is a, c, g, or t
ttgcaggtggggcttcagagcaggagtttcggccctgttcccgtcaacttcggtaatgttgacctgttaaccacccttcagtcccaatccgtgcctgaactttccggctccgcggaaaatgaaaatttctggaaagccgctttttccactcccgtgggaaagccgtcccagtggatagtgcaggggagcaacgtgcttgtgcttttcccttccgaggagacggaggccgacgcttccaggttggagaccgtcgcttccaattttaccgactactggcttgattatatgaacgggcaatccatgcagcagttttttcttaacagccccaaaatggaagataagttcatggatgtatatttccgctattttgtcaacaactga

SEQ ID NO: 28112 - protein, 126 aa, Unknown
  Obtained from environmental sample
  misc_feature (1)..(126): Xaa is any amino acid
MQVGLQSRSFGPVPVNFGNVDLLTTLQSQSVPELSGSAENENFWKAAFSTPVGKPSQWIVQGSNVLVLFPSEETEADASRLETVASNFTDYWLDYMNGQSMQQFFLNSPKMEDKFMDVYFRYFVNN

SEQ ID NO: 28113 - DNA, 1185 bp, Unknown
  Obtained from environmental sample
  misc_feature (1)..(1185): n is a, c, g, or t
atggaagggggtttttcctacaagggaaagaccctgctttcccgagttgatccagccgggaaagccgaccgcatcgccgatactgtccccgtcattgacggaaccctgtacctctgtccctcccccctgtacggctacgggcttgaacgcctgctttcccgccttgaagagccggcgcctgattccgcggtgctgtgctttgaacctgaaccccagttatacgatatttcacgcgggaatttcagcgaagccctgaaacgaagtcctaaattgtgcctggcaaacacccgagacgccgccgggctgtgcgccctgataagggaaaaatggggggcaagggtcttccgcagaatacacgtgctgcgccttaacgggggctggcagctgcatcctgatttgaatgagcttgccgacaccctgcagcgcgagattgcccttgactggggcaacgcgattaccctcgcgaaactgggcagacgttatatccgcaacatgatacgcaacctcgcgttgattccaaaacacccttcgattacagggcttaccttcggcgcggagccggtgctggcgctgggagccggcctttctcttgacgccgcgctggatagtctttttatccgctttggtgatgtctgccaacagccggaaacccgcatgttcagaatagtatgcgtagacacctgccttccggctttgcgggaacgcggcataaaacccgaccttgcgataatccttgagagccagcactggaacctggatgattttaccggcctttccggctgggacgttcccgcggcctttgacctttcggcgttgccggggtccgcaaatgtgctgggaaacgggcttttcctttttttcaccccctggacgcggctaagcattttcaagcggcttgagtcttcgggcctccttcctgcaagcatgatgcctttaggctctgtgggccttagcgccgtggcgatttccatgcggcttacgcggggcgctataataaccgcgggcattgatttttcgtttaccctggattcgtaccatgcccgatccaccccgagccatttggccagactgcgccgccagaaccgttttacaagcctgttaaacacggaggcagcgtttaacaggccgacattcaacgcggtttcaaaaacagagaaacaagggttttatcaaatcccggcatga

SEQ ID NO: 28114 - protein, 394 aa, Unknown
  Obtained from environmental sample
  misc_feature (1)..(394): Xaa is any amino acid
MEGGFSYKGKTLLSRVDPAGKADRIADTVPVIDGTLYLCPSPLYGYGLERLLSRLEEPAPDSAVLCFEPEPQLYDISRGNFSEALKRSPKLCLANTRDAAGLCALIREKWGARVFRRIHVLRLNGGWQLHPDLNELADTLQREIALDWGNAITLAKLGRRYIRNMIRNLALIPKHPSITGLTFGAEPVLALGAGLSLDAALDSLFIRFGDVCQQPETRMFRIVCVDTCLPALRERGIKPDLAIILESQHWNLDDFTGLSGWDVPAAFDLSALPGSANVLGNGLFLFFTPWTRLSIFKRLESSGLLPASMMPLGSVGLSAVAISMRLTRGAIITAGIDFSFTLDSYHARSTPSHLARLRRQNRFTSLLNTEAAFNRPTFNAVSKTEKQGFYQIPA

SEQ ID NO: 28115 - DNA, 534 bp, Unknown
  Obtained from environmental sample
  misc_feature (1)..(534): n is a, c, g, or t
atgcttaaatctgtagaatctttagatttgcgtttcttcttcttttggcggagacattctttctcggcaaggatggataagtttttgaggctttatactcgcatgggcgatggctatgtatgggctttggtaatagcatacatttactttttttatggtaaaatagttttatttggaatagtagaacgtgttatacctgcacttttgttgagtttgtttttttattggctcattaaactctctattcgccgcaaacgtccatttgatttgttgaaggaagtgaacgcagatgttccgccgctggataaatacagcttcccaagcggccatactatgaataaccttgccgttggtttcactgtttttgcagaagtacctattataggttggactatgttatttatgcctattacttgggggtttttaagggtttattacggagtacactggctttcagacgttattggtgggatttgtcttggatttttaagtttttggctcggaaaaattgtttttgttatattatggcaataa

SEQ ID NO: 28116 - protein, 177 aa, Unknown
  Obtained from environmental sample
  DOMAIN (60)...(177): PAP2 superfamily
  misc_feature (1)..(177): Xaa is any amino acid
MLKSVESLDLRFFFFWRRHSFSARMDKFLRLYTRMGDGYVWALVIAYIYFFYGKIVLFGIVERVIPALLLSLFFYWLIKLSIRRKRPFDLLKEVNADVPPLDKYSFPSGHTMNNLAVGFTVFAEVPIIGWTMLFMPITWGFLRVYYGVHWLSDVIGGICLGFLSFWLGKIVFVILWQ

SEQ ID NO: 28117 - DNA, 663 bp, Unknown
  Obtained from environmental sample
  misc_feature (1)..(663): n is a, c, g, or t
gtgaacatgcaaatagcccttgaacttgtgcctaaaactttgaacacctttttggaagaatcccaaatgcatataggtaattttccaaaaatcgcagcgataaacgttccagaacttcgcagtgcagaaataaaaagttttgaggcaagcgagcatttacttaaaaacggagttgtggcaattccgcatttcaggctaatagaccgtaccttggatgatttggaaagcaaggttgaaaaactcgtttcgctcggtttaaagcaggttcttttagtcagcggagaccctcctatagatgcgcagaattttgttcccagcggcgtgaaagcaccgcaggccatcaagcatattaaaacaaaattcccgcagttgaaggtttacggtgcccaagattcgtatcgccagtcttttaaaaaagaattagattattgcaaagagaaacttgatgccggagcggatggtttttttacccagccttttttctcagagggtattttgaacctgtggcttgagcagctgccagaaaccgagatgtggattgggttaagccctgtcacaggaaagagttcccgcaattattgggagacggttaatcaagttgtgtttcctcctaacttccgttttgattggaagggaattgcaccatggggcggcgcattttaa

SEQ ID NO: 28118 - protein, 220 aa, Unknown
  Obtained from environmental sample
  DOMAIN (2)...(217): Methylenetetrahydrofolate reductase
  misc_feature (1)..(220): Xaa is any amino acid
MNMQIALELVPKTLNTFLEESQMHIGNFPKIAAINVPELRSAEIKSFEASEHLLKNGVVAIPHFRLIDRTLDDLESKVEKLVSLGLKQVLLVSGDPPIDAQNFVPSGVKAPQAIKHIKTKFPQLKVYGAQDSYRQSFKKELDYCKEKLDAGADGFFTQPFFSEGILNLWLEQLPETEMWIGLSPVTGKSSRNYWETVNQVVFPPNFRFDWKGIAPWGGAF

SEQ ID NO: 28119 - DNA, 861 bp, Unknown
  Obtained from environmental sample
  misc_feature (1)..(861): n is a, c, g, or t
ttggaaggccaatacagggaaaaaataaaagatctgttcgattcccttcctgatttccttgaaaaagtacagcagggaaaatccgtaaaagatatacgtaacgagataaacgaacaatacggcgatatttttacgctttttgacagttttgaaacggctttcaagaacaatatggcgaaattgcgttcaaattcgcaaaacctcggaaggatcaccggcgagttacaggaaggcgtaatgagaatccgcatggttccgatcagccagatattcagccgcttcccgcgccttgtacgcgatctttcaaaaacgctcaacaaaaaaatcaacttggttatcgaaggtgaagacacggaacttgacaagtcggtagtcgaagaccttctcgatcctataatgcactcggtgcgtaactctatcgaccacggaattgaatccgcggaagaaagaagggccgccggcaagccggaagaaggcatggttcttcttaaagcggccaacgaaggcaatatgatcgttatagaaatcggagacgacggcggcggtattgatgttgaagccgttaagtcaaaagccattgagcgcggaataataagcccgaataaagttcttaccgatgttgaagcttataatcttatttttgaacccggcttctcaacttctacgcagataaccgcgatttcagggcgcggcgtcggtctggacgttgtgcgccgctcaattgacgcccttaacggaactgtcacggttaattcagaaaaaggaaaagggaccacatttgttatcaaattgccgctaacgctggctattattcaaggtctcttggttcgcgtcggaccggaatttattctatcccgataa

SEQ ID NO: 28120 - protein, 286 aa, Unknown
  Obtained from environmental sample
  DOMAIN (127)...(267): Histidine kinase-, DNA gyrase B-, and HSP90-like ATPase
  misc_feature (1)..(286): Xaa is any amino acid
MEGQYREKIKDLFDSLPDFLEKVQQGKSVKDIRNEINEQYGDIFTLFDSFETAFKNNMAKLRSNSQNLGRITGELQEGVMRIRMVPISQIFSRFPRLVRDLSKTLNKKINLVIEGEDTELDKSVVEDLLDPIMHSVRNSIDHGIESAEERRAAGKPEEGMVLLKAANEGNMIVIEIGDDGGGIDVEAVKSKAIERGIISPNKVLTDVEAYNLIFEPGFSTSTQITAISGRGVGLDVVRRSIDALNGTVTVNSEKGKGTTFVIKLPLTLAIIQGLLVRVGPEFILSR

SEQ ID NO: 28121 - DNA, 624 bp, Unknown
  Obtained from environmental sample
  misc_feature (1)..(624): n is a, c, g, or t
atggcggcagtagttaaagatttagcgcaagtaaacgctgatttacaggaacagaaagaacgcgttgataacgtggatttcaagatggtaactttctccctcgcgggaaaagattatggcgtggacattatgagtgtaaaagaaatcgcgaaagccgataaatttacatttgtgcctaacgccgcttcctttatccgcggggtatataacctgcgcggcgacattatcccgattattgactttaggtccttctttcatttgccttatgaagccagaaccgaaggcctggaaaacatgcttatccttcacattaacgaccaggtttacggaacaattgtagacaggattgataaagttatcggaattaaccacgagacaatacagccgccgttcctgattttatcgcggaagcgctcagcctcctcgcgacctcgtggcgcgcgcaagccgctttcatttgctgggcgtacaggttctttgccgcgacggcctttatcttcgcgtgcgcgctcttcgccgtcttcatcgtcaaatacctgccgcggggcgtacatccgatcggggacacgcttttcgtgggcgcttccccgggcgtccgcaccgccctcggccgatctgtcatga

SEQ ID NO: 28122 - protein, 207 aa, Unknown
  Obtained from environmental sample
  DOMAIN (28)...(151): CheW-like domain
  misc_feature (1)..(207): Xaa is any amino acid
MAAVVKDLAQVNADLQEQKERVDNVDFKMVTFSLAGKDYGVDIMSVKEIAKADKFTFVPNAASFIRGVYNLRGDIIPIIDFRSFFHLPYEARTEGLENMLILHINDQVYGTIVDRIDKVIGINHETIQPPFLILSRKRSASSRPRGARKPLSFAGRTGSLPRRPLSSRARSSPSSSSNTCRGAYIRSGTRFSWALPRASAPPSADLS

SEQ ID NO: 28123 - DNA, 858 bp, Unknown
  Obtained from environmental sample
  misc_feature (1)..(858): n is a, c, g, or t
gtggcgctacaggttttcgcagcctatgtgcctcctgaaacagacaacgcctttagctatgcgtgtgaaaggtttgacgccattgacgctttcgtggcgtccgacgagcgtttgacgcctgtcgagaccgctgcggagttaaggaatgttttgtccggggaaaaaacaggtgtcatggcggcgctggaaaacggccttgccattgaagaatcgcttgaaaagcttgaaaaactccgccgcagaaaggtgaggattcttacccttgttcattccaaacatttgccgtgggttgcgtcgtgtaccggcacgggagaagaccgggggctaagcagttttgggttacaggtggtagacgccatgaacgatctggggataattcccgatatatcccattcgtcggaaagcgctttttgggaagtgatcaagcgatctaaaaaaccgatcatagcttcccactcctgcgcctatagcctttgtgccgccgcaaggaacctgaaagacgatcaactcaaagccctggccgattccgggggccttgtgggagtgaatttttcttccggttttttgtacgaaccattccgtctggttttagaaaaggaaaggaaaaacggtaatcaacatcctgatatttccgttagcgtaccacagtcaattattgcggatcatattgattatatggtgaagatcgccggtgaggaatgcgttgcccttggctctgacttcgacggaatttccttccttcccgaaagagttacaggcagcgatttctttccgatactggaagcggagcttcgttcgcgtgggtattcggagaacgcattggcagattttcaacggcaactttttaagggtgcttga

SEQ ID NO: 28124 - protein, 285 aa, Unknown
  Obtained from environmental sample
  DOMAIN (1)...(284): Membrane dipeptidase (Peptidase family M19)
  misc_feature (1)..(285): Xaa is any amino acid
MALQVFAAYVPPETDNAFSYACERFDAIDAFVASDERLTPVETAAELRNVLSGEKTGVMAALENGLAIEESLEKLEKLRRRKVRILTLVHSKHLPWVASCTGTGEDRGLSSFGLQVVDAMNDLGIIPDISHSSESAFWEVIKRSKKPIIASHSCAYSLCAAARNLKDDQLKALADSGGLVGVNFSSGFLYEPFRLVLEKERKNGNQHPDISVSVPQSIIADHIDYMVKIAGEECVALGSDFDGISFLPERVTGSDFFPILEAELRSRGYSENALADFQRQLFKGA

SEQ ID NO: 28125 - DNA, 483 bp, Unknown
  Obtained from environmental sample
  misc_feature (1)..(483): n is a, c, g, or t
atgattttgtatcacggcggtactgatgttgttgaaaaaccggtaattaaatcgctgtctttgggccgcgattttggcaggggtttttattgtacggacatacagggccaggcggaaaaatgggcaaaacggcagggacggatcagaaaacaaaccgccgttctaaataagtatgaatttgatattgaacgtgcgcagcgggatttgagtatacaattgttcaatgattattcgcaggaatggcttgagcttgtagtaaattgccgaaataatcctcaattcgttcatgggtttgatattgttcatggaaagattgccaatgatgatgttggcgaaacggttcaggctgttgtggatggactaatgcctttcgactttgcactgcaaaaactcgcgtttatgccttcgaacaaccaatactgtttttgcacagaaaaatccttaagctgtcttgggtttattgaatctgtggaattgggttaa

SEQ ID NO: 28126 - protein, 160 aa, Unknown
  Obtained from environmental sample
  misc_feature (1)..(160): Xaa is any amino acid
MILYHGGTDVVEKPVIKSLSLGRDFGRGFYCTDIQGQAEKWAKRQGRIRKQTAVLNKYEFDIERAQRDLSIQLFNDYSQEWLELVVNCRNNPQFVHGFDIVHGKIANDDVGETVQAVVDGLMPFDFALQKLAFMPSNNQYCFCTEKSLSCLGFIESVELG

SEQ ID NO: 28127 - DNA, 1476 bp, Unknown
  Obtained from environmental sample
  misc_feature (1)..(1476): n is a, c, g, or t
ttgcaggcgaatgaagcggcggcggaaggccagtatgtaacggtagtaatggacctctccgctcccgacgtaaacaacctgaacgcaaaactgaacactccgtcatcgacagaaataaaagacaataaaaccgtccatgtatacggctccggcgcgggaataaccttaactgtagacgggcttgaaaatcttgcggacaacggatcgcatggcggtatattggcggcgcaggcatggggcttgccgtggacgatggacgagataaacaacctgtactggtatgtccgcatcggggaagaaaaccagcttgagaagaaatcaagcgataagctcaacgtgtacgagggcttaacgctgaacaaaacatggactcccgaagttataaccaatttaaccgactcaggcggctatcgggtatatgtaaagtttgaagataccatggggaacatatcccttgactggaaggatacgggccttatagtaaggtattcaacggcgacaattaccgcagtcagcggtcttcaggcagtttgcaacgccgccggagattcgataacggtaagctggactacaccgtctgacatgacaggcgcgtatgtgtatgtaaacggcgcggaaaacgtcattaacggcgcaggctcaaaaacccatagcattacgaatgttccgctgattaccgctgacggagtgaagaacggacagcctgtaagcaatgttacacgctacgacattcgtgtagaggcgtacaacgaggcgggcagggcaacggcgcagacgctttccgtctggaacataccgggcatggacgtaaaccaaacaaataccgttctcctttacccatccaattttgcaagcgagcttgctgtgaacagtacgaataactttatccttaccgaagacgttaccgtttcttcgtggactccaaagggtacagacacaaacacaacccgttttaccggcaaattctacggcaacgggcataccgttacgataatcagcatgaccgccgccgccaacatgggcttgttcggcgtgataaacggcggtcttgtccgcgacctgaccgtacaatacaacaacgccgccatagatcccacaggcgcggcacaattcggcggcattgccggaacaacgcagggaaccgcgcagttgctcaatgtgcgggttttaggcgcggcaacattcaacgtctcaggcgacaccaccgcctatgtcggcgggcttgtcggtcttatgatcggcacttcaagcgtcaaaaacgcctacggcggccttaacctcggcgtgggaaaggcgtacccaagcacagacacaagcacgataaacggttcgctatatgtgggcggagctgcggggagcatgggtacgcctgacacgctaaccaaccctgacggcgatgccgtcaaggtggaagaagcaagcgttacgggagacattaccgttggtgctgctgaccgacgtctcggccgattctga

SEQ ID NO: 28128 - protein, 491 aa, Unknown
  Obtained from environmental sample
  misc_feature (1)..(491): Xaa is any amino acid
MQANEAAAEGQYVTVVMDLSAPDVNNLNAKLNTPSSTEIKDNKTVHVYGSGAGITLTVDGLENLADNGSHGGILAAQAWGLPWTMDEINNLYWYVRIGEENQLEKKSSDKLNVYEGLTLNKTWTPEVITNLTDSGGYRVYVKFEDTMGNISLDWKDTGLIVRYSTATITAVSGLQAVCNAAGDSITVSWTTPSDMTGAYVYVNGAENVINGAGSKTHSITNVPLITADGVKNGQPVSNVTRYDIRVEAYNEAGRATAQTLSVWNIPGMDVNQTNTVLLYPSNFASELAVNSTNNFILTEDVTVSSWTPKGTDTNTTRFTGKFYGNGHTVTIISMTAAANMGLFGVINGGLVRDLTVQYNNAAIDPTGAAQFGGIAGTTQGTAQLLNVRVLGAATFNVSGDTTAYVGGLVGLMIGTSSVKNAYGGLNLGVGKAYPSTDTSTINGSLYVGGAAGSMGTPDTLTNPDGDAVKVEEASVTGDITVGAADRRLGRF

SEQ ID NO: 28129 - DNA, 861 bp, Unknown
  Obtained from environmental sample
  misc_feature (1)..(861): n is a, c, g, or t
ttggaccactcctgggttatggcctggcccacggaaatagaggccttcctttcatatgcggaactatacccagacaactccgtctttttaatagacacatacgatacccttaaaagcggaaccaagagtgcaatagaagcgggaaaaaccctggcggcaaagggaaaaaatttcggtgtacgcctggattctggcgacatatattacctttcggtagaagtaaggaagatgcttgatgcggcgggcctgccaaatgcgacaatttcggtttccaacgatctggacgagtatgtcgttaatgttctcaccgacgcaaatgcgccggttaacacctggggagtcggcacccagatggttacgggcgggacagaggcggcgtttaccggggtttacaagcttgcggcgagcgacgacggaagggggaaattatccgcaagaatcaaattttcagacaacccagccaaaaccaccaaccccggcgttaagcaggtctggcgcattaaggactcaggcgggatgtgcgtcgccgacgttctcgccctcgaagattccgatgagcctgacattctggaaaacggaaaaacttattcgttctggcacccgcaggcggactaccgccatttcatccatactctcgatcaaaatgcggaaccgcttctgaaagagcgccttaagggcggaaagctcacagggcaaaacccctgccctcccggaatccaaaaccgcgtccgcccggagcttgagggccttgacggaagctacaagcgctttcttaatccacacatttacaaggtttccgttacagagcggctgcgggcgttaaagctggaacttatcaaaaactatttaggagatctgtaa

SEQ ID NO: 28130 - protein, 286 aa, Unknown
  Obtained from environmental sample
  misc_feature (1)..(286): Xaa is any amino acid
MDHSWVMAWPTEIEAFLSYAELYPDNSVFLIDTYDTLKSGTKSAIEAGKTLAAKGKNFGVRLDSGDIYYLSVEVRKMLDAAGLPNATISVSNDLDEYVVNVLTDANAPVNTWGVGTQMVTGGTEAAFTGVYKLAASDDGRGKLSARIKFSDNPAKTTNPGVKQVWRIKDSGGMCVADVLALEDSDEPDILENGKTYSFWHPQADYRHFIHTLDQNAEPLLKERLKGGKLTGQNPCPPGIQNRVRPELEGLDGSYKRFLNPHIYKVSVTERLRALKLELIKNYLGDL

SEQ ID NO: 28131 - DNA, 834 bp, Unknown
  Obtained from environmental sample
  misc_feature (1)..(834): n is a, c, g, or t
atgtcgaaaaacagtaagcttgtggaggtcgcctttaagggcgagcgcaaggcgatattcaaggacaagaacgaactcgacatcgttgagggcgagtacattgtcgtggaggcggagcgcggccaagacatgggcaaggcctcctgcgtgggctctctggtaaaacttaaacgcggcaaaggcgaaacccgcggcgttatccgcaaggcgcaggatagcgatcttgagacactcaagagaaaccaagatcgcgaaaagtccgcctttaaggtctgccgcgacaagatcaagcactacaaactcgatatgaaacttgtagacgttgaaatggcattcgacggcggcaagataacattctacttcaccgccgcgcaacgcgtcgatttccgcgaattggtcaaagacctcggctccgtctaccgcacccgtattgaactgcgccagatcggcgtccgcgacgaagccagggtggtaagcgggcttggcatttgcggacggggctactgctgccattccgtttccgacaagctgaaacccgtgtcaataaaaatggcgaaagaccagaacctttcgtttaactcaatgaaaatatccgggccctgcggaaggctgctctgctgtctttcttacgagcacggtttttactgcgaacagatccgccgtatcccgcaggaaggctcaagggtaaaccatgaaaatgaaacatgggccgttaccgaagcgaacatggtcaccggccaggtaaaactctccaacagcgacggccgcctggtaaccctccccgccgacaggtttgaaaaagttgataaccactggagaaccaaaggcagataa

SEQ ID NO: 28132 - protein, 277 aa, Unknown
  Obtained from environmental sample
  DOMAIN (62)...(149): PSP1 C-terminal conserved region
  misc_feature (1)..(277): Xaa is any amino acid
MSKNSKLVEVAFKGERKAIFKDKNELDIVEGEYIVVEAERGQDMGKASCVGSLVKLKRGKGETRGVIRKAQDSDLETLKRNQDREKSAFKVCRDKIKHYKLDMKLVDVEMAFDGGKITFYFTAAQRVDFRELVKDLGSVYRTRIELRQIGVRDEARVVSGLGICGRGYCCHSVSDKLKPVSIKMAKDQNLSFNSMKISGPCGRLLCCLSYEHGFYCEQIRRIPQEGSRVNHENETWAVTEANMVTGQVKLSNSDGRLVTLPADRFEKVDNHWRTKGR

SEQ ID NO: 28133 - DNA, 1167 bp, Unknown
  Obtained from environmental sample
  misc_feature (1)..(1167): n is a, c, g, or t
ttggacatgatcctgtcagggtctttcattgttccccttggcatccagttacaaataattgttacacttgtttttgtatttttgtttttctttgccagcgggaacttcgcgcctgttgttagggctataacggggtttcttgcagttgtcctcgccgttgcaggttccgctttattgttccgctttaccggcttttatttcaatccgcttttgactgctttttcaatgatcagcgccgtcattgcaagagaaataatttcctatgcggcctccgaaagggaaaagcagttcatccgcaaggctttttctacctatgtttccgatgacgtggtcaaggagatcattgccgatccttcgcgtctccagcttggcggaaccaagcgccacatgagcgcaatctttacggatgttcagggtttttccagcatctccgaacagctcgatcctgaacatctggtaagccttttgaaccgttaccttacttttatgagcgacgcgattcttgaagaaaaaggtaccatagacaaatacgagggagatgctattatcgccttttttggggcaccaatacctattaaggatcatgccctcagggcctgcgcttccgctatcgcgattaagcagatcgagaaggggcttaacaaaaaaatcatggaagaaaatctttctcccaagccgcttttaaccaggataggcattaacaccggaagtatggtagccggtaacatgggtaccggaaacaagatgaactatacaataatgggaaacgcggtaaacctggcctcccgtcttgaaggcgtaaacaagcaatacggaacctggatactcgcttcccaaagcactgccgaagaagccggggatagcattcttacccgcaaacttgacagggtcagggtcgtaggcatcaacgaaccggtgcgtctccatgagctcataaacatggcagaatacgcaaattcaaacgaaaaaaaactggtagaagtttttgaccaggcgcgtgaatgttatgagaaccggaaatggaaagaagccattgaaggctttaaggaatccctgtcaatcgaaagggctgggccttcggcgttatacttcaggcgctgcgagcacttcttaaagaatccgccgaatgataattgggatggggtaaataacttaacagaaaagtaa

SEQ ID NO: 28134 - protein, 388 aa, Unknown
  Obtained from environmental sample
  DOMAIN (125)...(313): Adenylate and Guanylate cyclase catalytic domain
  misc_feature (1)..(388): Xaa is any amino acid
MDMILSGSFIVPLGIQLQIIVTLVFVFLFFFASGNFAPVVRAITGFLAVVLAVAGSALLFRFTGFYFNPLLTAFSMISAVIAREIISYAASEREKQFIRKAFSTYVSDDVVKEIIADPSRLQLGGTKRHMSAIFTDVQGFSSISEQLDPEHLVSLLNRYLTFMSDAILEEKGTIDKYEGDAIIAFFGAPIPIKDHALRACASAIAIKQIEKGLNKKIMEENLSPKPLLTRIGINTGSMVAGNMGTGNKMNYTIMGNAVNLASRLEGVNKQYGTWILASQSTAEEAGDSILTRKLDRVRVVGINEPVRLHELINMAEYANSNEKKLVEVFDQARECYENRKWKEAIEGFKESLSIERAGPSALYFRRCEHFLKNPPNDNWDGVNNLTEK

SEQ ID NO: 28135 - DNA, 765 bp, Unknown
  Obtained from environmental sample
  misc_feature (1)..(765): n is a, c, g, or t
atgaaaaagccccccgaaaaagctctgttaattgtctttttcgcgcttgttttttttctgtttcctaaaaccgctttgctctgcgcccagggcattggcggtaccgacctggatacaattcgcgcaagggaggaattccgcataggggtgcaagcctactaccgcttttcatataacgaggccatcctctcttttgaaagggcgctctcgttccggccgggcgagcctttgatccttgactggcttggaaaggcctactatcgctccggcattgaaaacacagctttcagggcatggcaggctgccgccgcagagtatggcttttcgtccggccagggaatgttaatctccagccgcatggaaacgctccggaaccgccggatcctgtttcccgtagccgatgatgaagttcgctacgttgagtcaggcaggttccccggcaaaaccggcgatgaaacatactaccgtcagccgtcttcggtgctatccctgaatgacggttccgcctgggtagtagcctacggaagcaacgaaatccttcgcatcgatccaaacggcattatccgcgaaagaaagcgcgggcctcttaacggctttgataggccttacgatctggttaaaggcctggatgggaacctttacctttccgagttaagggggcaacagaatttccgtcctctccccgtcgggagactggcagtattacataggctccaggggccaggggccaggacaatttgtggggccccaaaaccttgccattga

SEQ ID NO: 28136 - protein, 254 aa, Unknown
  Obtained from environmental sample
  SIGNAL (1)...(29)
  misc_feature (1)..(254): Xaa is any amino acid
MKKPPEKALLIVFFALVFFLFPKTALLCAQGIGGTDLDTIRAREEFRIGVQAYYRFSYNEAILSFERALSFRPGEPLILDWLGKAYYRSGIENTAFRAWQAAAAEYGFSSGQGMLISSRMETLRNRRILFPVADDEVRYVESGRFPGKTGDETYYRQPSSVLSLNDGSAWVVAYGSNEILRIDPNGIIRERKRGPLNGFDRPYDLVKGLDGNLYLSELRGQQNFRPLPVGRLAVLHRLQGPGARTICGAPKPCH

SEQ ID NO: 28137 - DNA, 462 bp, Unknown
  Obtained from environmental sample
  misc_feature (1)..(462): n is a, c, g, or t
gtggggccccaaaaccttgccattgacgaagatggctatctctacgtagttgattacgggaacaggcggatctgcaaattcgatccttcggggactttcattctttcctttggcgcaaagaattacggttttcagggctttatttcccccacgggcattgcggctcgcaacggcaggatatacgctgccgacagtgtattaaagcaaatatttgtttttgatcgcaatggaacttaccttggcccgcttattcaggaggggctacattcgcctgaaagccttcgtttcctttcggacggaaagctgctcgccgcagattcaaaccgcgttattttaatcgatcccgacacggcaataatccgggagcttggcgctttccgaaacgcctccagcgtgcggattaccggggcggaaatggacataaacggcaatgtgctgctggcggatttcaaaatccggtga

SEQ ID NO: 28138 - protein, 153 aa, Unknown
  Obtained from environmental sample
  DOMAIN (47)...(73): NHL repeat
  misc_feature (1)..(153): Xaa is any amino acid
MGPQNLAIDEDGYLYVVDYGNRRICKFDPSGTFILSFGAKNYGFQGFISPTGIAARNGRIYAADSVLKQIFVFDRNGTYLGPLIQEGLHSPESLRFLSDGKLLAADSNRVILIDPDTAIIRELGAFRNASSVRITGAEMDINGNVLLADFKIR

SEQ ID NO: 28139 - DNA, 357 bp, Unknown
  Obtained from environmental sample
  misc_feature (1)..(357): n is a, c, g, or t
gtgcgttttaacacggttataaaggaaataaagggcgataaaaaagtaagctctgttgttttgtcagatacaaccaacggcaatgtttatgaggaacagacggacgctgtttttatttttgccgggactgttccccggtcgtcgcttgtctgcggtgaattaaacgcaaagcttgatgaaagcggctatattgtaacggatgaaaaaatggcctgcggcaaatctggtttgtttgccgcaggtgatatccgctcaggcgcttttcgtcaggtaataacagccgccgctgacggcgcaatggcggctcacagcgcctgcgcgtacattgacgagcttaattcaggaaaaacaaaatga

SEQ ID NO: 28140 - protein, 118 aa, Unknown
  Obtained from environmental sample
  misc_feature (1)..(118): Xaa is any amino acid
MRFNTVIKEIKGDKKVSSVVLSDTTNGNVYEEQTDAVFIFAGTVPRSSLVCGELNAKLDESGYIVTDEKMACGKSGLFAAGDIRSGAFRQVITAAADGAMAAHSACAYIDELNSGKTK

SEQ ID NO: 28141 - DNA, 534 bp, Unknown
  Obtained from environmental sample
  misc_feature (1)..(534): n is a, c, g, or t
ttggtctataaaagtgaaatggtaaataaaacaccttcgcttgtcgaagcattagatgcttttgaaaagaaatttttaaatattcaaaagccattgttattgcaaccgatttggaaaacaaaaggcaaaagccctgctttggacgacaacgcctttgatatttttgtttggagtgattttgcattaagtcgtcttttcatagactccgcagaaggaaacccaacaaacatttctcgtgcaacaagaagtacggcaaggctcgcacgtattttatatgaaataagcacacagggtaaaactaacatttatcaaatttacacggaaatggcttttgaacaccagaccgataaagaatttgcgatgggtggcagaataacccgaaactatatgatgtctcctcgcagactgaaaccagcgttgaagaaaggcgttttatcggacattattctgggcggtggcgaaaaattgttaagccctgaacggcgttttgaccaaactgtatactttacacttgggaataaggtacataaatag

SEQ ID NO: 28142 - protein, 177 aa, Unknown
  Obtained from environmental sample
  misc_feature (1)..(177): Xaa is any amino acid
MVYKSEMVNKTPSLVEALDAFEKKFLNIQKPLLLQPIWKTKGKSPALDDNAFDIFVWSDFALSRLFIDSAEGNPTNISRATRSTARLARILYEISTQGKTNIYQIYTEMAFEHQTDKEFAMGGRITRNYMMSPRRLKPALKKGVLSDIILGGGEKLLSPERRFDQTVYFTLGNKVHK

SEQ ID NO: 28143 - DNA, 834 bp, Unknown
  Obtained from environmental sample
  misc_feature (1)..(834): n is a, c, g, or t
atgaaaacaggcacaggtctctccgccttcgccgaaacttttccaaaccgtttttttgacgtaggcatcgcagaagaacacgccgttacttttgccgcggggctggcggcgaagggactgcgtcccgtagtagcggtttattccacatttttccagcgcgccgtagatcaggtaatacatgacgcggctcttcaaaaactgcccgttgtcttcgcgctggacagatcggggtttgtaagtatggacggcgaaacccaccagggactgtttgacataacgctttttcgcagcgcgccgaatatgactctcctctgcccggcgagcgataacgaaatgaggcttatgctggactacggaaaaaaccttgaagctggtcccgtaattattcgttatcctaaagcgttatgtcctcaggaaactgaagctttttcacagccgctggaaaaagggcgtggaacatgggtctcaaagagcgggaaaaatcaagtttgccttgccttaacaggaagtctttacagtgaagctgtttcagcggcaaatatattgaaagaacagggaattgaaacagacttgtataatttgcggtttttaagaccgattgacgaagactatttaacggacattatgaacaagtataaacttgttacgtttatcgaagaaggaatgaaggatggcggttttggcgagtatgcggccgcccttgcgcgcgaacgtgtctgtaccgcanaaacggcggttattgccgcagaaagcgtctttttggaagaagacctgtcttttggcagccgcggagaactgctttgccattacaggcttaatggccaaaggaaatag

SEQ ID NO: 28144 - protein, 277 aa, Unknown
  Obtained from environmental sample
  DOMAIN (152)...(267): Transketolase, C-terminal domain
  misc_feature (1)..(277): Xaa is any amino acid
MKTGTGLSAFAETFPNRFFDVGIAEEHAVTFAAGLAAKGLRPVVAVYSTFFQRAVDQVIHDAALQKLPVVFALDRSGFVSMDGETHQGLFDITLFRSAPNMTLLCPASDNEMRLMLDYGKNLEAGPVIIRYPKALCPQETEAFSQPLEKGRGTWVSKSGKNQVCLALTGSLYSEAVSAANILKEQGIETDLYNLRFLRPIDEDYLTDIMNKYKLVTFIEEGMKDGGFGEYAAALARERVCTAXTAVIAAESVFLEEDLSFGSRGELLCHYRLNGQRK

SEQ ID NO: 28145 - DNA, 825 bp, Unknown
  Obtained from environmental sample
  misc_feature (1)..(825): n is a, c, g, or t
atgacttggtttcaatggcttatttcaatatatgagcatatccgccccgtactggatatagtgcttctggcctttattctgtataaaggctacgaacttctggaaaaaacccaggctcttcctttggttaaggggacgggttttctctttcttgtctacgccatagcatggcttttaaaccttacaaccttacgttgggtacttacaataatagcccccggactttttatagccatcgcgatcgtattccagcccgagcttagaaaaatagtattgcgcctcgggcagactgaattcttcaaacccaacgccatcgcgaatatcggaaaacttgacgcggttgtaaccgcggcggaactgttatccgaaaaacgcaggggaatgttggttgtctttccgcggaaaatcaatttaaaaaatattatagatacgggaacaaggattaacgctgaaatttcatcaagtttaattgtggctatttttgaatttgacggacctctgcacgacggagcgattgttattcagggcggaagaattatttccgcagggtgttttttgccgctttccgaaagaatggacatacgaaaaaatttcggcacacgccacagggcgagtctcggcatggcggaacaatcggatgctgttgtacttattgtttccgaagaaacgggcgcaatctcccttgcttacgattcaaagctttattacgatttatcttcggcggaagttacgcgcaaattgatggaactgctggacaggggaagcagaaaagaagcggaacaaactgaaggttccaaagaggaacgggaggtcattgttgaatag

SEQ ID NO: 28146 - protein, 274 aa, Unknown
  Obtained from environmental sample
  DOMAIN (114)...(235): Domain of unknown function DUF147
  misc_feature (1)..(274): Xaa is any amino acid
MTWFQWLISIYEHIRPVLDIVLLAFILYKGYELLEKTQALPLVKGTGFLFLVYAIAWLLNLTTLRWVLTIIAPGLFIAIAIVFQPELRKIVLRLGQTEFFKPNAIANIGKLDAVVTAAELLSEKRRGMLVVFPRKINLKNIIDTGTRINAEISSSLIVAIFEFDGPLHDGAIVIQGGRIISAGCFLPLSERMDIRKNFGTRHRASLGMAEQSDAVVLIVSEETGAISLAYDSKLYYDLSSAEVTRKLMELLDRGSRKEAEQTEGSKEEREVIVE

SEQ ID NO: 28147 - DNA, 489 bp, Unknown
  Obtained from environmental sample
  misc_feature (1)..(489): n is a, c, g, or t
atggcgagaaagggcaaaaccgcccaaatcatcaatgaaaatgcagacggggacanccgcagnncggaagaaacgcctacggatattaacggcctttttaagggacggtgtattatgctggtagaagatgtggaaatcaaccgtgaaattgtacttgccctgcttgaaccgacacagttggaaattgactgcgctgaaaacggtgtggaagccgtgcgtatgttcagtgaaaaccaggacaagtacgagttaatttttatggatgtgcagatgcccgaaatggacggctacgaggcgacgcggcgtatccgtttgctgaatcctaagggtaaaaccgtcccgatcgtagccatgaccgctaacgcgttccgtgaaaatgtggtagaatgccttgccgccggcatggacgatcatatcgggaaaccgattgattctgaaaaaatcatagaaaagctgtgtgtttatttgtttaagaaacagagaaagtaa

SEQ ID NO: 28148 - protein, 162 aa, Unknown
  Obtained from environmental sample
  DOMAIN (38)...(153): Response regulator receiver domain
  misc_feature (1)..(162): Xaa is any amino acid
MARKGKTAQIINENADGDXRXXEETPTDINGLFKGRCIMLVEDVEINREIVLALLEPTQLEIDCAENGVEAVRMFSENQDKYELIFMDVQMPEMDGYEATRRIRLLNPKGKTVPIVAMTANAFRENVVECLAAGMDDHIGKPIDSEKIIEKLCVYLFKKQRK

SEQ ID NO: 28149 - DNA, 435 bp, Unknown
  Obtained from environmental sample
  misc_feature (1)..(435): n is a, c, g, or t
gtgcaagccaaaacgctaatcaaggagggaattaagatgagcaagttttattccatgaaaaaaatacgcgctcaaaataatactaacattggacgtgtagacatttatggggaaataagcgcggtagaattttggggagatgaaaaaacaccttcccaattcattgaagatttgaataacttagggcctgtaagcgaaatagaaattcacatattcagcaacggcggcgatcctttcgcggcattggccatgtattcggaaataaaacggcggaccgaaaatgtgaatgtttatattgacggtatcgcggcttccgcagcgacgcttattttatgcgccggtgatacggtttacatggacgagacatcaatgctcatggtgcataatccataccaactgttaatgtttgccggtctaacgctcgtgccgatctga

SEQ ID NO: 28150 - protein, 144 aa, Unknown
  Obtained from environmental sample
  DOMAIN (29)...(142): Clp protease
  misc_feature (1)..(144): Xaa is any amino acid
MQAKTLIKEGIKMSKFYSMKKIRAQNNTNIGRVDIYGEISAVEFWGDEKTPSQFIEDLNNLGPVSEIEIHIFSNGGDPFAALAMYSEIKRRTENVNVYIDGIAASAATLILCAGDTVYMDETSMLMVHNPYQLLMFAGLTLVPI

SEQ ID NO: 28151 - DNA, 519 bp, Unknown
  Obtained from environmental sample
  misc_feature (1)..(519): n is a, c, g, or t
atgggaccgcctaccgggatgccgtatgaaatgctggtacaaaagtttcaggcttcttacagtgccagcatgggcgcgatgaatatggcaaggggagatttacgcgttaagcgttcagggataattgttgatttttgcgatcctgtatttgttgcgatgatggatgaggctgtagcgcggggatggttagacgctccggggtattttgataatccattatcacgcagggcatatacaagggttaaatggaacggcccaggattgccgcaactggatttttacaaagaagtccaggcatgggaaaaggccgtttctttagggttcgcgaccgcaagccaggcgacatcagaattgaacggcggggactacatggaaaaccttagcgttcgcgcccgggaaatagaagcggcgaaaactgccggtttatccgctgcggcggcggctggaatgacaagcacggctggagcgatacagtcggtagagggtgcaagccaaaacgctaatcaaggagggaattaa

SEQ ID NO: 28152 - protein, 172 aa, Unknown
  Obtained from environmental sample
  misc_feature (1)..(172): Xaa is any amino acid
MGPPTGMPYEMLVQKFQASYSASMGAMNMARGDLRVKRSGIIVDFCDPVFVAMMDEAVARGWLDAPGYFDNPLSRRAYTRVKWNGPGLPQLDFYKEVQAWEKAVSLGFATASQATSELNGGDYMENLSVRAREIEAAKTAGLSAAAAAGMTSTAGAIQSVEGASQNANQGGN

SEQ ID NO: 28153 - DNA, 1125 bp, Unknown
  Obtained from environmental sample
  misc_feature (1)..(1125): n is a, c, g, or t
atgaatgttattgaagtgcctaaaaacatagactttgcgatgaagatcaacatcggcaatcttctgttcgacaagctgaaaatcaccgacaccataggcgcgatattggtgaaagacggtaaagtgcagatgcagaatctcggcatgaagcttttggacggaagcatgaaccttacaggcgaatataatacgcaggacatcaaagttccttcaattgatttcggcgtaaacataaaacagttcgacgtaaagtcggcgatttcatcgtttgatatactccaaaaaatactgccccagccgcagaactacgacggaaaagtgtcggcaaacctgacattgaacagtattctggacgaacatatgagtccggttatgaacacggtggcttccaaaggccaactgcagacgcataatataaaaatacaaaattcagaacttttcgccaccttggcaaacctgttgaaaaacgagtcatggcgcacgcccactctgaacaatattaatattaaatacgagatcaaagacggacaagtgacgattgagccggtacatatgaacatcgcgcagaccgcgcttgaactttccggcagccagagccttgatatgtcattgaattacaaggtaaacgcgacagtgcccgcctcggcggtcggttcgggcgcgaccgatattttgagcaaaatacccggcggcgtanaaatcaacgaattcaaattgacaggattgataggcggcacggcagccaaacctgtcgtaactctcagtgtcgccgatatggcaagcagtgttgccggagcccgtaaagacgncgtaaaagaacaggtgaaaggagaggttgataaacagataaacgccatcatggccgaagccgaaaaacaggctcaaaccatccgcagcgccgccaagcaagccgccgacacaatacgcaatgaagccaacgccgccgctaatagattggtagcgcaggctaaatcgcctcttgaaaagaccgcggctaatttggcggccaaaaaactccgtgacgaaggtaatgataaagccaaaaaaacagagcaggaagctgaaagacaaataaagaacattatggacgccgcaaagaagaaagctgacgatttaaggaaataa

SEQ ID NO: 28154 - protein, 374 aa, Unknown
  Obtained from environmental sample
  misc_feature (1)..(374): Xaa is any amino acid
MNVIEVPKNIDFAMKINIGNLLFDKLKITDTIGAILVKDGKVQMQNLGMKLLDGSMNLTGEYNTQDIKVPSIDFGVNIKQFDVKSAISSFDILQKILPQPQNYDGKVSANLTLNSILDEHMSPVMNTVASKGQLQTHNIKIQNSELFATLANLLKNESWRTPTLNNINIKYEIKDGQVTIEPVHMNIAQTALELSGSQSLDMSLNYKVNATVPASAVGSGATDILSKIPGGVXINEFKLTGLIGGTAAKPVVTLSVADMASSVAGARKDXVKEQVKGEVDKQINAIMAEAEKQAQTIRSAAKQAADTIRNEANAAANRLVAQAKSPLEKTAANLAAKKLRDEGNDKAKKTEQEAERQIKNIMDAAKKKADDLRK

SEQ ID NO: 28155 - DNA, 1230 bp, Unknown
  Obtained from environmental sample
  misc_feature (1)..(1230): n is a, c, g, or t
atgggtacgacggttttattcaagcctactgcggtgcagagaaaagcccttgcgttgttaaagggcggggctaaacacattttgctgtttggcggctctcgttctggaaaaactacagtgctggttatggcgattatctacagggcgttaaagtttgccgggtccagacatttgatttgccgttacagggctaaagacgctcgttcatccgtactgcgggaaacgcttatgccgtggcttgataatactgtcgggaaaagcgggtacacctaccttgcccatgaaagcatgattaccctttttaattcttcggagatttggattggcggcctgggggatagggagcaagcggacaaaatactcggacacgaatacaacacaatttattttaacgagattagccagctttcctatgccgccgtaaccacggcatattcacggctggcaatgagaataaaagattgccggaacctgttttactacgactgcaatccaggttcgccgcttcattgggcttacaagattttcgttttgaaacggacatttcttactggcgaaccgcttgagaaaccagagctatatcaagcaatgctccttaatccagaggataacagagacaacctgccggaggattatatttctgacattctcgacacgcttcctgaaaagcaaaaggcaaggtttagggatgggctttgggtaaaggccgagggcgttatctatgacaagtttggcgagaccatgattgtcaacgcttctgacttgcctgaacgctttgaccgatacgccgccgggcaagatttcgggcttaatatcacgtttgttttgattgcctggcttggcgatgtgatttacgtcctgggcgattacggcgcatacaacatgactacccaaagttttaacgaagaagtaaccgcaaggggcttgatggattgccctgacgggatggggcttcctgtttactgcgacccagccggaggggagaggatacaggaaataaccgggggcgttaaagcaaataacagcgtcgatagcggcatagattatataaacgcaaaaatagaacggcatcaatttttcgtttctgaaaagtgtaccggggtgctttcggagatttgggattactgtcgagatgaagctgggcagattgtaaaggtcaacgaccattttcttgacgctctgcggtatgcggtgttctcggatgttcagcagggggtaatactctcgtga

SEQ ID NO: 28156 - protein, 409 aa, Unknown
  Obtained from environmental sample
  DOMAIN (28)...(401): Terminase-like family
  misc_feature (1)..(409): Xaa is any amino acid
MGTTVLFKPTAVQRKALALLKGGAKHILLFGGSRSGKTTVLVMAIIYRALKFAGSRHLICRYRAKDARSSVLRETLMPWLDNTVGKSGYTYLAHESMITLFNSSEIWIGGLGDREQADKILGHEYNTIYFNEISQLSYAAVTTAYSRLAMRIKDCRNLFYYDCNPGSPLHWAYKIFVLKRTFLTGEPLEKPELYQAMLLNPEDNRDNLPEDYISDILDTLPEKQKARFRDGLWVKAEGVIYDKFGETMIVNASDLPERFDRYAAGQDFGLNITFVLIAWLGDVIYVLGDYGAYNMTTQSFNEEVTARGLMDCPDGMGLPVYCDPAGGERIQEITGGVKANNSVDSGIDYINAKIERHQFFVSEKCTGVLSEIWDYCRDEAGQIVKVNDHFLDALRYAVFSDVQQGVILS

SEQ ID NO: 28157 - DNA, 903 bp, Unknown
  Obtained from environmental sample
  misc_feature (1)..(903): n is a, c, g, or t
atgtgttatgccgagggcgcggcaagagcccctcgccctcacactcttcctcctccttcttctcttttgtttgatggctcctccgtccttacttccacaaaggatactgagagggcttgggaatgggacagtattaaaagcacctactttacccacagcctcataacaggcttaaggggagcagcggatgtcaatggcgattctaatgtgagttttaaggagctttccgacttcgttaaaaaggaacttgagataatgaccatcaatccaaaatatacccaagttccccaatccaaatctaaaatcccaggatccgaagagacggtactcacaaatatcaggcgacccagcagagccaagttcattattgacggtgatgtaacaggaaggattcgcattttagataattcccgtaaaattattgtatcggagttgaccaaggaacatcaaagacctatggaactgactcttgattctggcgattaccagtttatacttttcagggagaaatcattcggctgggctaaacggcagcttcggagaaatcaaaacatacgactgcaaatgaaagactttgttaatgccggcagcatcaacgcgttgcgaaacaaaatcgcgggtaggggatcggaagctcccgaattctttttttctgaatcaccgtccgagtattcatcaagtcctgatactgcggcttctttgcagcccgtgtcaattgataaggctcttgaagatgccgccaacggaatttcgggacatatttcttcgacgaacaatacagttacgattcgtatattgtcagaattgtcaaaacatcccgcgttatcaaaaataatagaggataagcttactacaaaaatgaaaaataaaaaatcgttcgagatagtcctcgtgccgatctga

SEQ ID NO: 28158 - protein, 300 aa, Unknown
  Obtained from environmental sample
  misc_feature (1)..(300): Xaa is any amino acid
MCYAEGAARAPRPHTLPPPSSLLFDGSSVLTSTKDTERAWEWDSIKSTYFTHSLITGLRGAADVNGDSNVSFKELSDFVKKELEIMTINPKYTQVPQSKSKIPGSEETVLTNIRRPSRAKFIIDGDVTGRIRILDNSRKIIVSELTKEHQRPMELTLDSGDYQFILFREKSFGWAKRQLRRNQNIRLQMKDFVNAGSINALRNKIAGRGSEAPEFFFSESPSEYSSSPDTAASLQPVSIDKALEDAANGISGHISSTNNTVTIRILSELSKHPALSKIIEDKLTTKMKNKKSFEIVLVPI

SEQ ID NO: 28159 - DNA, 936 bp, Unknown
  Obtained from environmental sample
  misc_feature (1)..(936): n is a, c, g, or t
gtggaagttttagaccctactaccacaagcggcttaaaaccgttaaatgccgtctctacgtcgcgcgacgcgataatttcgatggaaggtatagatattacccgttcctcaaacattattgacgatttaattcccggcgttacattgaatgtaaggggcgtatccgacaaacccgttgagttaaaaattacgcctaatgtggaagctgtaaaagagtctattatcaattttgtcggaaattataaccggcttatggcggaaataaacgtactgactgcaagaagcgtgtattcaggatcagggtacaatacaagcatagacgatacaatcataaacgaactgacatatttaacggctgaggaaaaagccgaaatgaaaaccagactgggagcctttaacggagacgttaccttaaacaatttaagaaaccaccttatgcggacagttacagcgccctaccctaccagcatggaaagggaccttactcttttagcgcaaataggcgtcagttctaacgcctcaagaacgtcgggatacaatccgtcgcagttaagaggttatcttgaaatcgacgaaaaagcgcttgacgccgctttagaaacaaaaatacccgctattaaagaactgtttgccagcgatacttcaggcgatttaatcgccgatacgggagtcgcgtacaatgtggacaccattgtaaaaccttttgttgaaacaggcggtattatttccctaaaaaccggcactattgactcccgcatttctcaggacgaaaaacgcattgtcaatcttgaccgccagttagccgcccaagaaacagacttaaaaatgcaatacgcaaaaatgaaatccgcctattcgcgaatggaacaaatgtcccattcactcaatattttagtcagcaaaatcggggccgtaagtaatggtaatccaaaataa

SEQ ID NO: 28160 - protein, 311 aa, Unknown
  Obtained from environmental sample
  DOMAIN (21)...(290): Flagellar hook-associated protein 2 C-terminus
  misc_feature (1)..(311): Xaa is any amino acid
MEVLDPTTTSGLKPLNAVSTSRDAIISMEGIDITRSSNIIDDLIPGVTLNVRGVSDKPVELKITPNVEAVKESIINFVGNYNRLMAEINVLTARSVYSGSGYNTSIDDTIINELTYLTAEEKAEMKTRLGAFNGDVTLNNLRNHLMRTVTAPYPTSMERDLTLLAQIGVSSNASRTSGYNPSQLRGYLEIDEKALDAALETKIPAIKELFASDTSGDLIADTGVAYNVDTIVKPFVETGGIISLKTGTIDSRISQDEKRIVNLDRQLAAQETDLKMQYAKMKSAYSRMEQMSHSLNILVSKIGAVSNGNPK

SEQ ID NO: 28161 - DNA, 615 bp, Unknown
  Obtained from environmental sample
  misc_feature (1)..(615): n is a, c, g, or t
ttgttatctaaagtagaggataaatttgaagaagaagctcaaaccgacggcgaaggaatggccggagacgagtggaattcacaagccggatacagtcagcttgaattcaagcttctttacgattcaatttttcccgttttgttcagggtagcctacagaattgccaacagcaaggaagcggctgaagatctttgtcaggacagtttttttcgtttatacgaaaaaaacattgtttttccaaacccggaagaggcaaaatactggcttatccgcgttgtaaaaaacgcttcgctgaactacgcgaaaaggaaagaacgcgaacgaaaagcgtaccaaaaggcgtttcgggaagaagttaaacgggaggaatccggtgagagcgcgcttgtccgaaaggaaacaagccatgaggtagaaacagctcttggaaaattaccggagaatttacgtatagtgctaattttaaaagaatatgcagaaatgaactacaaagaaatcggcagagtgcttggcattagcgaaggaaacgttaaggtcagggtgttcagagccagagagaggcttgccgcgctcttagacgggcttaagtccgaaggtggtaattatgtgtcctga

SEQ ID NO: 28162 - protein, 204 aa, Unknown
  Obtained from environmental sample
  DOMAIN (39)...(107): Sigma-70 region 2
  misc_feature (1)..(204): Xaa is any amino acid
MLSKVEDKFEEEAQTDGEGMAGDEWNSQAGYSQLEFKLLYDSIFPVLFRVAYRIANSKEAAEDLCQDSFFRLYEKNIVFPNPEEAKYWLIRVVKNASLNYAKRKERERKAYQKAFREEVKREESGESALVRKETSHEVETALGKLPENLRIVLILKEYAEMNYKEIGRVLGISEGNVKVRVFRARERLAALLDGLKSEGGNYVS

SEQ ID NO: 28163 - DNA, 423 bp, Unknown
  Obtained from environmental sample
  misc_feature (1)..(423): n is a, c, g, or t
ttggcggcaaaattcgatgtaaacatcgtcggcgcaaacgccgttggcgaaaactcaagcggagagcaaacatcaaagtatatagaagaatttaataaagccattgaggacgacctgaacaccccccgcgcgcttgcggaattatgggggctgttgaaagaggggcaggcggaaccggaaacgcttgcggctgtttttgatatggacagggttttggggcttgggcttaaagacgcctgtgaagcaaaggctcaagacaatgaaaacgccgccgaaattgaggaattaatcgaaaaaagggcgcaggcaaaaaaagccaaagattttgccgccgcggacggcataagacaaagtttgaaggatcgcggtataatactggaagacggaccggccggaaccacatggcgtaaaagcggcctgtaa

SEQ ID NO: 28164 - protein, 140 aa, Unknown
  Obtained from environmental sample
  misc_feature (1)..(140): Xaa is any amino acid
MAAKFDVNIVGANAVGENSSGEQTSKYIEEFNKAIEDDLNTPRALAELWGLLKEGQAEPETLAAVFDMDRVLGLGLKDACEAKAQDNENAAEIEELIEKRAQAKKAKDFAAADGIRQSLKDRGIILEDGPAGTTWRKSGL

SEQ ID NO: 28165 - DNA, 723 bp, Unknown
  Obtained from environmental sample
  misc_feature (1)..(723): n is a, c, g, or t
gtggggaaaaagctcaaagagcgggggaaaaattttggggtgcgtttggattcgggggatattcaatatctttctaccgaggtaaggaagatgctggataatgcagggcttaatgaggcgaccattaccgcatccaatgatctggatgaatcgattattgagaatctggtgaattccggcgttccggttaatatttggggcgtgggaacacagatggttaccgggggcaatgactccgcctttaccggcgtgtacaagatgacggcctgtgaggatacgaacgggcagatggcgccggtgatgaaattatccgacaatccggaaaagactaccaaccccggccccaagcaggtgtggcggataaaagacagtcaaggcgccgctcttgccgatgtgcttgccctggacagcgccgccgatgccgaaataattgaatcaggatacagataccgtttctggcatccttcggcggactaccgtcatttttaccatattactgaatgggcaccgcagccgcttctgaaaaaacacatcgcggacggtaaaccatgcggcccacagccctcgctggatgcaattcgcgcttattccgccgctgatcttgaaacttttgattccacctacaaacgtttgcttaaccctcatgtgtataaggtgtctattaccgaaaaactccgcgatctcaaactggacttgataaaaaaccatttgggtgatttgtag

SEQ ID NO: 28166 - protein, 240 aa, Unknown
  Obtained from environmental sample
  misc_feature (1)..(240): Xaa is any amino acid
MGKKLKERGKNFGVRLDSGDIQYLSTEVRKMLDNAGLNEATITASNDLDESIIENLVNSGVPVNIWGVGTQMVTGGNDSAFTGVYKMTACEDTNGQMAPVMKLSDNPEKTTNPGPKQVWRIKDSQGAALADVLALDSAADAEIIESGYRYRFWHPSADYRHFYHITEWAPQPLLKKHIADGKPCGPQPSLDAIRAYSAADLETFDSTYKRLLNPHVYKVSITEKLRDLKLDLIKNHLGDL

SEQ ID NO: 28167 - DNA, 306 bp, Unknown
  Obtained from environmental sample
  misc_feature (1)..(306): n is a, c, g, or t
atgaaagaattttccaataccggtttttgcccggagacggcattgggtcccgaagttatgaaagagggcgttaaggttttagaagctgcaggcaaaaaattcggtttttctttgaaattggaatatgctccggttggtggtgcggcttatgatttgcaggggcatccactgccagaaagcacaattaaaattgcagaggcggcgcaagccatattgtttggctcggttggcggaccacaatgggaaaaactgccgccggaactccaacccgagagaggcgcgcttttgccgcttcgcaagcattaa

SEQ ID NO: 28168 - protein, 101 aa, Unknown
  Obtained from environmental sample
  misc_feature (1)..(101): Xaa is any amino acid
MKEFSNTGFCPETALGPEVMKEGVKVLEAAGKKFGFSLKLEYAPVGGAAYDLQGHPLPESTIKIAEAAQAILFGSVGGPQWEKLPPELQPERGALLPLRKH

SEQ ID NO: 28169 - DNA, 657 bp, Unknown
  Obtained from environmental sample
  misc_feature (1)..(657): n is a, c, g, or t
gtgtataacgtcataaaacgccataatctggacaaaaagtgggtggaactgaccgaggaagcgaagaaaggctttgagcaacccacggcggttcacgagcaatggcacatagacttttcgtacatcaagatacaaaactcgttttattattttatcggtatccttgacggctacagccggagattacttaactggaggctctgcaaaaacatggagggcattaatgctgaaatactggtcgccgaaaccaaagagctgtaccctgaagcggacagaccgcggctgataagcgacaacggcagccagttcatatcaaaagattttgaagagctgcttgcgctcttggaattatcccacacgtttacatacgcgaaccacccgcagagcaacggtaagctgcaacggttccatcgcaccttgaaaactgaacacgtaaggagggcatcgtatttagaatatcaagacgcctgcataaggctggcagaatggatcgtgtattacaatagtgagaggctccacagcgcgatctggtatctaacgcctaatgacattttttacggtcgggcggcgggacggcttgcagagcgcaaagaaaaattgcatactgcatttatcaagagacaggaatactggcagacacgaaccgccgtttcctga

SEQ ID NO: 28170 - protein, 218 aa, Unknown
  Obtained from environmental sample
  DOMAIN (27)...(186): Integrase core domain
  misc_feature (1)..(218): Xaa is any amino acid
MYNVIKRHNLDKKWVELTEEAKKGFEQPTAVHEQWHIDFSYIKIQNSFYYFIGILDGYSRRLLNWRLCKNMEGINAEILVAETKELYPEADRPRLISDNGSQFISKDFEELLALLELSHTFTYANHPQSNGKLQRFHRTLKTEHVRRASYLEYQDACIRLAEWIVYYNSERLHSAIWYLTPNDIFYGRAAGRLAERKEKLHTAFIKRQEYWQTRTAVS

SEQ ID NO: 28171 - DNA, 534 bp, Unknown
  Obtained from environmental sample
  misc_feature (1)..(534): n is a, c, g, or t
atgggaaatgtgccgtgttttcttggagagttcggccttgcttttgatttaaacaaccgcggcggttttaagaagggcgattattcattgcatgaagaagcgctttccatgtactatgacgcggtagacgcaaatctactccactctacaatctggaattattcggcaagcaactcaaataaatacggcgatagttggaacgacgaagacctttctattttttccgaaggtatagaacgggcggcggccggctggaaacgcccctaccccatggccaccgcaggcgagccgctttattttacatggaacagaaaacgtaagaaatttgtctaccgttttaacgcaaaccgagaaattaccgcgccaagcataatttatctgcctgcggaattcttgggcgctaagccaaaaattgaagcaataacttacgataaaaaaaacctgcggtgggattatatacatgaagaacagcgtctgcttgtttacaacgacggctattacggagaagtaatccttaaagtcgggttaaattga

SEQ ID NO: 28172 - protein, 177 aa, Unknown
  Obtained from environmental sample
  misc_feature (1)..(177): Xaa is any amino acid
MGNVPCFLGEFGLAFDLNNRGGFKKGDYSLHEEALSMYYDAVDANLLHSTIWNYSASNSNKYGDSWNDEDLSIFSEGIERAAAGWKRPYPMATAGEPLYFTWNRKRKKFVYRFNANREITAPSIIYLPAEFLGAKPKIEAITYDKKNLRWDYIHEEQRLLVYNDGYYGEVILKVGLN

SEQ ID NO: 28173 - DNA, 897 bp, Unknown
  Obtained from environmental sample
  misc_feature (1)..(897): n is a, c, g, or t
ttggcttacctgcgaaaaattctgcaagccgcggaacaagaaggcataaatgtctttatcgatcctcatcaggacgtgtggagcaggtggacgggcggggacggcgccccggcgtggacaatggaaaggcttgggtttgacttggatttgctcgaccgctgcggagcggcgattacaaaacaacgttacaccgtttaccacaataagccctacccaaagatggtttggccgggtaactacaaccgctatgccgccgcgaccatgttcagtttatttttcgccggaaatacttacgcgccggatttgcgcatagacggcgaaaatatacaggaatggctgcagggccgctacatcgccgccttcaaacacgtccggcggcgcttgaaaaactgcgctaacataacaggctggggttccatgaatgagcctcactttggctttatcgggcagaaagacctaaacgcggcggaagatcccatgataccggttggcctgcgccctactccgtggcttacaatccgcgccgcttccggctatcaggttgaagtgcccgtgtacagcatgatctcctttggcaaacgtatttcgcattatgaaacatttaacgccgaaaaaatatctcttttcaaagaagggttttcctgcccgtggaaacaggcgggagtttgggataacgaaggcggagagccgaaactgttaaaaagcaatcactttagccagtatcaaaaccgcaccgccgcctttacagatgattttttaaagcccttcatcataaaatacataaacgcgatgaaagaatcttatgagcaaaactttttctttatagagggtattccttttagcacaagagcggaatctcatcttcatggaataaagcagacccggacaaagcaataa

SEQ ID NO: 28174 - protein, 298 aa, Unknown
  Obtained from environmental sample
  misc_feature (1)..(298): Xaa is any amino acid
MAYLRKILQAAEQEGINVFIDPHQDVWSRWTGGDGAPAWTMERLGFDLDLLDRCGAAITKQRYTVYHNKPYPKMVWPGNYNRYAAATMFSLFFAGNTYAPDLRIDGENIQEWLQGRYIAAFKHVRRRLKNCANITGWGSMNEPHFGFIGQKDLNAAEDPMIPVGLRPTPWLTIRAASGYQVEVPVYSMISFGKRISHYETFNAEKISLFKEGFSCPWKQAGVWDNEGGEPKLLKSNHFSQYQNRTAAFTDDFLKPFIIKYINAMKESYEQNFFFIEGIPFSTRAESHLHGIKQTRTKQ

SEQ ID NO: 28175 - DNA, 393 bp, Unknown
  Obtained from environmental sample
  misc_feature (1)..(393): n is a, c, g, or t
ttggttcccatttcctttagtaccgaagcgaaagaagacgactgttttcttgagacccaaaaggtcgaactggcgagtctggcgattgtaattgaaagagacggaaacagttggcggatcgacgcgcttccggcaggctggcgtntgagtgacacgcaaaccgtgaaagaaatcatcggtttacgcgacgcaggtgaaaatatcaccgaacgctgggcagccaccctgagttgccatcaggcgatacgggacggcgatcatcttgatgacgcgtcggcgctggcgctggcaaaggaggcacttatgctgccgctgccgcgctgcccccatggccgcccaatctggactgaaatcaatcgtgaggcgctttacaaagctgtgcgacggagctaa

SEQ ID NO: 28176 - protein, 130 aa, Unknown
  Obtained from environmental sample
  misc_feature (1)..(130): Xaa is any amino acid
MVPISFSTEAKEDDCFLETQKVELASLAIVIERDGNSWRIDALPAGWRXSDTQTVKEIIGLRDAGENITERWAATLSCHQAIRDGDHLDDASALALAKEALMLPLPRCPHGRPIWTEINREALYKAVRRS

SEQ ID NO: 28177 - DNA, 771 bp, Unknown
  Obtained from environmental sample
  misc_feature (1)..(771): n is a, c, g, or t
gtggtaatcggcggcccggaacttcccngcgccgaccggcggatgttgtatgtatttgccaacggcaggcgtatacaggattatgcccttatgatggctttggaatacggaactcagggatggtttcccaacggcgttcatccgttgggagccgtgtatgttgacattgaccccgctctggcggattttaacattcatcccgccaagcgggaggctcgctttcgggaccccggcgctattcatcacgcgataacttccggcttgcgggacttttgccgccgcctcagcctgaaaaacggcatacagaaagaacaaaatatgccgctggcgctggaggcgttgggagatggtgtccctgacaagccgtttgagggggggactcagtctgcggctgaccggggcggcagtttttcatacggtaataacagcgccgctcatgcgccttatgcgcctaacgcgggtatggcatataaaatcagcgacatcgcttccgtagccgccgctttccatgccgccgaagaagcccccatttacggcgagccgcgctatgcgggaaaaattttcggtgtttttctgctggtcgaatggggcgacaaattatttatcattgatcaacacgccgcccatgaacgtattttgtataaccgtttctttcacaacccatcccaagccaggaatgcttggttcccatttcctttagtaccgaagcgaaagaagacgactgttttcttgagacccaaaaggtcgaactggcgagtctggcgattgtaa

SEQ ID NO: 28178 - protein, 256 aa, Unknown
  Obtained from environmental sample
  DOMAIN (1)...(93): DNA mismatch repair protein, C-terminal domain
  misc_feature (1)..(256): Xaa is any amino acid
MVIGGPELPXADRRMLYVFANGRRIQDYALMMALEYGTQGWFPNGVHPLGAVYVDIDPALADFNIHPAKREARFRDPGAIHHAITSGLRDFCRRLSLKNGIQKEQNMPLALEALGDGVPDKPFEGGTQSAADRGGSFSYGNNSAAHAPYAPNAGMAYKISDIASVAAAFHAAEEAPIYGEPRYAGKIFGVFLLVEWGDKLFIIDQHAAHERILYNRFFHNPSQARNAWFPFPLVPKRKKTTVFLRPKRSNWRVWRL

SEQ ID NO: 28179 - DNA, 1365 bp, Unknown
  Obtained from environmental sample
  misc_feature (1)..(1365): n is a, c, g, or t
atgcttgaggccggagaggtctcgttcgtcacagacttagttcgtacgagcgaccgcgcggggcgcttcttgtggcccaacacccccatgctcctaaataggtacgcgctcgtctcaaggctcgactaccgcgacataagcatgagcgaagtgatcgacgcgcgcgtcggcgtgctgtcaggcaccgtctacgaggagctgtttaagaggtggttccccgaacatcccaagaccaccatgtacggtaacacaaacgacctcttcagcgctctggaacgcgacgaagtggatattgtcatgtccagccaaaatcaggtgctggcggtgacaaactacatggagcggcccggatataagataaacgtgctcttcgactactcctccgaggccgccatcggattcaataaagaagagcgcgtcctttgctccattgtagacaaggcgcagggcctgatagacctcacccgcataaccgacctatggctgcacaagacctacgattaccgcgtgaagatagtggagtcgcgccagccgctgctgataagcatctccgtgctgctggtttgcgtcgtgggcctcatgttcgtcctgctcagaagaaggctagacgccggcaagcgcttggaggcgctcattgaggagcgcacggcgaaactccacagccagaacaatttgcttgaggccgtcaccaataactacaagggcataatctggagcatcgacaagaatgggatcgtcacgctgttcaacggctgcagcctcaaaaaactcggtatcgaccggtcgttgttcgtgggtcaaaacatggaacacacacggcagatagactatcgcgtaaacagagtattggacgtgcaaaggcagatatttctatgggacggcccgcacgagtggataaacgaggtggacggtaacacctacctctccaataccgtgcccttctacgacaccgacggtaaagtcttgggcattaccggcacaaccgacaacataacggaaatcgtaaggctgaacaaagaattggaaacggcgctcgaagcggcggaagccgccaaccgagccaagtccgccttcctcgccaacatgagccacgagataaggacgcctatgaacagcatcatcggcttctccgaactcgctctcgattgcgagatacccgaagaacctatgtcgtacttacacctaatcattgagaactcaaaagggctgctgcaaataatcaacgatatactcgacgtctccaaaatagaggccggcaagataacgattgagaaaatcgccttcgacatacacgatgtgttcgcgctctgccgctctgcgaccattcccaaggcaatggaaaaaggattgtcgcttcacttctaa

SEQ ID NO: 28180 - protein, 454 aa, Unknown
  Obtained from environmental sample
  DOMAIN (354)...(419): His Kinase A (phosphoacceptor) domain
  misc_feature (1)..(454): Xaa is any amino acid
MLEAGEVSFVTDLVRTSDRAGRFLWPNTPMLLNRYALVSRLDYRDISMSEVIDARVGVLSGTVYEELFKRWFPEHPKTTMYGNTNDLFSALERDEVDIVMSSQNQVLAVTNYMERPGYKINVLFDYSSEAAIGFNKEERVLCSIVDKAQGLIDLTRITDLWLHKTYDYRVKIVESRQPLLISISVLLVCVVGLMFVLLRRRLDAGKRLEALIEERTAKLHSQNNLLEAVTNNYKGIIWSIDKNGIVTLFNGCSLKKLGIDRSLFVGQNMEHTRQIDYRVNRVLDVQRQIFLWDGPHEWINEVDGNTYLSNTVPFYDTDGKVLGITGTTDNITEIVRLNKELETALEAAEAANRAKSAFLANMSHEIRTPMNSIIGFSELALDCEIPEEPMSYLHLIIENSKGLLQIINDILDVSKIEAGKITIEKIAFDIHDVFALCRSATIPKAMEKGLSLHF

SEQ ID NO: 28181 - DNA, 927 bp, Unknown
  Obtained from environmental sample
  misc_feature (1)..(927): n is a, c, g, or t
gtgtcactgcgtaactgcgccgccggaaattcattgcgcgtgagcggcaaaggagagattgccgtttttatttctcaggaaaatgcagaaagactgaaaaatttcgggcggggagcggcggtttttgctgaaggttcattgcgttccaacgagaaggggagttggtctttaagcgcaaagtcattgcatattgtaaaaccgccgccgccgatagagcggatgcgtacaaacatcagattaaatttgataaaacgttttgacggaaaaccgtggggcgggcttgcgcttgcgttgcttctgggaataaaggacaaccttgatacagagctggctgtaatgtacagaaactcagggctttcttatatactggctttgtcgggaatgcatcttgcgatactcgccgctcttataactttcctgttaaaaaaaccgctcggcttaaaagcgtccgctgtttgcggcgcagtcattattttactttattgttttctggtcggatcaatgccgagccttaatcgagccgcaatgatgtaccttcttggagtgctgacagtgcttggggctttgcctaaaaagccgctgtcgatattatcgctttcatttatcattcaaatttttgcaaccccgtcagcgggaaacagtatttcttttatcctttcatacttggcgcttctcggcattttgataatcggcaaagctctttactcattgttcgcaggcaaagcccccgacttcttattacagccgctcgccctttcctgcggcgctttcttgggcgacagccggagtttgcggctcctcattcggattccttgcgcccgtttgaaatcatacaggccttgtgatggttccgcttacaaccgtctttatgatcgggtcttatatatggcctcgtcttggattttatttcgctctccgccttcctaa

SEQ ID NO: 28182 - protein, 308 aa, Unknown
  Obtained from environmental sample
  DOMAIN (98)...(304): Competence protein
  misc_feature (1)..(308): Xaa is any amino acid
MSLRNCAAGNSLRVSGKGEIAVFISQENAERLKNFGRGAAVFAEGSLRSNEKGSWSLSAKSLHIVKPPPPIERMRTNIRLNLIKRFDGKPWGGLALALLLGIKDNLDTELAVMYRNSGLSYILALSGMHLAILAALITFLLKKPLGLKASAVCGAVIILLYCFLVGSMPSLNRAAMMYLLGVLTVLGALPKKPLSILSLSFIIQIFATPSAGNSISFILSYLALLGILIIGKALYSLFAGKAPDFLLQPLALSCGAFLGDSRSLRLLIRIPCARLKSYRPCDGSAYNRLYDRVLYMASSWILFRSPPS

SEQ ID NO: 28183 - DNA, 1164 bp, Unknown
  Obtained from environmental sample
  misc_feature (1)..(1164): n is a, c, g, or t
atggccttagcagaaagtaattttgaagagataaaaaatcgtgtatttaatgcttacaaaagcgaagaacctatactaaaaaaatatcgagaatatgcaaaaagactaaaaaatgatgtaaaatcaattaaagaatattctgtaaacgcggtctcttttgtttcttcagacggaggagataatcgactttattttaatccggcgataatagaattggttcgtgtcgtcgattcgcgcggaaatcaatgtgcgttagatgcaattgcatctaattctcaagcgaatgaattaaatgtccgtattcaagcaggagataacagtccgcttttagttaaaccattaaaacgattatgcagtgatttaaatactgatgttgtggggttgtcttatttacttagtggacttgggcaacaggggaaaagtacaggcgcaattagaatctatagagatattatggaatgggcagtactatatgatttaatgaaatacaaagaatggggctctgatacaattattatcagagaaggaatgctacgaaccaagtcatttaaacgtgaagtttttccaaaagttgataaactaataagagaagcttaccatgagcataagcaaaaaaaaatatcggtttcaatggtaggggtggcaaaacaaagtgcagtactcagccgtttatccatagctttggaattggaagaaacgttacataaaccatatccgtgttatgtaaatgtacctaaagatattgaaggagaatgttataactttgataggacatggcttgatacatttaataacagtgatccagatgaagatggcaaatatctttatcaagcaatgggtaaattatttttggttaaatttggaaatagaccttttgaccctgtttggccagttgatattgcagaatggcaagtatctgatgctgataaaacacttgggcagttgatgcatgatgctcaatacggatttccaatacctgattttccaatgtgtatacaaaaagcacatgattatgctaaaataaatgggatagaaattgatgttttacaagatattcttttggagggtataactcaaggtttatctcaaagtgagaaagagaaagttttaagaatgaagtatctgggtaagaatttaacaaatgtgaggtatcgaaatgcttaa

SEQ ID NO: 28184 - protein, 387 aa, Unknown
  Obtained from environmental sample
  misc_feature (1)..(387): Xaa is any amino acid
MALAESNFEEIKNRVFNAYKSEEPILKKYREYAKRLKNDVKSIKEYSVNAVSFVSSDGGDNRLYFNPAIIELVRVVDSRGNQCALDAIASNSQANELNVRIQAGDNSPLLVKPLKRLCSDLNTDVVGLSYLLSGLGQQGKSTGAIRIYRDIMEWAVLYDLMKYKEWGSDTIIIREGMLRTKSFKREVFPKVDKLIREAYHEHKQKKISVSMVGVAKQSAVLSRLSIALELEETLHKPYPCYVNVPKDIEGECYNFDRTWLDTFNNSDPDEDGKYLYQAMGKLFLVKFGNRPFDPVWPVDIAEWQVSDADKTLGQLMHDAQYGFPIPDFPMCIQKAHDYAKINGIEIDVLQDILLEGITQGLSQSEKEKVLRMKYLGKNLTNVRYRNA

SEQ ID NO: 28185 - DNA, 1560 bp, Unknown
  Obtained from environmental sample
  misc_feature (1)..(1560): n is a, c, g, or t
atgctgcccctaatcccgcttcaggacagaatcgggcagatagagcttatgacaacctatcttcgcaagcattttggcaagcgtccgcttggctgctggatacccggcatgacatgggaacaacatctggcggccgcccttgccgcaagcgatatgaagtatacttttctatcgcaggatcaatttgttcaagcggggctttcagggacagacctttatttcccgtgtatcagcgaggatcaggggaaattgattgccgtttttcctgtttcaatgtccgcgcaagcgatattgtcgcaaaaaagttcatcccaggtttttattgagataaaaaacgcgataaaagaagaaaataaactttcggcggacagtataattaccgttttccccgaagaacctttttctgatccgcaggaagcgaaggaaaccgcatggaaccgcttttttgaagagatttctctttccaaagattttgtagaaaccgtactgccgacaaaagtaataacaacaaataaaatttttaaaaaggcaagttttccgaattcatcgtcattggaaaataatttttctccgcgccgttttcttatagagcattgcgaggcgaacggcatatactcaaaaatgatttttaccggcgttcttatcaatcagttaaagggagacaaatacaggaaacaaaacgcaagggaagaactttggaaagctcaggactcctgcttgtttactcctggaaacggatttctgcgccacgagcttcgtaaagcggcgtacagctctcttttgcgcgccgaagggctgtccagggaaaagggaaggtttgtttcatcgcttgttcagcatgattttgatcttgacggcgttaaagaatatttatttcaagacgcgaggataaactgctacattcagttaaaaggcgcgagtgtttttgagcttgattatctgcccaaagactggaactaccttgactgcggttccacaaattccgcaaaagacaggcgcacagcttttgcggacgcgcttatacccgcgtcttcgcaggccgattttcaaattagttttccgccaggttcccgtttgtgttttaacgaacaatatgaggaaatctctcaggatcgcaaaggaaaatcatgctttaaactgcccgtcgcaggcgctgacaccccgtacagcggcattgtaattgaaaaatgttatctgctaaaaaaagacgttctttccgtaaattatgaattaaaaaatacaagtgacaagtcggaagactttgtctttgttaccgtaattaatttttcatttgcaggtaacggcgaagagtttgtccgttttcatgtgattgacaggaacggaaaagagattcccgccgaaaacattttaaccggtgttgatacccttaaaatacttgacgtaacaaatgaggtgcagcttttacttggctccgctaagccgtttaacgcgtgtctgcttccggctcttgatgatggtctttatcaggcgaatcgtgttattacgcaatttgcggtttctttgaaaagcggggagagttgggggaatgagtttagttga

SEQ ID NO: 28186 - protein, 519 aa, Unknown
  Obtained from environmental sample
  misc_feature (1)..(519): Xaa is any amino acid
MLPLIPLQDRIGQIELMTTYLRKHFGKRPLGCWIPGMTWEQHLAAALAASDMKYTFLSQDQFVQAGLSGTDLYFPCISEDQGKLIAVFPVSMSAQAILSQKSSSQVFIEIKNAIKEENKLSADSIITVFPEEPFSDPQEAKETAWNRFFEEISLSKDFVETVLPTKVITTNKIFKKASFPNSSSLENNFSPRRFLIEHCEANGIYSKMIFTGVLINQLKGDKYRKQNAREELWKAQDSCLFTPGNGFLRHELRKAAYSSLLRAEGLSREKGRFVSSLVQHDFDLDGVKEYLFQDARINCYIQLKGASVFELDYLPKDWNYLDCGSTNSAKDRRTAFADALIPASSQADFQISFPPGSRLCFNEQYEEISQDRKGKSCFKLPVAGADTPYSGIVIEKCYLLKKDVLSVNYELKNTSDKSEDFVFVTVINFSFAGNGEEFVRFHVIDRNGKEIPAENILTGVDTLKILDVTNEVQLLLGSAKPFNACLLPALDDGLYQANRVITQFAVSLKSGESWGNEFS

SEQ ID NO: 28187 - DNA, 381 bp, Unknown
  Obtained from environmental sample
  misc_feature (1)..(381): n is a, c, g, or t
gtgcttcaaaacacgggcaaaatgctaatgcagagtgaaaatattaattcccagattgaagccttgatcaaaacacatcgaaatgataaaattgcggtttggggggcaagccatcaggcgttttttgtgctttcccagataaaaagtgttaaggcttttgagtttattattgactccgccgaaatgaagcagggtaaatattctccggtgtctcatttgccagttgtttctccggcggtagttgattttagttctttagcgtttattttggtaactgccggaagttattccgacgaagtatgcaggcaacttaaagaaaaattttgttttaccggaaagatatatgttttaaggccgtccggcgtagaaataagcgggtag

SEQ ID NO: 28188 - protein, 126 aa, Unknown
  Obtained from environmental sample
  misc_feature (1)..(126): Xaa is any amino acid
MLQNTGKMLMQSENINSQIEALIKTHRNDKIAVWGASHQAFFVLSQIKSVKAFEFIIDSAEMKQGKYSPVSHLPVVSPAVVDFSSLAFILVTAGSYSDEVCRQLKEKFCFTGKIYVLRPSGVEISG

SEQ ID NO: 28189 - DNA, 1425 bp, Unknown
  Obtained from environmental sample
  misc_feature (1)..(1425): n is a, c, g, or t
atgatgccaattattacaaaaccgccnctttccaacgaaggcgatatagcccaaagagtgcacagcattctgcagaagtaccttaccgcgaaagacccgaaagaccgcagcgttttccgccagcagttcattacgccgttttgggaattcctcttaaacgtggcgcggaaagcttcgggaaacatagcgcccccaaagaagtatcttcttcgttacggaattttgcaccccacatttatcaacgccgagacaagggattttttcagcaagatagtattagataacacccttaaccagccggtttactatttggatgaatggttaaagtccctggggacgggcgcgataactccttccactacggatgaagtaagagtatccgcaaaaaacacgcctacaaagttaatgcaattactggacaaggcgacgggaaaacttgacggcgcaagaaccctgttaagatccagggacaaggaaaggctggaaatagaaggcatcctgcgccaaaggatggaatcaatttttgaacattaccctatgcatgagtacggagaagtcaacgagtgcttaaacgaaagacaaaaagccgccatcaacgaaatacagaacctgctgaaggatctgatgaaaaacgatcataacatggaaatgtgcgttaaagactacataagcgcggaagcggatgttcagtcattaaaggataaaattgaggcggaaggcggcggggctgtttccgttgatatcggggcaatagacgcggaatttgaaactgtccgtcaaatggcgaaaatgacatgcggacggcagggcaaccatttcccggttcttacaagcgaatattttcattgcgggccgaatgatgttggtattcgggaaaatgtaatttctatcctcgctaaaattgaaagcatagacgccgaagcctactgccgtgtgtataaaaaccagttaaaccgcatagtgccttatgttgttttaataccgacttacggtgatttcggtttttgctgggaaccttttgatcgtcacaaccgtgccacaagccggggacgtgttgttattcctatgtatcccaaaaatttatttttggcgatacttaccgctatagccgatcttcgctggcaggtagcgaaagaaaaagcgtctttttactggatggaagaagggcttacaggccattattaccagtggtttcaggctcaaaagttaaaaggcgatataaaggaatactttatcaaagattatattatctggatgaccaaagaatcggaaggaatacaaaaattggataaagacgttcgcggaacattctggcgttatatgccatttacaaaagaagtaaaagaaaaattaaaaaccagaagttttgtttatcaggaactttaccagcgcgatgtcaaccgtaccatgtcggacggatattga

SEQ ID NO: 28190 - protein, 474 aa, Unknown
  Obtained from environmental sample
  misc_feature (1)..(474): Xaa is any amino acid
MMPIITKPPLSNEGDIAQRVHSILQKYLTAKDPKDRSVFRQQFITPFWEFLLNVARKASGNIAPPKKYLLRYGILHPTFINAETRDFFSKIVLDNTLNQPVYYLDEWLKSLGTGAITPSTTDEVRVSAKNTPTKLMQLLDKATGKLDGARTLLRSRDKERLEIEGILRQRMESIFEHYPMHEYGEVNECLNERQKAAINEIQNLLKDLMKNDHNMEMCVKDYISAEADVQSLKDKIEAEGGGAVSVDIGAIDAEFETVRQMAKMTCGRQGNHFPVLTSEYFHCGPNDVGIRENVISILAKIESIDAEAYCRVYKNQLNRIVPYVVLIPTYGDFGFCWEPFDRHNRATSRGRVVIPMYPKNLFLAILTAIADLRWQVAKEKASFYWMEEGLTGHYYQWFQAQKLKGDIKEYFIKDYIIWMTKESEGIQKLDKDVRGTFWRYMPFTKEVKEKLKTRSFVYQELYQRDVNRTMSDGY

SEQ ID NO: 28191 - DNA, 420 bp, Unknown
  Obtained from environmental sample
  misc_feature (1)..(420): n is a, c, g, or t
ttgcggaaagagagcgctgacgtgtatatcgtgccgctgcaaagcatccccaaccagcagcttgcgctgcgcatcgatggcgcgaactttgacatcacgatcaagtacgcaggcgggcttttgcccgttgcggacttggggggttccggggggcagcgccccccgtccatccaagaagcgcgcgggtgtatgctgttttccctgcggcgcgacgggcaagccatcgtggactccgtgcgctgcgcgccgatgatcccgcttatcccctatgagtacctggaaggcgacgccgggaacttctgtttcaccacacaggatgacgcatacgcgcactatagccgcttcggcgggcaggacatcctgcactatatgacggccgccgaacttgccgccatccggacagaaggggggggcgtatga

SEQ ID NO: 28192 - protein, 139 aa, Unknown
  Obtained from environmental sample
  misc_feature (1)..(139): Xaa is any amino acid
MRKESADVYIVPLQSIPNQQLALRIDGANFDITIKYAGGLLPVADLGGSGGQRPPSIQEARGCMLFSLRRDGQAIVDSVRCAPMIPLIPYEYLEGDAGNFCFTTQDDAYAHYSRFGGQDILHYMTAAELAAIRTEGGGV

SEQ ID NO: 28193 - DNA, 462 bp, Unknown
  Obtained from environmental sample
  misc_feature (1)..(462): n is a, c, g, or t
atgagcgccggggacaagctggatgcgcgccgcgtcgtcgtggaactggaactgcaaaacgcggtgaagcggtatgaaggcatggcgatctgctattccgtcaccaaaaccgggaacgggcagatgaacgaggcggccatcaaaatcgccaatctggtcaaagaagacagggactatatcctgaccgccgtcagcccgcttaaaaggcacagggagcgcaagcaggtgcggctgtatgccgggtatcagagtacgggcgtggggcggcttttcgtgggcgacatcaccggggcgaccatcactcagccgccggatatctggctctgcctgaagggccaagaccggctattttctgcgctccagcatcgtggccgtctccggcggggcaacggagacgctttcaaacctggcaaagcgcgtgcccggcgatttgggcctgcaagtcacttccaggccggatga

SEQ ID NO: 28194 - protein, 153 aa, Unknown
  Obtained from environmental sample
  misc_feature (1)..(153): Xaa is any amino acid
MSAGDKLDARRVVVELELQNAVKRYEGMAICYSVTKTGNGQMNEAAIKIANLVKEDRDYILTAVSPLKRHRERKQVRLYAGYQSTGVGRLFVGDITGATITQPPDIWLCLKGQDRLFSALQHRGRLRRGNGDAFKPGKARARRFGPASHFQAG

SEQ ID NO: 28195 - DNA, 483 bp, Unknown
  Obtained from environmental sample
  misc_feature (1)..(483): n is a, c, g, or t
gtggccgtctccggcggggcaacggagacgctttcaaacctggcaaagcgcgtgcccggcgatttgggcctgcaagtcacttccaggccggatgataaaaggatcgccaactacgccttcacgggcggcgccgggctgcaagtggacaaactggggcaggcgggccgcgtcaacgcctatgtggatgacaatacgctgatcgtcaagcctgaaggccggcccctttccggcaagctgcgcagactgtccgaagacagcggcatgatcggcatcccggaactgactgagcagggcgtgaaggtcaagatgctgcacgatacggaaaccgcgctcggcggcgcgctggaaatcacaagcaagctgaatcccgcggccaacgggcgttatgtcatctataagctgacctatacgggcgaaagccgcggcacacctttttatatcgacgccgaagcgcggccggagggaagaacgtggaacctctag

SEQ ID NO: 28196 - protein, 160 aa, Unknown
  Obtained from environmental sample
  misc_feature (1)..(160): Xaa is any amino acid
MAVSGGATETLSNLAKRVPGDLGLQVTSRPDDKRIANYAFTGGAGLQVDKLGQAGRVNAYVDDNTLIVKPEGRPLSGKLRRLSEDSGMIGIPELTEQGVKVKMLHDTETALGGALEITSKLNPAANGRYVIYKLTYTGESRGTPFYIDAEARPEGRTWNL

SEQ ID NO: 28197 - DNA, 558 bp, Unknown
  Obtained from environmental sample
  misc_feature (1)..(558): n is a, c, g, or t
ttgaccggacatgagcgtgaagaagctgaatggcttttaaaatatctggaattgcacgatcagcggataaatgaattgaggggaaaaataaaagaagaagcgaaaaacgatgaagacatgaagcggctgcaaagtatacccggaattggtcctatagttgcatacgcctttacagcccatgtgggagacggtagtaggttcagcaaaggggcgcaagtaagcaattatataggatttgttccgagactggattattccggtacgattcagcggcacgggcatataacaaagcgcggaaacggttatcttcgcggtttgcttgttcaagcggcttggactatgacgctctgtaaaaaaggcggagctctcagcacgcgttataaatattatacgttatgtcaggaagtaagcaaaaagaagaccatagtttctatagcccgcaagttggcggaacttatgtactcggtattacgcaataaaacgatttacgagatacggaaatgggatggtccgaaaaataatccggctgttataaccggacaaacaatgtgtgcttaa

SEQ ID NO: 28198 - protein, 185 aa, Unknown
  Obtained from environmental sample
  DOMAIN (16)...(127): Transposase IS116/IS110/IS902 family
  misc_feature (1)..(185): Xaa is any amino acid
MTGHEREEAEWLLKYLELHDQRINELRGKIKEEAKNDEDMKRLQSIPGIGPIVAYAFTAHVGDGSRFSKGAQVSNYIGFVPRLDYSGTIQRHGHITKRGNGYLRGLLVQAAWTMTLCKKGGALSTRYKYYTLCQEVSKKKTIVSIARKLAELMYSVLRNKTIYEIRKWDGPKNNPAVITGQTMCA

SEQ ID NO: 28199 - DNA, 765 bp, Unknown
  Obtained from environmental sample
  misc_feature (1)..(765): n is a, c, g, or t
ttgatggacggtcccctcccccgtatcctgcacgcgggagacagttgcatcgtcgtcgagttcgggaactcgatcgagatggagatcaacgcgcgtgtccaggtgctgcgcaaaaagatcgagacaaggcccttccgcggcttcatcgagacgatccccacctatcgctctctgtccgtctgcttcgatcctcttctcgcgccgaacgatctcggtaaattattgttgcgcctggccgagagcttggaaaactccacatcaaacggggaagaaaaaagaaggcttttggtggtccccacgtgttatgagggagaatttgctccagacctggaaaaagtcgccgcaaacgcgggagtatcggctgacgaggtcattcgccgccacagcgccagggattgttactgctacatgctggggttcgtcccaggctattcttacctgggaggaatggacccctcgttggagaccccacgtctcaaggagccaagagagaaaatacccgcgggcagcgtcgcgatagggggcaaacagacgggaatctaccccatcgacagccccggcggctggaacttgattggcaaaacacccctgcgcatgttcgaccccgcgagaacccccgctatctttctggaagcggggatgtgggtgcgcttcgtaccgatcggcgctgcggaattcgagcgtatggcgcccctcgtcgcgcaatcaggatggaagcccgacattcgcgaagaaatttctcgtgaccgtaaggaggtggcgtga

SEQ ID NO: 28200 - protein, 254 aa, Unknown
  Obtained from environmental sample
  DOMAIN (7)...(210): Allophanate hydrolase subunit 1
  misc_feature (1)..(254): Xaa is any amino acid
MMDGPLPRILHAGDSCIVVEFGNSIEMEINARVQVLRKKIETRPFRGFIETIPTYRSLSVCFDPLLAPNDLGKLLLRLAESLENSTSNGEEKRRLLVVPTCYEGEFAPDLEKVAANAGVSADEVIRRHSARDCYCYMLGFVPGYSYLGGMDPSLETPRLKEPREKIPAGSVAIGGKQTGIYPIDSPGGWNLIGKTPLRMFDPARTPAIFLEAGMWVRFVPIGAAEFERMAPLVAQSGWKPDIREEISRDRKEVA

SEQ ID NO: 28201 - DNA, 636 bp, Unknown
  Obtained from environmental sample
  misc_feature (1)..(636): n is a, c, g, or t
atgattcgcacggtgcgcgcggccaaggcacgaaacgtcgcagtcggcgcgcaccccgtttatcccgaccttctgggtttcgggcggcgtaacatgacctgcgctccagacgagatgtacgcctatacgctttaccaggtgggggccctaatgggcgtgtgtacctccgagggcgtagaactgcagcacgtcaagccgcacggggccatgtacaaccaggcggccaaggaccccaaacttgcggcggccattgcgcgcgccgtcaaaagcctcggcggggggatcatccttgtggggttgcccggctccgcgttcgagaccgcggcggcggaacagggagttccgttcgcggccgaggcctttgcggaccgaggttacatggcggacgggagcctagtgccgcgtaatcagcccggggcgttcgtccacgaccccaacgaggccgcggcccgcatgctgaagctcattcaggaaggtacggttgagacacccgacgggcaaacgttgagcttcaaggcccatacgatctgcatgcatggcgacaaccccgcggcggtgaaaatggcggaggttgtgagggccacgctggaaaagaatggggtcgcggtcagaaatctgaaagcaattttaaattaa

SEQ ID NO: 28202 - protein, 211 aa, Unknown
  Obtained from environmental sample
  DOMAIN (1)...(199): LamB/YcsF family
  misc_feature (1)..(211): Xaa is any amino acid
MIRTVRAAKARNVAVGAHPVYPDLLGFGRRNMTCAPDEMYAYTLYQVGALMGVCTSEGVELQHVKPHGAMYNQAAKDPKLAAAIARAVKSLGGGIILVGLPGSAFETAAAEQGVPFAAEAFADRGYMADGSLVPRNQPGAFVHDPNEAAARMLKLIQEGTVETPDGQTLSFKAHTICMHGDNPAAVKMAEVVRATLEKNGVAVRNLKAILN

SEQ ID NO: 28203 - DNA, 960 bp, Unknown
  Obtained from environmental sample
  misc_feature (1)..(960): n is a, c, g, or t
ttggagagcataaaaaccatttacagcattaaacacaaaaacggagctattcgccgcgtgaatgtgaatattgccgcgacaagcgtggaaaattacaaaaaattaaaagatgctggtattggaacgtatattttatttcaagaaacctataacaaagacagctacgaaaaattgcacccaacaggacccaagcacgactacgcataccacacccaagcgatggacagggcaatggaagcgggcattgacgatgttggaattggggtgctgttcggtttgaattcatattgctatgatttggtgggcttgttgatgcacgccgagcatttggaggctgtttttggtgttggccctcatacaattagtgttccgcgcgttcgctctgccgaaaatgttaatcccgatgattttggaaatagcataagtgatgctctgtttgcgaaaatagttgctattatccgcatagctgttccatatactggaatgattatttccactagagaaagcgagcaatctagaaaaaacgttttagctcttggtgtatcccaaattagcggcgcatcttgcaccagtgttggcggttatgcagaaaaagaaaaagccgaagataacagtgctcaatttgaagtgatggacaaccgccccttggatgaggttgtgcagtggctattgaatatgggctatgtgccaagtttttgcaccgcctgctaccgccagaaccgcactggtgatcgttttatgagtttggtgaagagcgggcagattgcaaatatttgcccatcaaattcccttatgaccttaaaagagtatttagaagattacgcgagcgaagctaccaaaaccattggcgagaagataattgccgagcaactggagcttattcctagcgagaagataagggaaaaggttagggtgtggctggagaagatacacggcggcgagagggattttagggtttag

SEQ ID NO: 28204 - protein, 319 aa, Unknown
  Obtained from environmental sample
  DOMAIN (120)...(230): Biotin and Thiamin Synthesis associated domain
  misc_feature (1)..(319): Xaa is any amino acid
MESIKTIYSIKHKNGAIRRVNVNIAATSVENYKKLKDAGIGTYILFQETYNKDSYEKLHPTGPKHDYAYHTQAMDRAMEAGIDDVGIGVLFGLNSYCYDLVGLLMHAEHLEAVFGVGPHTISVPRVRSAENVNPDDFGNSISDALFAKIVAIIRIAVPYTGMIISTRESEQSRKNVLALGVSQISGASCTSVGGYAEKEKAEDNSAQFEVMDNRPLDEVVQWLLNMGYVPSFCTACYRQNRTGDRFMSLVKSGQIANICPSNSLMTLKEYLEDYASEATKTIGEKIIAEQLELIPSEKIREKVRVWLEKIHGGERDFRV

SEQ ID NO: 28205 - DNA, 582 bp, Unknown
  Obtained from environmental sample
  misc_feature (1)..(582): n is a, c, g, or t
atggacagagataccataaatctcaaatcaatatttgatattgattttgagttaaggaagatccaggatcttgatctgcttttggaacggatcctccttgaagcaaggaaagtcgtccatgccgacgcgggctctatatatgtaaaacaggcggcggaggaagacggggaccctcccacagatacgctttacttcaaatatgcccagaatgacactgttcagaaatccctgcctcccggccagaaactgatctactcgactttctcccttccgattagtgaaaaatccatatccggctattgcgctttaaccgggaaaataatcgatgtgccggatatgtacaatatctccccggacgcgccttattcctttaactcttcattcgaccaanagacaggttataaaaccatttcaacgctgactttccccctgatcaccgccgacgggcgtctattgngcgttattcaggttatcaataagatggatgataatggaaaggtaattgtatttactcaggaagacgtattcctgatcaccatttcgcggctaacgctactgtggcgctgcagcaggcctatataa

SEQ ID NO: 28206 - protein, 193 aa, Unknown
  Obtained from environmental sample
  misc_feature (1)..(193): Xaa is any amino acid
MDRDTINLKSIFDIDFELRKIQDLDLLLERILLEARKVVHADAGSIYVKQAAEEDGDPPTDTLYFKYAQNDTVQKSLPPGQKLIYSTFSLPISEKSISGYCALTGKIIDVPDMYNISPDAPYSFNSSFDQXTGYKTISTLTFPLITADGRLLXVIQVINKMDDNGKVIVFTQEDVFLITISRLTLLWRCSRPI

SEQ ID NO: 28207 - DNA, 702 bp, Unknown
  Obtained from environmental sample
  misc_feature (1)..(702): n is a, c, g, or t
gtggcgctgcagcaggcctatataaccagggccatgatcctccgcatgataaaaatggcggagctgagggacccaaaggaaaccggaacccatgtaaaccgcgtggccggttacgccgttgagatttacgaccgatgggcgcataaccataatatcccaaccgcggagcgcgaaaatttcagggatattctcaagataggatcaatgctccatgatgtggggaaggtagctatctccgatgtactccttaaaaagccgtcgcgttttacgccggaagaattccaggtaatgcagaaccacaccctgtacggagcgagtctttttgacgatattcactcaaatattgacagaatggccaaagaaatagccctgacccatcatgaaaactggaacggcaccggctaccccggctgggtcgagccgatcagccgcattcccataaaaaccgacaattccggccagcccctgggcagaacgaaagaagagatcccgctagccggaagaatagtcgccatagccgacgtatacgacgcgctttgctccaagagggtttacaaagaaccctgggacgagaataaagtactggaagaaattcgccaactatcaggaatcaaattcgatccggaattgatagatatattttttgaagtgttaccgaatatcaagcatacgcaaagtttgtatcctgagacagttgtttaa

SEQ ID NO: 28208 - protein, 233 aa, Unknown
  Obtained from environmental sample
  DOMAIN (28)...(179): HD domain
  misc_feature (1)..(233): Xaa is any amino acid
MALQQAYITRAMILRMIKMAELRDPKETGTHVNRVAGYAVEIYDRWAHNHNIPTAERENFRDILKIGSMLHDVGKVAISDVLLKKPSRFTPEEFQVMQNHTLYGASLFDDIHSNIDRMAKEIALTHHENWNGTGYPGWVEPISRIPIKTDNSGQPLGRTKEEIPLAGRIVAIADVYDALCSKRVYKEPWDENKVLEEIRQLSGIKFDPELIDIFFEVLPNIKHTQSLYPETVV

SEQ ID NO: 28209 - DNA, 687 bp, Unknown
  Obtained from environmental sample
  misc_feature (1)..(687): n is a, c, g, or t
ttgcaaataatagagacgaccacggaagctgtccaaaacatgggcgtggattggggcttcgtcggcgccaaaaacaatgttacggtcggtcagttcggcagtctcaatatacccgaaggtaagttggacgggattccgggggggatgactttcggtctgctgtcgcccgaaaagttcggcgtggcgttggattacctcttcagagacaccaagaccgaaatagtcgcccaaccgcagatcaccacgttgaacaacaaggaagccaacatatctatcggtgagcagagagccattcctagcaagaacgaagagggcacaggaattacgcaaatggtcagcgtcgccacccagctgacggtcactccctacgtctccggagaggggaaggtcatgctgacgcttaacacgagcaaggaggacttcggaccccttatagatggaaacgtcacaacgcttcaaaagagcgccaaaacgaacgttcttgtcaataacggagagacagttgttatagccgggctcacgtcaaacaataaaagaagcgtaagcaccggcataccgttcttgaaagatatacctattttgggatacttatttaaacgttccgataaaaacgccaacaagacggacttggtgatattcgttacgccgcacataattcattcggagatcggtttgtcgggaaaatag

SEQ ID NO: 28210 - protein, 228 aa, Unknown
  Obtained from environmental sample
  DOMAIN (1)...(220): Bacterial type II and III secretion system protein
  misc_feature (1)..(228): Xaa is any amino acid
MQIIETTTEAVQNMGVDWGFVGAKNNVTVGQFGSLNIPEGKLDGIPGGMTFGLLSPEKFGVALDYLFRDTKTEIVAQPQITTLNNKEANISIGEQRAIPSKNEEGTGITQMVSVATQLTVTPYVSGEGKVMLTLNTSKEDFGPLIDGNVTTLQKSAKTNVLVNNGETVVIAGLTSNNKRSVSTGIPFLKDIPILGYLFKRSDKNANKTDLVIFVTPHIIHSEIGLSGK

SEQ ID NO: 28211 - DNA, 927 bp, Unknown
  Obtained from environmental sample
  misc_feature (1)..(927): n is a, c, g, or t
atgctaatctgcgtaccaggcgtctccggctccggcaaaagctcgctcataaaccaaacgctctatcccgcgctgcaaaaaaaactctacggttcaagggtaaccccgctgccgcataaagggatagacggcttgtctcacttagacaaagtaatcgacatcgaccagtcccccatcggccgcacgccgcgctccaaccccgcgacctacacgaaagtattcgacgcgataagaaacctcttcgccatgctgcccgaaagcaagatccgcggctacctccccggacgcttcagcttcaacaccaaaggcgggcgttgcgaagcctgcgagggcgacggcgaacttcggatagagatgcacttcctgcccgatgtatacgtcaaatgcgaaacatgcggcggaaaacgctacaaccgagagacgctcgaggtgctctacaagggaaaatccatcgccgacgtactggagatgacggtggacgaagcgttaatcttcttcgacaacctttcggcaatccggcaaaaactgcaagtgctgtcgcaagtcggcctcggctacatcaaactcggccaatccgcaacaacactatccggcggcgaggcgcagagaatgaagttagcctccgaactctcaaaacgcgcaacgggaaaaactctgtacattctggacgaaccgaccaccggtttacacttcgaggatatcagaatgctgatgtccgtcatacaagagctggttgacaaagacaactcggttatcgtcatagaacataatctagacgtgataaaatgcgccgaccacatagtagacctcggcccagacggcggcgacagaggcggcacgatagtggcggcagggacgccggaagaggtggccaagaatccggcgtcggtcaccgggaaatttttgaaaggatatttgaagcggtaa

SEQ ID NO: 28212 - protein, 308 aa, Unknown
  Obtained from environmental sample
  DOMAIN (1)...(274): ABC transporter
  misc_feature (1)..(308): Xaa is any amino acid
MLICVPGVSGSGKSSLINQTLYPALQKKLYGSRVTPLPHKGIDGLSHLDKVIDIDQSPIGRTPRSNPATYTKVFDAIRNLFAMLPESKIRGYLPGRFSFNTKGGRCEACEGDGELRIEMHFLPDVYVKCETCGGKRYNRETLEVLYKGKSIADVLEMTVDEALIFFDNLSAIRQKLQVLSQVGLGYIKLGQSATTLSGGEAQRMKLASELSKRATGKTLYILDEPTTGLHFEDIRMLMSVIQELVDKDNSVIVIEHNLDVIKCADHIVDLGPDGGDRGGTIVAAGTPEEVAKNPASVTGKFLKGYLKR

SEQ ID NO: 28213 - DNA, 423 bp, Unknown
  Obtained from environmental sample
  misc_feature (1)..(423): n is a, c, g, or t
ttgcgaagcctgcgagggcgacggcgaacttcggatagagatgcacttcctgcccgatgtatacgtcaaatgcgaaacatgcggcggaaaacgctacaaccgagagacgctcgaggtgctctacaagggaaaatccatcgccgacgtactggagatgacggtggacgaagcgttaatcttcttcgacaacctttcggcaatccggcaaaaactgcaagtgctgtcgcaagtcggcctcggctacatcaaactcggccaatccgcaacaacactatccggcggcgaggcgcagagaatgaagttagcctccgaactctcaaaacgcgcaacgggaaaaactctgtacattctggacgaaccgaccaccggtttacacttcgaggatatcagaatgctgatgtccgtcatacaagagctggttga

SEQ ID NO: 28214 - protein, 140 aa, Unknown
  Obtained from environmental sample
  misc_feature (1)..(140): Xaa is any amino acid
MRSLRGRRRTSDRDALPARCIRQMRNMRRKTLQPRDARGALQGKIHRRRTGDDGGRSVNLLRQPFGNPAKTASAVASRPRLHQTRPIRNNTIRRRGAENEVSLRTLKTRNGKNSVHSGRTDHRFTLRGYQNADVRHTRAG

SEQ ID NO: 28215 - DNA, 681 bp, Unknown
  Obtained from environmental sample
  misc_feature (1)..(681): n is a, c, g, or t
atgtcagacgtaaattttgacaagctcctcggtatggagatggtgttcgtgaaaggcggaacgtttaagatgggtggaacaaaagaacagggcaatgattgccatgatttggagaagcctgtccataaagtaacgcttagcgactacaatatcgggaaatatcaggtaacgcaaaaattatggagggaggtagtaggtagcaatccctcactgtttgtgggggatgattttcctgtagtaaatgttagttggaatgatattaacaacaagtttcttccgttattaaataaggcgacaagaagagagtatcgtttgccgacagaggcggagtgggagtatgctgcgcgtggagggtcaaagagtaagaattataagttttcgggaagcaacgatattgaggctgtggcgtggtatacaaataatagtggcggaaaggtacacgaggtgggaacgaaagcggcgaatgagcttgggatatacgatatgagcgggaacgtgtgggaatgggtgaacgactggtacggtgagtatagttccgatgcgcaaacgaatcccaaaggtccatcaagaggccccgcccgtatgacgcgcggtggttgttggtacggcagtacgctgggttgccgtgtttccgctcgcataggcaacgaacctgacagtaacgacgacaaccccatgtag

SEQ ID NO: 28216 - protein, 226 aa, Unknown
  Obtained from environmental sample
  DOMAIN (10)...(224): Domain of unknown function (DUF323)
  misc_feature (1)..(226): Xaa is any amino acid
MSDVNFDKLLGMEMVFVKGGTFKMGGTKEQGNDCHDLEKPVHKVTLSDYNIGKYQVTQKLWREVVGSNPSLFVGDDFPVVNVSWNDINNKFLPLLNKATRREYRLPTEAEWEYAARGGSKSKNYKFSGSNDIEAVAWYTNNSGGKVHEVGTKAANELGIYDMSGNVWEWVNDWYGEYSSDAQTNPKGPSRGPARMTRGGCWYGSTLGCRVSARIGNEPDSNDDNPM

SEQ ID NO: 28217 - DNA, 414 bp, Unknown
  Obtained from environmental sample
  misc_feature (1)..(414): n is a, c, g, or t
atgaaaaaattgcgtttcattggctntgttttatntgcggcgttgtgtttttttgcctgcgctacaggcatatcgaacataccgcaggatcttacacccgccgaattaatccagcgggcgcaggaagcgtcagagcggaaccggtataaccaggccctgcaatactatacggcccttctcgaacgtaacagtaccaatatagatctggtttgcacggcggaatacgaaatcgcgtttatccattacaaacaaaaaaaatacagccaggcaaaagaaggtttcaaatcgctgctggaacgctacgacagccctgacggacatttgtttccgccccagttcaagcggctttcaaccatagtccttgaacgcatcaatgaaaaagaaaaacccataaaaagcaaaaagaagaattaa

SEQ ID NO: 28218 - protein, 137 aa, Unknown
  Obtained from environmental sample
  SIGNAL (1)...(21)
  misc_feature (1)..(137): Xaa is any amino acid
MKKLRFIGXVLXAALCFFACATGISNIPQDLTPAELIQRAQEASERNRYNQALQYYTALLERNSTNIDLVCTAEYEIAFIHYKQKKYSQAKEGFKSLLERYDSPDGHLFPPQFKRLSTIVLERINEKEKPIKSKKKN

SEQ ID NO: 28219 - DNA, 744 bp, Unknown
  Obtained from environmental sample
  misc_feature (1)..(744): n is a, c, g, or t
atgatggaatacgacggcgacctccacgtcccgcgccgctaccttgtaagccccccctcaatcgaccgcactatgggcgagtacctggcggcttcaggcgtaagaacgctggccatctccgagacccagaagtacggccatgtcacctattttttcaacggcaaccgcaccggaaaattcgacgataaacttgaaaactacgttgagataaagagcgacgtgattccctttgaacagcgcccctggatgaaatgcgccgacataaccgatcaggttatcgaggccatcggctcaggcaaatacgattttatcaggcttaactatcccaacggcgacatggtcggccacaccggcatataccaggcggtggtttgctcaatggaagccatggacatacaactcggcaggctcgccaaagcggtcgaggaagcgggcgcggtaatggtgattaccgccgatcacggcaacagcgacgacatgttcgagcatgacaagaaaaccggcaatgtttcccgcaagcctgacggcacgcccaaggccaaaacaagccacagccttaacccggtgccatgcatcatctacgatcccgaatacaagggcgagtatgccaatgagccgaaagagatctgcctcaacgagggccttgggatcagttccgttgccgcgacctgcatccagcttttgggctacgtgccgcctgaggattacgataagtcaatattgaagatggggactggggactag

SEQ ID NO: 28220 - protein, 247 aa, Unknown
  Obtained from environmental sample
  DOMAIN (82)...(210): Metalloenzyme superfamily
  misc_feature (1)..(247): Xaa is any amino acid
MMEYDGDLHVPRRYLVSPPSIDRTMGEYLAASGVRTLAISETQKYGHVTYFFNGNRTGKFDDKLENYVEIKSDVIPFEQRPWMKCADITDQVIEAIGSGKYDFIRLNYPNGDMVGHTGIYQAVVCSMEAMDIQLGRLAKAVEEAGAVMVITADHGNSDDMFEHDKKTGNVSRKPDGTPKAKTSHSLNPVPCIIYDPEYKGEYANEPKEICLNEGLGISSVAATCIQLLGYVPPEDYDKSILKMGTGD

SEQ ID NO: 28221 - DNA, 633 bp, Unknown
  Obtained from environmental sample
  misc_feature (1)..(633): n is a, c, g, or t
atgaacaccaacctgcacgtccttgaagcctatacaaatcttgcccgcgtcagcaacaacgagcgtgtccgtaaggcgcttgaaacgctgttacgtataacgcttgataaaattgtcaaccgcgattggcattttgaacttttctttgacatgtattggcgttcgcttacaaaagacatttcttacggtcatgacattgaagggagctggctgatgtatgaagcggcgttggctatcggcaatgaaagcctcatttcggaagtaaaacaaaccgcattggcaattgcggaagttacttacgccgccgccattgaccgtaacaacggcgggctgttcagtgcctgtaacgcggcggggcatattcacgcaagaaaggaatggtggccccaggcagaggcggtcgttggtttttacaacgcatatgagttatccggcgatcaaaagtatcttgaagcggctgatggcatatggagttacatacaaaaccattttgtggatcgtgcaaacggcgaatggcacaacgaaataaaccttgacaatacgccggatacaagcatgcccaaggccggtttttggaaatgcccgtaccacaacgcacgagcttgctttgaggtggtgcggcggatgttctaa

SEQ ID NO: 28222 - protein, 210 aa, Unknown
  Obtained from environmental sample
  misc_feature (1)..(210): Xaa is any amino acid
MNTNLHVLEAYTNLARVSNNERVRKALETLLRITLDKIVNRDWHFELFFDMYWRSLTKDISYGHDIEGSWLMYEAALAIGNESLISEVKQTALAIAEVTYAAAIDRNNGGLFSACNAAGHIHARKEWWPQAEAVVGFYNAYELSGDQKYLEAADGIWSYIQNHFVDRANGEWHNEINLDNTPDTSMPKAGFWKCPYHNARACFEVVRRMF

SEQ ID NO: 28223 - DNA, 672 bp, Unknown
  Obtained from environmental sample
  misc_feature (1)..(672): n is a, c, g, or t
atgtacggctttatagacaaagacagtactttggatgttagtgccgccgtgtacgatgagatcctgccggccggagaaggctggctgcacgaactgaaaccgaatgacagcctgcgtattctggattgcgagggcaatcaagccgtggacaccacgttttttaatttggataatccgcaggataactactgtgcggtgactaccattacggcgcagaaaaatatttatctgaccaccggcagtattttgcgctccgcttccggtcagccgctgctggaaattaccgcggacaaaaccggccgccacgacactttaggcggagcctgttcagcgcagagcaatacggtgcgttatgcccgggaaaaagagttcatgcacaattgccgggacagtttcttgctgcagctggcgaataacccggccggttttaccaagcgggatctgtcgcccaatatcaatttttttatgagcgtgccggttaccgcggacggcggactggaattcgccgacggggtttccgcgccgggcaagtatgtggaaatgaaagccttgaaacgcgtactggtgctcatcagcaactgtccacagttgaataatccctgtaatgcttataaccccacgccagtgcggcttattatctggcagggacgcgcatgttcggcaaagtcttaa

SEQ ID NO: 28224 - protein, 223 aa, Unknown
  Obtained from environmental sample
  misc_feature (1)..(223): Xaa is any amino acid
MYGFIDKDSTLDVSAAVYDEILPAGEGWLHELKPNDSLRILDCEGNQAVDTTFFNLDNPQDNYCAVTTITAQKNIYLTTGSILRSASGQPLLEITADKTGRHDTLGGACSAQSNTVRYAREKEFMHNCRDSFLLQLANNPAGFTKRDLSPNINFFMSVPVTADGGLEFADGVSAPGKYVEMKALKRVLVLISNCPQLNNPCNAYNPTPVRLIIWQGRACSAKS

SEQ ID NO: 28225 - DNA, 885 bp, Unknown
  Obtained from environmental sample
  misc_feature (1)..(885): n is a, c, g, or t
gtgggcgataaaacgtataaatttcacctcataccgtcgggcattttgtatgagaataaaatctgttttatcggcgccggtgtggttattcacccggaaagttttaaaaaagagcttgaaaaccttgtagcgcaaggcgttgagcggtcacgttttgaaaaaaacctgaaaatcagccctctggcgcacattacgatgccttaccacatcgaccttgacggcggcagcgaaaatgcgctcggtaaaaacaagatagggacgacaaaaaaggggattggccccacatatacggacaaatacgcgcgtttgggcatcagggtggaggatttgtttgatgagaaaaggctttcgagcaagctggatattattttgcctgtcaaaaaccttgtgctggagcgcgtttacagactgaagccctatgcgaaagaggatattttgaagttgtgcgcggcttacagggatatttttgcgccgtatgtctgtcgggactggcagtttatgcttgaggacgcgaaaaaaaacaaggtaattctatttgaaggcgcgcagggtgtgcttttggacgttgactacggtacatatccttatgtaacaagctctaaccccgtagcgggcggtgcgggcgtcggtgcgggcgtggggccgatggccattaacgacgccataggcgtgtttaaggcgtacattacgcgcgtcggggaagggccgtttgtgacggagctaaacagcagcgtcggcgaggaaatccgtaaaattggggcggaattcgggactacaacagggcggccaaggcgctgcggatggtttgatgctgtcattgcacgatatagcgtgcttgtgggaggcttaacctctgtcgccatcacgaaattgggatgtttttga

SEQ ID NO: 28226 - protein, 294 aa, Unknown
  Obtained from environmental sample
  DOMAIN (2)...(294): Adenylosuccinate synthetase
  misc_feature (1)..(294): Xaa is any amino acid
MGDKTYKFHLIPSGILYENKICFIGAGVVIHPESFKKELENLVAQGVERSRFEKNLKISPLAHITMPYHIDLDGGSENALGKNKIGTTKKGIGPTYTDKYARLGIRVEDLFDEKRLSSKLDIILPVKNLVLERVYRLKPYAKEDILKLCAAYRDIFAPYVCRDWQFMLEDAKKNKVILFEGAQGVLLDVDYGTYPYVTSSNPVAGGAGVGAGVGPMAINDAIGVFKAYITRVGEGPFVTELNSSVGEEIRKIGAEFGTTTGRPRRCGWFDAVIARYSVLVGGLTSVAITKLGCF

SEQ ID NO: 28227 - DNA, 738 bp, Unknown
  Obtained from environmental sample
  misc_feature (1)..(738): n is a, c, g, or t
atggaagcggctgctcgagaggacggggggcctggaggacgggccccggcgccacaccttcaagaaactcgaccccgaaaagctggctgcgcacgtgggcgagcacccagacgcctacctgaaggagataggcgatgcgttcggctgttccggcacggccgtgttcaaggccctggaacggctgaaggtcacgcggaaaaaaaaaccaggaggttcaaggggcagaagccggaactggtggaggcgtatctagcggagctggaggaggtttccggccgcccggtcgtctatgtggacgagacgggcacaggcacctgcctctgccgcgggcacgggcggtcggagcgcggcaagcccgtgatggggagtgtgggcggccgcaggttcaagagggtgggcgtggtggcgggccaggcggggaagtccatcgtggccccgatgcagtatggcggtacgatggactcggaggttttcgagtcgtggttcgtggcctggctgctgccggcgctgcccgcgaactccgtggtcgtgatggacaacgcgtcgttccaccgcaagggccgcctgcgcgcgcttgcagggaaggcgggccacagcgtgcttttcctgccgccgtactcccccgagctcaacccgacagggcatttctgggcctggctcaaggggcgcctgcggaaggcccttcacctgttcgcttctttcgatgaggcactgcatgatgctttccaagttaattga

SEQ ID NO: 28228 - protein, 245 aa, Unknown
  Obtained from environmental sample
  misc_feature (1)..(245): Xaa is any amino acid
MEAAAREDGGPGGRAPAPHLQETRPRKAGCARGRAPRRLPEGDRRCVRLFRHGRVQGPGTAEGHAEKKTRRFKGQKPELVEAYLAELEEVSGRPVVYVDETGTGTCLCRGHGRSERGKPVMGSVGGRRFKRVGVVAGQAGKSIVAPMQYGGTMDSEVFESWFVAWLLPALPANSVVVMDNASFHRKGRLRALAGKAGHSVLFLPPYSPELNPTGHFWAWLKGRLRKALHLFASFDEALHDAFQVN

SEQ ID NO: 28229 - DNA, 330 bp, Unknown
  Obtained from environmental sample
  misc_feature (1)..(330): n is a, c, g, or t
gtgaggagttcctgcgaagggcgcagcatgagccaagcggaggaagcgtccggcatcagcacgttcaccatcaacaaatggaagcggctgctcgagaggacggggggcctggaggacgggccccggcgccacaccttcaagaaactcgaccccgaaaagctggctgcgcacgtgggcgagcacccagacgcctacctgaaggagataggcgatgcgttcggctgttccggcacggccgtgttcaaggccctggaacggctgaaggtcacgcggaaaaaaaaaccaggaggttcaaggggcagaagccggaactggtggaggcgtatctag

SEQ ID NO: 28230 - protein, 109 aa, Unknown
  Obtained from environmental sample
  misc_feature (1)..(109): Xaa is any amino acid
MRSSCEGRSMSQAEEASGISTFTINKWKRLLERTGGLEDGPRRHTFKKLDPEKLAAHVGEHPDAYLKEIGDAFGCSGTAVFKALERLKVTRKKKPGGSRGRSRNWWRRI

SEQ ID NO: 28231 - DNA, 894 bp, Unknown
  Obtained from environmental sample
  misc_feature (1)..(894): n is a, c, g, or t
atgcgtaaaaaactggaaaaggaactggccgagatcgggcagtcccttgaggtcattcagaggaacgcgctgaggtacggcgcgaccgctcctacagaaccgccgcgttcagccgaactgtgtattcgcaccgccatcgacgaagtcatggacaaacaggcggtaaccaccgaaaaagcggtaatcaatatggcgctcaaaggttgtatgggctactacacggcggaacagctggccgccgtactacgggatcagccggattgggagacgttaggttccaaaatcaacgacaacggcttctccacgatctactacactacgaccgagacgcggcgagcggaacaggccgtcatcagctacgccatgcgcgaccgtgggcggtatggccgggctatcaatgcggacaagatggatgaacacgcggcgaagatcgccaccgagggtacgatactcactccggggcaatctaaggccgtaaggatgatatgcaccacccgtgaccgcgtctccgtcgtacagggcgacgccggcgcggggaagactttcgcgatggagaccgtccgtaaaatcttggcgaaagagggcataacggttcgagggttcgccccgaccggtaaggcgtcggatgagcttaataaagccggtgttccggcgaggacgatccacagctaccttgaaagctccaccgcccaagccgaagccggagagggcgaagtttggcttgtggacgaggcggggatgctcggcagccggaggctggacgcttttttggagaaggccgccgagaaaaacgcgcgggtaatcctaatcggggacgataaacaatttcaaagcgtggagcaaggcaaaatctttcaatcgtgcaagatctcggccgatctgatcattggctaa

SEQ ID NO: 28232 - protein, 297 aa, Unknown
  Obtained from environmental sample
  misc_feature (1)..(297): Xaa is any amino acid
MRKKLEKELAEIGQSLEVIQRNALRYGATAPTEPPRSAELCIRTAIDEVMDKQAVTTEKAVINMALKGCMGYYTAEQLAAVLRDQPDWETLGSKINDNGFSTIYYTTTETRRAEQAVISYAMRDRGRYGRAINADKMDEHAAKIATEGTILTPGQSKAVRMICTTRDRVSVVQGDAGAGKTFAMETVRKILAKEGITVRGFAPTGKASDELNKAGVPARTIHSYLESSTAQAEAGEGEVWLVDEAGMLGSRRLDAFLEKAAEKNARVILIGDDKQFQSVEQGKIFQSCKISADLIIG

SEQ ID NO: 28233 - DNA, 579 bp, Unknown
  Obtained from environmental sample
  misc_feature (1)..(579): n is a, c, g, or t
atggtgctgagcgggattgtcgccatcggaaacgccgcgacagtgatgaacgaaataatccaaaaaattgatgaaaacgaagaagtgctggcagaccagaagaagggcttttgggaaaaactacggcagataatccgggctatgatgcatgccgaaccggaagaagttttttacgatctgctatttgtcgatcaatcaacaggggtgcagaaaaaggaaaccaccaatctgcaccagttcaggggagacctggaaagaaaaacaaggattcttgccggtatgaacgcgaacggggcggtaatggcaaaacttaaaaacatgaacgaggagcagtgtaccgcctatcttgaaaggacaatccgtgatgtacagaattaccatcgcatcctggccgcgcttgatgattatttcaagtcaaacataccccagagtgaacgctcgcgtataaaggggataaaacccgaattggcatccgtcaagaactgtattgtcagggcgaaccagctgagggctgaatataccgccgcaaaagaagaagaagaacagatgaaacgcctgggtctaaatcctggcgcatga

SEQ ID NO: 28234 - protein, 192 aa, Unknown
  Obtained from environmental sample
  misc_feature (1)..(192): Xaa is any amino acid
MVLSGIVAIGNAATVMNEIIQKIDENEEVLADQKKGFWEKLRQIIRAMMHAEPEEVFYDLLFVDQSTGVQKKETTNLHQFRGDLERKTRILAGMNANGAVMAKLKNMNEEQCTAYLERTIRDVQNYHRILAALDDYFKSNIPQSERSRIKGIKPELASVKNCIVRANQLRAEYTAAKEEEEQMKRLGLNPGA

SEQ ID NO: 28235 - DNA, 363 bp, Unknown
  Obtained from environmental sample
  misc_feature (1)..(363): n is a, c, g, or t
atggttacacggttggtttttctacctggattggcgactttgccgatccctatacttttctgcaaatgtggcgccgggattccaacccttaatgacgctcaccacgatgacgatgactatgaagcgctgatggaaaaatccatgcttgaagaaggctcggcgcggtgggcaattcttgccgaagcggagcagctcctccttgagcgcggctccgtggttcccatttcctacagcccggcgattaatattgtagacatgggcgaactggaaggctggttcaagaacgccctggacatacatccctttaaatatcttgcattcaaggcgttccgccccatccccggggtggtcatgggaaagtag

SEQ ID NO: 28236 - protein, 120 aa, Unknown
  Obtained from environmental sample
  misc_feature (1)..(120): Xaa is any amino acid
MVTRLVFLPGLATLPIPILFCKCGAGIPTLNDAHHDDDDYEALMEKSMLEEGSARWAILAEAEQLLLERGSVVPISYSPAINIVDMGELEGWFKNALDIHPFKYLAFKAFRPIPGVVMGK

SEQ ID NO: 28237 - DNA, 813 bp, Unknown
  Obtained from environmental sample
  misc_feature (1)..(813): n is a, c, g, or t
atgcccccngcgttttttttcccgtccatgctctgtcatcattcgttcagtcccattcatcgatccatgatcaacgatgaaaattggtcaaaaaaacctccgctttccaacggaccgttctacattaccgagatggacgaaaataaaattgtcctggctaaagccaatgcctattgggatgcccctggggtttctctaaaaaaaattacccttaaatacaccgaaaacggcgatgaggcaagcagtctctggaactcaggcgaggcccgctggatttccggtgaagcaaaccttgaaatgctgaccgaccgcagcggcatccaggtcaatgccatgtttgccactcattactattttatccggtccggagaaaaaccctggaacgattatcgcatccgccgcgcccttgttctggcactgccctgggaagaaattcgcgccggacattttctccccgccaaaacattgatctacccgctgcccggttatcccagggttgacggactttccgataccgatattgaagaagcggccgcgctgcttactcaggccggtttcccccacggcgacggccttcccgatctggtgatacgcattaccccttcgccggaagcggcccgcatcggcggtcttatggcaagcacctggaaagaaaaactgggaattccggtgcgggtagaagtggttccctacaaccgttatttccagatgcttaaaaccgatggttacacggttggtttttctacctggattggcgactttgccgatccctatacttttctgcaaatgtggcgccgggattccaacccttaa

SEQ ID NO: 28238 - protein, 270 aa, Unknown
  Obtained from environmental sample
  DOMAIN (5)...(270): Bacterial extracellular solute-binding proteins, family 5 Middle
  misc_feature (1)..(270): Xaa is any amino acid
MPPAFFFPSMLCHHSFSPIHRSMINDENWSKKPPLSNGPFYITEMDENKIVLAKANAYWDAPGVSLKKITLKYTENGDEASSLWNSGEARWISGEANLEMLTDRSGIQVNAMFATHYYFIRSGEKPWNDYRIRRALVLALPWEEIRAGHFLPAKTLIYPLPGYPRVDGLSDTDIEEAAALLTQAGFPHGDGLPDLVIRITPSPEAARIGGLMASTWKEKLGIPVRVEVVPYNRYFQMLKTDGYTVGFSTWIGDFADPYTFLQMWRRDSNP

SEQ ID NO: 28239 - DNA, 972 bp, Unknown
  Obtained from environmental sample
  misc_feature (1)..(972): n is a, c, g, or t
atgcgaaaaccaattctaatgaccataggtgaccctaacggcatcggtccggagatttgcctaaaacttatgaaacgcgctcccaaaaccgcgcaccctgtaattttaatcggcgatattgatgtgttggagaaatgtaggaaaatgctgaaattcaccgagacgaatatcaaaggtgggcttgccgtttacgcaggtagcgagccttttaaaggcaagctgcaacccggagaggtttcaaaggcggcaggtgcggcgagcatcgcgtgggttcgccaagcaacggaatttgtgcaggcgggttatgcggcagcggtggtgaccgcccccttgtgcaaggaagcggtggaaaaaactctaccgagatttcaaggtcacacggaattcataggcgagatgtgcggcgacaaggaacctgtgcttgcccttgttcacggggattgggttgttgcgcacgtgagcactcatgtctcacttgcagaagctgttaaaaaagctaaaccagagcgaattgcaaaggttggcaaacttttgaacaattttttgcaaaaatataaaggcataaaaaatccaaaaatcggagttgccggaataaacccacacgcaggcgagcatggcttgtttggcaaagaggaaatacagagcataatcccagcggttaaaaaactccgctccatgaaaatcaacgccgtaggtcccctccccgccgacgtagttttcccgcaactgcactccaaagtatatgacggagttatcgccatgtatcacgaccaagggcatatagtcactaaaacgctcgcattcaatttaggcaaagagcgcaaggttggcggagtgaacaccacgcttgggcttcccgttttgcgcacaagcgttgaccacggaacaggttttgacatagcttggcaaaacaaagcagaccccacctcgctaagagatgcgctattgctcgccgataaattagccttatga

SEQ ID NO: 28240 - protein, 323 aa, Unknown
  Obtained from environmental sample
  DOMAIN (23)...(319): Pyridoxal phosphate biosynthetic protein PdxA
  misc_feature (1)..(323): Xaa is any amino acid
MRKPILMTIGDPNGIGPEICLKLMKRAPKTAHPVILIGDIDVLEKCRKMLKFTETNIKGGLAVYAGSEPFKGKLQPGEVSKAAGAASIAWVRQATEFVQAGYAAAVVTAPLCKEAVEKTLPRFQGHTEFIGEMCGDKEPVLALVHGDWVVAHVSTHVSLAEAVKKAKPERIAKVGKLLNNFLQKYKGIKNPKIGVAGINPHAGEHGLFGKEEIQSIIPAVKKLRSMKINAVGPLPADVVFPQLHSKVYDGVIAMYHDQGHIVTKTLAFNLGKERKVGGVNTTLGLPVLRTSVDHGTGFDIAWQNKADPTSLRDALLLADKLAL

SEQ ID NO: 28241 - DNA, 1389 bp, Unknown
  Obtained from environmental sample
  misc_feature (1)..(1389): n is a, c, g, or t
atgaaagagcctattggggacgagtctgtattcctgcggattaacgaattcaaaaaagggctaatccagtttacggacagcactaacgccatgcgccttgtcaaagagcatgggcgcaatatccggtataacgccgcatggagaaaatggattgtgtggaacggcaagttttgggaaatggacgagggcggggctttgatacacgaaaaagggcttgaaatggtacgcaacatttacgacgagcttctgaaaaccgcagattacagggaacggattgacatagaaaaagcggcgatgatgagcgagagcgtaaggcggcgcaaggcttttgtagaggcggcaacatggatttccgctttgcgtattaggacggacgaactacacagcaatccgtggctcttgaatgtgaggaacgggactgtcgatattttgagcggcgaattcagggaacatagacaagaggacatgattacgaaaattgccaatgtggactatgatccaaatgccgactgcccgatgtggaagaagtttgtccgtgaaattatggactataaagcggaaataattaagtttgtccagactgcggcggggtggtctttgtccggcgacatatcagaacagacaatgttcattctgtacggcactggcgcaaacggaaaatctacattcctgaatacgataatgtatctgttaggcgattacgcaaccgcaacgcctaccgaaacttttatgaaaaaatcgggggataatttttccaatgacgtggctcgtctgcggagtactcggtttgtaactaccacagaggttgagcaggggcggcgaatgtctgaaccgttaattaaaaagattaccggcaatgacgaaatgacggctcgttttttgtatggggagttttttaattttaagccgactttcaagatttttatggcgactaatcataagcctgttatcaagggtactgatcatgggatatggcggcggattaaacttattccttttacgcaaaggatacctgaagaaaaacagggtaaacatcttgaattgaaactgcgggaagaagcaagcggaattttgaattggcttttggaaggtatggcgacttggagacaggaaaggttgaaaacgccaaaggctgttttgtttgctactgacgaatatcgtggggaaatggacgttatcggaaatttcataaaagagaaatgcgaccaaaaaaaggaaatgactattacgattaaaaagttatacaaggcttattccgactggtgcgaggaaaataacgaacaccctgttagcgaaagattttttactttgcggttaaaggaaatggggtttgagcagagcagaaattctgcggaaagattttgggttggggttgggttggtggaatga

SEQ ID NO: 28242 - protein, 462 aa, Unknown
  Obtained from environmental sample
  DOMAIN (134)...(445): Poxvirus D5 protein-like
  misc_feature (1)..(462): Xaa is any amino acid
MKEPIGDESVFLRINEFKKGLIQFTDSTNAMRLVKEHGRNIRYNAAWRKWIVWNGKFWEMDEGGALIHEKGLEMVRNIYDELLKTADYRERIDIEKAAMMSESVRRRKAFVEAATWISALRIRTDELHSNPWLLNVRNGTVDILSGEFREHRQEDMITKIANVDYDPNADCPMWKKFVREIMDYKAEIIKFVQTAAGWSLSGDISEQTMFILYGTGANGKSTFLNTIMYLLGDYATATPTETFMKKSGDNFSNDVARLRSTRFVTTTEVEQGRRMSEPLIKKITGNDEMTARFLYGEFFNFKPTFKIFMATNHKPVIKGTDHGIWRRIKLIPFTQRIPEEKQGKHLELKLREEASGILNWLLEGMATWRQERLKTPKAVLFATDEYRGEMDVIGNFIKEKCDQKKEMTITIKKLYKAYSDWCEENNEHPVSERFFTLRLKEMGFEQSRNSAERFWVGVGLVE

SEQ ID NO: 28243 - DNA, 882 bp, Unknown
  Obtained from environmental sample
  misc_feature (1)..(882): n is a, c, g, or t
ttggccgagcaaagaatagcccattttgaatactcttggcagtgggcttaccacgaaaggttccaaaacgcaggcataatggcactcttgggttcaggctttgacccaggtgtcacaaacgtgtacacagcgtacgcaaaaaaacaccattttgacaaaatagatacccttgatattgtggactgcaacaacggcaaccacggaaaggcatttgcaacgaacttcaacccagagataaacataagagaaataacgcaaaatggcagatactatgaaaacggagaatggaaagaaattcctccactttcagttcacaaagatatcagctacccagaggttgcagtacgcggctcttatgtgttgttccacgaagagttggaatctcttgtaaagcatttctcagaaataaagagagcaaggttctggatgacattcggcgatgaatacataaagcatttaaccgttctaaaaaacgttggaatgacacgcatagaccctgtgaaattcaacggcatagatataatcccgctggaatttttaaaggcactactgcccgaaccctcaacccttggcgaaaactattctggcaaaacctgcataggctgccaaataacagggcaaaaaaacggaagtccgcaaacctattttgtttacaatgtttgtgaccacgcagagtgtttcaaagaggttcaggggcaggcaatagcctacacaacaggcgttccagcaatgctaggcgcagcccttatgctcacgggcaaatggagaggcaaaggggtgttcaatatggaacaattagacccagacccttttatggcagaaataggcaaatgggggcttccttggaaggagctatttggcaaagaggcggagttggtataa

SEQ ID NO: 28244 - protein, 293 aa, Unknown
  Obtained from environmental sample
  DOMAIN (1)...(283): Saccharopine dehydrogenase
  misc_feature (1)..(293): Xaa is any amino acid
MAEQRIAHFEYSWQWAYHERFQNAGIMALLGSGFDPGVTNVYTAYAKKHHFDKIDTLDIVDCNNGNHGKAFATNFNPEINIREITQNGRYYENGEWKEIPPLSVHKDISYPEVAVRGSYVLFHEELESLVKHFSEIKRARFWMTFGDEYIKHLTVLKNVGMTRIDPVKFNGIDIIPLEFLKALLPEPSTLGENYSGKTCIGCQITGQKNGSPQTYFVYNVCDHAECFKEVQGQAIAYTTGVPAMLGAALMLTGKWRGKGVFNMEQLDPDPFMAEIGKWGLPWKELFGKEAELV

SEQ ID NO: 28245 - DNA, 486 bp, Unknown
  Obtained from environmental sample
  misc_feature (1)..(486): n is a, c, g, or t
ttgggtgaagcgcccgcttcttcgatcacagcgagtccgcctatcgtgtggggcctcgcctattattatgggcttggtactgtgagggatccttccgtggcggccgatttttggttcaagtccgccaagggcggctatctgccagccatgttcaggtatggcggcatgctggacaggggcgagggcatcccccaagaccaagccgaggcttcaaagtggttcatcggcggcgcttctcttggctgcaagagctgcatgctccgcgtgtcggagatgtacgcctgtggcgagggcgtacggcggaaccgtcaaaaggctgtgtattggcggcagcgggctcttggtataaatgccgatactgcggagaagtggtgcgatgttgctgaacagtctgacagtttgcttacatattcccggtgggaggacctgctgcccaaagggccgcccgcgtttgcgtcaggcggggatgtggctggtggtgtttga

SEQ ID NO: 28246 - protein, 161 aa, Unknown
  Obtained from environmental sample
  DOMAIN (47)...(82): Sel1 repeat
  misc_feature (1)..(161): Xaa is any amino acid
MGEAPASSITASPPIVWGLAYYYGLGTVRDPSVAADFWFKSAKGGYLPAMFRYGGMLDRGEGIPQDQAEASKWFIGGASLGCKSCMLRVSEMYACGEGVRRNRQKAVYWRQRALGINADTAEKWCDVAEQSDSLLTYSRWEDLLPKGPPAFASGGDVAGGV

SEQ ID NO: 28247 - DNA, 939 bp, Unknown
  Obtained from environmental sample
  misc_feature (1)..(939): n is a, c, g, or t
atgggtttataccgtcatgttaaaatcggccctcttgaacttgacggtaatctttttcttgcgccggtagccggttattcagaccgcagcttcaggtccttgtgcgttgagcagggggcgaattttacctttaccgagcttgtctccgccgaggctttatggcgcaatcccgggcattacgggctggacggttccgacggttcctgcaaggctgccgcagtaagcctggtaagccgcgggcccggcgaacggcgttatgcgattcaactgttcggcggcgagcctgaggcggtttataaagcggcgctgctgctcgccccgctgagaccggacgtcgtggacattaacgccggttgcccggtgccaaaagtggtaaaaaacggcgctggctgcgccttgatgaaagaccccgccaacctgggcagggttgtagaagcggcggcaagggcctcgcgggaagccctgggaaacgcgccggtaacgataaagatgcgctccggctgggattcaacttcgataaattacgccgaatgcgcccgcgtcgccgttgagagcggcgccgcgatggtaagcctgcacccccgcacacgaggccagcaatacggcggcgaaagcgactggtcgcgcatcgccgatcttgtatcgcggctttcggcgcctgtcaccggttcgggcgatctgtacgcgccggaggacgcaaagcgcatgctggaggaaacaggctgcgccgcggtaatgttcgcgcggggcgcgatgggcaacccgtttatttttcccgagacgcgttctttccttgagacgggcgcgtgggaacccgcgcctttcccggcgcggatgggcgcccgctttcgccatctgngaatgctggcggcggacatcggcgagcgcacggcctgtctggaaatgcgcaagcaggtctgcgcctacaccaaggcatga

SEQ ID NO: 28248 - protein, 312 aa, Unknown
  Obtained from environmental sample
  DOMAIN (19)...(312): Dihydrouridine synthase (Dus)
  misc_feature (1)..(312): Xaa is any amino acid
MGLYRHVKIGPLELDGNLFLAPVAGYSDRSFRSLCVEQGANFTFTELVSAEALWRNPGHYGLDGSDGSCKAAAVSLVSRGPGERRYAIQLFGGEPEAVYKAALLLAPLRPDVVDINAGCPVPKVVKNGAGCALMKDPANLGRVVEAAARASREALGNAPVTIKMRSGWDSTSINYAECARVAVESGAAMVSLHPRTRGQQYGGESDWSRIADLVSRLSAPVTGSGDLYAPEDAKRMLEETGCAAVMFARGAMGNPFIFPETRSFLETGAWEPAPFPARMGARFRHLXMLAADIGERTACLEMRKQVCAYTKA

SEQ ID NO: 28249 - DNA, 513 bp, Unknown
  Obtained from environmental sample
  misc_feature (1)..(513): n is a, c, g, or t
atggaagtgattctgcccagaatgagcaccgtttaccgccatctgtttttgcagcacacgcttgccgagatgaatgaattcaaagtacgccattctttgtatgacaatttatacgcccgcattggcaatatatttatggacatagctgaaaactatgtcgataaaatagcctcgaagcatccgttgtacgaacctgaaatttcgcttgaagaggcggcaaaatacagcgatgatataatacatcattcgatattgtcgggcgaatctttccttattgccgcccatactttgcatcttgccgaaaaaggggtccgttcatttattattctacagcctttcggctgcctgccgaatcatatctgcgggcggggggtgatcaaaagagtcaaggaaatgtatccggatattcaagttctgccgcttgattacgagcctgacgtaagttttgccaatatcgaanacagaatacagatgctgctgatgaatatgaaaaatttaaaagcggcgggataa

SEQ ID NO: 28250 - protein, 170 aa, Unknown
  Obtained from environmental sample
  misc_feature (1)..(170): Xaa is any amino acid
MEVILPRMSTVYRHLFLQHTLAEMNEFKVRHSLYDNLYARIGNIFMDIAENYVDKIASKHPLYEPEISLEEAAKYSDDIIHHSILSGESFLIAAHTLHLAEKGVRSFIILQPFGCLPNHICGRGVIKRVKEMYPDIQVLPLDYEPDVSFANIEXRIQMLLMNMKNLKAAG

SEQ ID NO: 28251 - DNA, 723 bp, Unknown
  Obtained from environmental sample
  misc_feature (1)..(723): n is a, c, g, or t
atggatcacatgatgccggaaatggatggaattgaagcgacggcaattatccgttcgctggagggcgggcgcttccgtaccatgcccattatagcgttaaccgcaaacgccgttgttggaatgagggaaatgttcattaataacggcttcaatgattttctgtccaaacccatagacgtttccaagctggatgaaatccttgaacgttggatacccaaggaaaagagggagtcgggaacagagaagagagcaatgagcaatgaaggacaagataatcagccggataacgatagcgcttccagtttgtaccccgatagtgcaaatcgcgattccccactccctactccccactccctactccctaacatcccaggtattgataccgcaaaaggcatcgtcatgaccggcgggacagcgtcggcttatataaaagtgttatccctgttttgcaaagatgttgaagaacgcctgccgtttctgaaaaaaacaccggaagaaaatctgcccgcgtttattacccaggttcacgccttgaaaagcgcgtcggcttctatcggcgcgcagaaaatatcgtctctcgcggcggggcttgaagcggtaggtaaggcgggggatattgcttttatccgtgaaagcctgcccgattttatagaacaacttacggcgcttgtaaaaaatattcgtaccgcgttggaaaacgcggcggaacagttcaaaaattga

SEQ ID NO: 28252 - protein, 240 aa, Unknown
  Obtained from environmental sample
  DOMAIN (144)...(230): Hpt domain
  misc_feature (1)..(240): Xaa is any amino acid
MDHMMPEMDGIEATAIIRSLEGGRFRTMPIIALTANAVVGMREMFINNGFNDFLSKPIDVSKLDEILERWIPKEKRESGTEKRAMSNEGQDNQPDNDSASSLYPDSANRDSPLPTPHSLLPNIPGIDTAKGIVMTGGTASAYIKVLSLFCKDVEERLPFLKKTPEENLPAFITQVHALKSASASIGAQKISSLAAGLEAVGKAGDIAFIRESLPDFIEQLTALVKNIRTALENAAEQFKN

SEQ ID NO: 28253 - DNA, 819 bp, Unknown
  Obtained from environmental sample
  misc_feature (1)..(819): n is a, c, g, or t
gtgcgtcgcgtgaaggcaagaaggtatattctggacactaccctgcgggacggagagcaaacgccgggaatttgttttacgcgggaacaaaaactgaaaatcgccgcgcttttggacgaaggcggagtacatcagatcgaggcgggtattcccgccgcgtctaaacaggaaaaagaaattatcatgcggattatagaaaaccgcaaaaacgcgattatatcggtatgggggcggcttgtcccggaggacatcggacacgcggcggactgtaagcccgacatcatacacataagcgtgccggtttccggtacgcacatatactcaaaactgaaaaaagacaaggattgggttatcagtcagttgtacgcctgtttggatttgatcggaaaacataatatcccgctgtctgccggattcgaggatgcctttcgcggcgatccgtcctttatgcggactgtcgcaaagattctgctggattttggcgtaacaaggattcggctgtcagacacggtgggcgtcgcttcgccttccgttgtcaaaaatgtctttacggagttgtcgtcgcatatgcagggaaaggcggaacttggctttcacgcccacaatgatctgggaatggctgtcgccaacaccgtcgaggcggcaaaatgcggatgccagtacgccgatgtaacggttggcggaatcggagaacgcgccggaaactgcgatttagttcagcttgtcgccgcaagctccaatgtatttgattggggaataacgccggaaggcgcgctcaaacttcaaaaagatatttttaaggtgatgcggtctaaatag

SEQ ID NO: 28254 - protein, 272 aa, Unknown
  Obtained from environmental sample
  DOMAIN (16)...(271): HMGL-like
  misc_feature (1)..(272): Xaa is any amino acid
MRRVKARRYILDTTLRDGEQTPGICFTREQKLKIAALLDEGGVHQIEAGIPAASKQEKEIIMRIIENRKNAIISVWGRLVPEDIGHAADCKPDIIHISVPVSGTHIYSKLKKDKDWVISQLYACLDLIGKHNIPLSAGFEDAFRGDPSFMRTVAKILLDFGVTRIRLSDTVGVASPSVVKNVFTELSSHMQGKAELGFHAHNDLGMAVANTVEAAKCGCQYADVTVGGIGERAGNCDLVQLVAASSNVFDWGITPEGALKLQKDIFKVMRSK

SEQ ID NO: 28255 - DNA, 798 bp, Unknown
  Obtained from environmental sample
  misc_feature (1)..(798): n is a, c, g, or t
ttgaaatataggagaatacctcgcgaattgcgcttgcaagcgcattgttcatattgttgcgtgcagacatggggagaatttagaaaaaacttggcagttttttactatattctttttgtggcaaaacagttttacaaagaaggcggcggcggcggcggcaaaggcggcgaagttggcaaaccgataaagatatttgatatacctggaccaaaaaaagctgcaattttgatggtagcccttgggcacgaggcaagctcccacgtttttaaggcattaaacgaaaaagatgttgaaactttaaccgcgcaaattgcccgtttggaaggcgtaaccccggaaatgcgcgaatatgttttgcatgaatttcaacagataagcacagcgcaggaatacgttagccaaggcggtattgaatttgcgcagacaattttggagcagtcgctgggttcccgccgtgctcgtgaaattttggaaaaggtgcagaacaacattcgcaccaccggcttcaacatgctggataatgttgaccccacgcagttgatatcctttttgagcaaggaacatccccagaccgtggctctgcttttagcgcacatgaaacccgaaaaagccgccgctacaatttccgccctaaacccggatatgcaggtggaggttgcaacccgcatagccacgatggaaagcataagcccggaagttttgcagcaggttgaacaacaattatcacaaattctaaaaaccatgttcaccggcgacatcgcagaggttggcggcgtaaagagcgtgcagaaatgctga

SEQ ID NO: 28256 - protein, 265 aa, Unknown
  Obtained from environmental sample
  misc_feature (1)..(265): Xaa is any amino acid
MKYRRIPRELRLQAHCSYCCVQTWGEFRKNLAVFYYILFVAKQFYKEGGGGGGKGGEVGKPIKIFDIPGPKKAAILMVALGHEASSHVFKALNEKDVETLTAQIARLEGVTPEMREYVLHEFQQISTAQEYVSQGGIEFAQTILEQSLGSRRAREILEKVQNNIRTTGFNMLDNVDPTQLISFLSKEHPQTVALLLAHMKPEKAAATISALNPDMQVEVATRIATMESISPEVLQQVEQQLSQILKTMFTGDIAEVGGVKSVQKC

SEQ ID NO: 28257 - DNA, 597 bp, Unknown
  Obtained from environmental sample
  misc_feature (1)..(597): n is a, c, g, or t
atgtctgcacgcaacaatatgaacaatgcgcttgcaagcgcaattcgcgaggtattctcctatatttcaagattcaaggggcagctgttcatattgaaaatagaggacacgcttttagataacccagcatttcccgtactgataagggatattgcgcaactccacagcgtgggcataaaaatattgatagtgccgggcacaaggaacagcatagaccgccagcttggggcttatgggttagaagccgtttttaaacatggaataagattaacctctaaagatgctttgccgcttacagaacaggcttcgcttggggtggcgcagcacatactctcgcacctaaccgcaaacgggattaacggcattcaggncaactgggtacaggcgcggagccttggcgttatggacggcatcgaatatatgtacaccggcaaaattgagcgcattgaaaagaaccttataagagaacttttgcacgaaggctttatccccattcttccgcccataggttgggaacaagctggggcaacgttaaccacatttccagccacgnagcttgcaaacgaaactttgcattactttccggttgaaaaataa

SEQ ID NO: 28258 - protein, 198 aa, Unknown
  Obtained from environmental sample
  misc_feature (1)..(198): Xaa is any amino acid
MSARNNMNNALASAIREVFSYISRFKGQLFILKIEDTLLDNPAFPVLIRDIAQLHSVGIKILIVPGTRNSIDRQLGAYGLEAVFKHGIRLTSKDALPLTEQASLGVAQHILSHLTANGINGIQXNWVQARSLGVMDGIEYMYTGKIERIEKNLIRELLHEGFIPILPPIGWEQAGATLTTFPATXLANETLHYFPVEK

SEQ ID NO: 28259 - DNA, 807 bp, Unknown
  Obtained from environmental sample
  misc_feature (1)..(807): n is a, c, g, or t
ttgcgagctgtttttagcgcctctatcgctgagtcgggaaagcctgtgtcttcagcaagtaatttcaccagcttttcaaagtattctgtttcgcttgcctcaagacggctcaaaaaaacaaagcgtctttccgcgttccttacgaggttcgcagccttccgtaatcgctgtgaacgaggaagctggattagtttatgtagtgggatcatgtgcgctccatacgttataatacgcatgatgttactgggacaaaaatttttcaaccagccaaccgtggagctggccaaggcgcttttgggcaagtacctgatcttaggggatttgcggggcaaaattgtagaaaccgaagcttacctttttcatgacgaccccggctgccactcgagcaggggtatgactccccgcaacgcccccatgttcggcccggcaggtcatacttacgtttattttatttacgggatgtactattgcctcaacattgtcagcggaaaaaccggcgaaggcgaagcggtgttgatccgcgcccttgagccaattcagggaattgagatcatgatgcaaaggcggaacacaaacaaaatagaaaacctatgcaacgggcccggtaaacttacccaggccttcggtatcaccaaagagcacaacaaccaaagcctttttaccggggaattgcagattcacaacagtcgtgaaaaaccggaaatagagagcagcaagcggattgggctatctgcgggcggggagcttgagctgcggttttttattaagggaaataggtttgtgtcaaagcagccatataaaccctaa

SEQ ID NO: 28260 - protein, 268 aa, Unknown
  Obtained from environmental sample
  DOMAIN (83)...(260): Methylpurine-DNA glycosylase (MPG)
  misc_feature (1)..(268): Xaa is any amino acid
MRAVFSASIAESGKPVSSASNFTSFSKYSVSLASRRLKKTKRLSAFLTRFAAFRNRCERGSWISLCSGIMCAPYVIIRMMLLGQKFFNQPTVELAKALLGKYLILGDLRGKIVETEAYLFHDDPGCHSSRGMTPRNAPMFGPAGHTYVYFIYGMYYCLNIVSGKTGEGEAVLIRALEPIQGIEIMMQRRNTNKIENLCNGPGKLTQAFGITKEHNNQSLFTGELQIHNSREKPEIESSKRIGLSAGGELELRFFIKGNRFVSKQPYKP

SEQ ID NO: 28261 - DNA, 1275 bp, Unknown
  Obtained from environmental sample
  misc_feature (1)..(1275): n is a, c, g, or t
atgtttgagggcggagtaaagagctttgtcgattatctaaacgaaaataaaaccgtgctgtacaatgagccggtttatcttgaaggcagccgcgacgacggcgcgggcggcaatattgaaattgaatgcgccatccagtacaacgacggttttaacgaaataatgttttcgtttgtaaacgatattaacacgcgggagggcggcactcatcttgtcggctttaaatccgcgcttacccgtacccttaacgaatttttgaaaaagtcaaaacatgccaaaaagctggaagaaagtctttcaggagacgacgtgcgcgaaggactgactgcggtactttccgttaaagtgcctaacccgcagtttgaagggcagaccaagggcaaattgggcaattcggaagtgaagggcatagttgagtcttttgtaaacgagcagttggaactgttctttgaccagcacccgggagttatcaataacatactggaaaaatccgtgttagctgcaaaagcgcgtattgccgcccgccaggcgcgtgatgcgacacgcagaaagaacgctatggactccgccgggcttcccggaaaacttgccgactgttcggaaaaagatccggcgaagtgcgagctttttattgttgagggagattccgccggcggctccgcaaagggcggccgcgaccgcagaactcaggcgattcttccgctttggggtaaaatgctcaatgttgaaaaacagcgaattgaaaaggttatcacaaacgataaactgcagcctattatcgccagcatcggcgcgggttgcggcaacgattttgatgtttctaaaatacgctaccataaaattatcatcatggccgatgccgacgttgacggttcgcatatacgcacattgcttttaacgttcttctaccgttatatgacaccgcttattgaacaggggcacgtttaccttgccatgccgccgctttacaaggtcagttatgacaaaaaatctttctatgcttacgatgacgcggaaaaagaccgtcttctttccgagtccggcaaagacgtagaaaaagtttccgtgcagcgttacaagggtcttggagagatgaaccctgatcagttatgcgacactacgatggatcccggcaagcgcaatattattcaggtgcacttggacgacactgtcgaagcggagcgaattttcactacgctgatgggcgaagttgtgcagccccgccgtgagtttatcgaggataacgcgcttcttgtgagtaatttggacgtgtag

SEQ ID NO: 28262 - protein, 424 aa, Unknown
  Obtained from environmental sample
  DOMAIN (207)...(318): Toprim domain
  misc_feature (1)..(424): Xaa is any amino acid
MFEGGVKSFVDYLNENKTVLYNEPVYLEGSRDDGAGGNIEIECAIQYNDGFNEIMFSFVNDINTREGGTHLVGFKSALTRTLNEFLKKSKHAKKLEESLSGDDVREGLTAVLSVKVPNPQFEGQTKGKLGNSEVKGIVESFVNEQLELFFDQHPGVINNILEKSVLAAKARIAARQARDATRRKNAMDSAGLPGKLADCSEKDPAKCELFIVEGDSAGGSAKGGRDRRTQAILPLWGKMLNVEKQRIEKVITNDKLQPIIASIGAGCGNDFDVSKIRYHKIIIMADADVDGSHIRTLLLTFFYRYMTPLIEQGHVYLAMPPLYKVSYDKKSFYAYDDAEKDRLLSESGKDVEKVSVQRYKGLGEMNPDQLCDTTMDPGKRNIIQVHLDDTVEAERIFTTLMGEVVQPRREFIEDNALLVSNLDV

SEQ ID NO: 28263 - DNA, 384 bp, Unknown
  Obtained from environmental sample
  misc_feature (1)..(384): n is a, c, g, or t
atgcgaaccgtcaacgtcggcatcggccatgatgataattttatggtagcgtattttagaaacatcaaaatcgttgccgcaacccgcgccgatgctggcgataataggctgcagtttatcgtttgtgataaccttttcaattcgctgtttttcaacattgagcattttaccccaaagcggaagaatcgcctgagttctgcggtcgcggccgccctttgcggagccgccggcggaatctccctcaacaataaaaagctcgcacttcgccggatctttttccgaacagtcggcaagttttccgggaagcccggcggagtccatagcgttctttctgcgtgtcgcatcacgcgcctggcgggcggcaatacgcgcttttgcagctaa

SEQ ID NO: 28264 - protein, 127 aa, Unknown
  Obtained from environmental sample
  misc_feature (1)..(127): Xaa is any amino acid
MRTVNVGIGHDDNFMVAYFRNIKIVAATRADAGDNRLQFIVCDNLFNSLFFNIEHFTPKRKNRLSSAVAAALCGAAGGISLNNKKLALRRIFFRTVGKFSGKPGGVHSVLSACRITRLAGGNTRFCS

SEQ ID NO: 28265 - DNA, 654 bp, Unknown
  Obtained from environmental sample
  misc_feature (1)..(654): n is a, c, g, or t
atgtttgacatgaagatgcccatccgcgccgcacccttcgcccaccagcaggccgcttttaccgccgcgctggaagcgtttataagcggtaaaagccggggatacgcgcttctgatggaaatgggcaccggcaagaccatcaccagtatcgccattgccggggcattgtaccttgacaaaagaataagcagcgcattaatcgtcgccccgctctccatccttagcgtatgggatgaggagctcgccaagttcgcgggcttcgattataccctcgccgtgctggaaggttccggggcgaaaaaggccggcacgcttagacacctcaaaggagcgccgcttcaagtggcagtggtcaactacgaatcggcgtggcggctggaaaaagaaatcatggcgtggaagcctggtctggtaatagccgacgaagcccacaaaattaagacgcacgacaccgccgcttcaaaggccatgcaccatatcggcatgaaggcggcataccgcctgctgctcaccggcacggtcattactaataaggccatcgacgtgttcagccagtacaagtttttaaaccccgccatattcggagccagcttctacagcttccgaaataatacttcgatatggccgggtatggcaaccacaccccgatgctga

SEQ ID NO: 28266 - protein, 217 aa, Unknown
  Obtained from environmental sample
  DOMAIN (13)...(182): DEAD/DEAH box helicase
  misc_feature (1)..(217): Xaa is any amino acid
MFDMKMPIRAAPFAHQQAAFTAALEAFISGKSRGYALLMEMGTGKTITSIAIAGALYLDKRISSALIVAPLSILSVWDEELAKFAGFDYTLAVLEGSGAKKAGTLRHLKGAPLQVAVVNYESAWRLEKEIMAWKPGLVIADEAHKIKTHDTAASKAMHHIGMKAAYRLLLTGTVITNKAIDVFSQYKFLNPAIFGASFYSFRNNTSIWPGMATTPRC

SEQ ID NO: 28267 - DNA, 756 bp, Unknown
  Obtained from environmental sample
  misc_feature (1)..(756): n is a, c, g, or t
atgggaagcaaggaaaaaacggaactcgccccgcaaatcagcggtttcatggcgtttgcggacagcggttttatggccagggtcagggatgaactcagagggctggagatcgtgcccagaaaaatcaaaatcccctccggcggcgccacgatgttcgagatgccttccgaggacggcggcgagccggaaagcgtcaaagagttttcaggcgtcatactgcaccattatcccgtcaacgcgtattacaggaacaagtataccggcgcttcaagttttgccgactgcatgagcggcgacggcgtcaccggcacgggcgaccccgggggcagctgcgcggcctgcccgctgaacaagcgcggctcaggcaaaggcaaatactcgaaagcgtgccagaaccggcaccgcctgtacatcctgcgcgagggcgagttcataccgctggtgctgtcgctgccaaagggcagcctgacgccgtttacaaattaccttgtgagccatttgctcaggcataacgacgtcagcactttcgtgacgagtttcgggctgaaaaaggcgctgaacagcgaaggcacgctttattcgcaggcgacattcaggcaggagcgcgcgcttgcgccggaggaacgcgcagtcatagagaaaatgtcggagcagatcaaggaatacggcagcgcggcggcttttgacgacagcgacgactacgccgctgacccggagaccggcgaggtaatagaaggggactgccgcagtgtataa

SEQ ID NO: 28268 - protein, 251 aa, Unknown
  Obtained from environmental sample
  misc_feature (1)..(251): Xaa is any amino acid
MGSKEKTELAPQISGFMAFADSGFMARVRDELRGLEIVPRKIKIPSGGATMFEMPSEDGGEPESVKEFSGVILHHYPVNAYYRNKYTGASSFADCMSGDGVTGTGDPGGSCAACPLNKRGSGKGKYSKACQNRHRLYILREGEFIPLVLSLPKGSLTPFTNYLVSHLLRHNDVSTFVTSFGLKKALNSEGTLYSQATFRQERALAPEERAVIEKMSEQIKEYGSAAAFDDSDDYAADPETGEVIEGDCRSV

SEQ ID NO: 28269 - DNA, 900 bp, Unknown
  Obtained from environmental sample
  misc_feature (1)..(900): n is a, c, g, or t
gtggcgtcggcgttcctgctgtttgaacgcgaagccaatgagtacaagatagccaaaatgaacgcgagccgcgattcgctcctgaacgttttgcacaacctgcacgaggcgatcgcccgcatagagggcggccgcgcctacaaactggcgcaggagcttgaggtgagcagggccaagggagcgctgttgcagggtaaccttgaggcgaccaaggccgacttggccgcggaacgcgcccgcctccgcaaggtcatgcaggacgcccaaaagcgtttttccgagctccagagcgctctgatctccgtgagcaaagacgcgcgcggtaccatcatctccatggcggacattctcttcgagaccaacaaagcgacgctgaaacccgacctcaaggagagtttggccaagatcgcgggcatccttattgtctacaaggaaccgaacatcctgattgagggccacaccgacagcaccggcaccagggagcgcaaccaaaagctctccgaggagcgcgccggcgcggttatgagctacttgatcgagcagggcgtggcggaaacgcgtctgaccgccgcgggtctcggacccgacaagcccattgcggacaacaagaccaaagagggcagggccaagaacagacgggtcgacttggttatccaagaaaaacaattggacgaagatgtcgcggaagaagcttcggctccggctccggtccacacggctccggctccggctcacccggctccggctcacccggctccggccccagctccggctccggctcacccggctccggcaccggctcaggcaccagccccggctccggctcgtccggctccgggcccggctccggcaccagccccggctccggcaccagccccggctcaaccggccggaaagtaa

SEQ ID NO: 28270 - protein, 299 aa, Unknown
  Obtained from environmental sample
  DOMAIN (117)...(212): OmpA family
  misc_feature (1)..(299): Xaa is any amino acid
MASAFLLFEREANEYKIAKMNASRDSLLNVLHNLHEAIARIEGGRAYKLAQELEVSRAKGALLQGNLEATKADLAAERARLRKVMQDAQKRFSELQSALISVSKDARGTIISMADILFETNKATLKPDLKESLAKIAGILIVYKEPNILIEGHTDSTGTRERNQKLSEERAGAVMSYLIEQGVAETRLTAAGLGPDKPIADNKTKEGRAKNRRVDLVIQEKQLDEDVAEEASAPAPVHTAPAPAHPAPAHPAPAPAPAPAHPAPAPAQAPAPAPARPAPGPAPAPAPAPAPAPAQPAGK

SEQ ID NO: 28271 - DNA, 957 bp, Unknown
  Obtained from environmental sample
  misc_feature (1)..(957): n is a, c, g, or t
atgcagtacaattttgaaactgatgagcacaaggtaaaactgaaggaaggaagcgacggaaagatagacttcaaagaactcaacattatccagaatgtggtcgaaaaccagcccctggcggtaaaaatacctccggaaaatggcacttcgggctggactgtaaccggaaaaatgcttagcgcagaggacggcaaggagatcagtttgcctgttggaaccaatgttcatgtatcagaagacggcactactatccttgcagacataaacgggcaagtcgtgatgagcaacggccttatcaatgtcgagcctgtgtatacggttgacaacggagtgaatctgaaatcggggaatattgatttccgcggcactgtaatggttaacggcgatgtagaagacggcttcttcattaaggctgacggcaatattgaggttaacggaagcgtgggcaaggcagaccttcaggcggaaggcgacatcatcatccaccaggggataaacggaaaaggggaaggctacattcgttgcgggaaatccctttgggcgcgttttatacagaatgtcaatatccagtctggagacatggtggttgcttcagacggaattatcaactcaaatattactgcctataaccggataatatgccaggggaaacgggcggctataatgggaggaaaactgcgcgccggcgaggaaataaacgccaaaacacttggaaaccccacaagcggtacggaaacagtctgcgaagtcggttttgatccgaaagagcaggaagaaatggaaaggctccagatggagaaagataacgcgaataagctgcttgatgatatgaagccgaatatacagacccttatgaagctcaagcagcagaagagaacccttcctgaagataaagaaacccttttgccagatctgctgaaccaacgggatctgctgacaacggatcttaagagatag

SEQ ID NO: 28272 - protein, 318 aa, Unknown
  Obtained from environmental sample
  DOMAIN (1)...(318): Protein of unknown function (DUF342)
  misc_feature (1)..(318): Xaa is any amino acid
MQYNFETDEHKVKLKEGSDGKIDFKELNIIQNVVENQPLAVKIPPENGTSGWTVTGKMLSAEDGKEISLPVGTNVHVSEDGTTILADINGQVVMSNGLINVEPVYTVDNGVNLKSGNIDFRGTVMVNGDVEDGFFIKADGNIEVNGSVGKADLQAEGDIIIHQGINGKGEGYIRCGKSLWARFIQNVNIQSGDMVVASDGIINSNITAYNRIICQGKRAAIMGGKLRAGEEINAKTLGNPTSGTETVCEVGFDPKEQEEMERLQMEKDNANKLLDDMKPNIQTLMKLKQQKRTLPEDKETLLPDLLNQRDLLTTDLKR

SEQ ID NO: 28273 - DNA, 405 bp, Unknown
  Obtained from environmental sample
  misc_feature (1)..(405): n is a, c, g, or t
atgcgctttggagtaattgcaatacgatatttaataatacttggtaggatgcaaaaaggagttattatgtccggtgaatttcagcccgttaccgtcaacttaaaaaaagacgcttatatttttgtggaaggaaaacaccacgccgacaaattttatattatcaagcaaggcaaagtacggattatccgcgaagcgttaaccgatgaaacaggaagcgtgctaggccccggagatatgtttggcctgatttccgcaatggcggcgcatggctatattgaatcggcggtagccatgacagatgtcgccctgctggcagtagaacggaaacaatacggcagccttatccgcaaaattaattctttcgctatcgtcagcgtcaagaactttttcccaaaggcttcgtga

SEQ ID NO: 28274 - protein, 134 aa, Unknown
  Obtained from environmental sample
  DOMAIN (31)...(120): Cyclic nucleotide-binding domain
  misc_feature (1)..(134): Xaa is any amino acid
MRFGVIAIRYLIILGRMQKGVIMSGEFQPVTVNLKKDAYIFVEGKHHADKFYIIKQGKVRIIREALTDETGSVLGPGDMFGLISAMAAHGYIESAVAMTDVALLAVERKQYGSLIRKINSFAIVSVKNFFPKAS

SEQ ID NO: 28275 - DNA, 630 bp, Unknown
  Obtained from environmental sample
  misc_feature (1)..(630): n is a, c, g, or t
gtggaaataaaatatttaattgacgtttcacgtactttcggaccggaaaatgcaatgaataatttaaatctgatgttggaatacaaaagtgatgcaattataggcataggtctgggcggcgctgaaaaatcaggcccatcaaagaattatgcggaagtatttcaaaaagcgcacgaacatggaattcattntgtggctcattcaggagaagacatggggtgggaagagatcggtgaaacattaacttatcttgatccggaacgtatagggcacggaacaagtgcaattcaaaatcccaatctggttaaatatattgctgaaaataaaatccctcttgaaatatgccctacgagtaatttatttacacgcaaatatgtgtcagaaatagaaacacatcctgtaaaacaattttatgaaaacaatctttttgtaactattaattcagatgatcctgcgctgttttccacgtctcttgttgatgaatatatgctgctttttaataaaggagttttttctcaaaatgaaattcttgctcttataaaaaacaatatatatgccagctttttaaccgaagataaaaagaatgcgctttggagtaattgcaatacgatatttaataatacttggtag

SEQ ID NO: 28276 - protein, 209 aa, Unknown
  Obtained from environmental sample
  DOMAIN (1)...(200): Adenosine/AMP deaminase
  misc_feature (1)..(209): Xaa is any amino acid
MEIKYLIDVSRTFGPENAMNNLNLMLEYKSDAIIGIGLGGAEKSGPSKNYAEVFQKAHEHGIHXVAHSGEDMGWEEIGETLTYLDPERIGHGTSAIQNPNLVKYIAENKIPLEICPTSNLFTRKYVSEIETHPVKQFYENNLFVTINSDDPALFSTSLVDEYMLLFNKGVFSQNEILALIKNNIYASFLTEDKKNALWSNCNTIFNNTW

SEQ ID NO: 28277 - DNA, 717 bp, Unknown
  Obtained from environmental sample
  misc_feature (1)..(717): n is a, c, g, or t
atgggcactaaagttgtaatggtagcgagccacgatacggcttcggctgtagccacggtaaagaatgattccctgtatatcagttcaggcacatggagccttctgggcattacgggggatcctgtcttaagcgacgaagccagggaagcgggctacacaaacgagggtgcccacaatggtcgcatccgttttcttaaaaacattatgggcttatgggtccttcaatctgtccgccatgaactgaatgacgcgcatagttttatggaacttgaatccatggcgagggaggcggcaaaaacggcgccaaaagactgggcgatagatcttaacctgccgcaatttttcgcgccaaaaagcatgataggcgaaataaaaaacgaatactccaggcttggcaaaaaggttcccgaaaacccggcggaactggccttttcggtttatacaagccttgcgcaatgctataaaaccgcaatcgacgatcttgagaaaataaccgggaagaagtatccgtctatttcgattatcggaggcggcagcaaggattcatacctcaataccttgacagcggaatacactggtaaaaccgtttttgcgggcccgtcggaagcaaccgccgttgggaacatcctgctccagatgcaggcagcgggggatccggctgtcgaaggcggctttgagcaattggtggaaaggtcgtttgatataaaaaaaatctaa

SEQ ID NO: 28278 - protein, 238 aa, Unknown
  Obtained from environmental sample
  misc_feature (1)..(238): Xaa is any amino acid
MGTKVVMVASHDTASAVATVKNDSLYISSGTWSLLGITGDPVLSDEAREAGYTNEGAHNGRIRFLKNIMGLWVLQSVRHELNDAHSFMELESMAREAAKTAPKDWAIDLNLPQFFAPKSMIGEIKNEYSRLGKKVPENPAELAFSVYTSLAQCYKTAIDDLEKITGKKYPSISIIGGGSKDSYLNTLTAEYTGKTVFAGPSEATAVGNILLQMQAAGDPAVEGGFEQLVERSFDIKKI

SEQ ID NO: 28279 - DNA, 789 bp, Unknown
  Obtained from environmental sample
  misc_feature (1)..(789): n is a, c, g, or t
gtgaagataagactgcacaatagtccagttgtctgcgaagcggcggcgagggaaactattttattggcttgcgcccgcagcggcgtcattatatccgcgccctgtggcggacgcggacgctgcggcaaatgcagagtacgccttcttgaagggcaagtctgtggcgatatgcccgacgctgataaaatggtcagagcctgcatggctgtcccgctttctgacatcaccattgcctgtgccgcttccggggacttggacgctgccggtgtactccctgccgaaagggaacaccacgcgcgtgccggaatcgcgcttgacattggcacaaccacggtttcagccaggctggttgatttggatactttgtcggcaattgatacaatttcggaattgaacgatcagcggcttttcggcgcggacgtaataagccgcataggagtggcgaaaaacggaaaaacagaagcgcttttttcacttataaaccgtcagacagaacggatcattaactcctttaagaaaaaatgggacattccaaaaattgaaaaactcgcggtcgccggcaatactacaatgcagcacctcttccttaatgttgatccttcaggtatgggggaactgccatttacgccggtatttctcgaaggaaaagtgttattgggagaagccctttcgctttccgtggaaagcgtaaccgttcttccttccatttcggcttttgtcggtgccgatataagcgcgggacttaccgtgcttgatattctaaatgtaccgggaccgtcttttttatga

SEQ ID NO: 28280 - protein, 262 aa, Unknown
  Obtained from environmental sample
  DOMAIN (3)...(73): 2Fe-2S iron-sulfur cluster binding domain
  misc_feature (1)..(262): Xaa is any amino acid
MKIRLHNSPVVCEAAARETILLACARSGVIISAPCGGRGRCGKCRVRLLEGQVCGDMPDADKMVRACMAVPLSDITIACAASGDLDAAGVLPAEREHHARAGIALDIGTTTVSARLVDLDTLSAIDTISELNDQRLFGADVISRIGVAKNGKTEALFSLINRQTERIINSFKKKWDIPKIEKLAVAGNTTMQHLFLNVDPSGMGELPFTPVFLEGKVLLGEALSLSVESVTVLPSISAFVGADISAGLTVLDILNVPGPSFL

SEQ ID NO: 28281 - DNA, 531 bp, Unknown
  Obtained from environmental sample
  misc_feature (1)..(531): n is a, c, g, or t
atgcttaaaccttatgatttactcgagaatatactgcttgatattgaaaatggcattaaaaacaatataaatgcgtctattctctcaaaaaaatacggtttttcggaaggtcatttacgcagattatttagttttgcctttaaacaatccatcgccgcctatatacgttcccgcacattagcggcaagcctttacaatatattggaaacggatactaatattcttaatattgcggctgaatacggttttgaatatgaacagtcatatatcaggacttttaagcgtgaatttggaataactcccggtgatttgcgtaaaaaaggtaagataataaaaattaaaccgccgcttcatcttttggacaaaaaaagggtggataacggagttttgtttggacccgattttgtaatggttccacagtttcatgttataggtaaacgctgccgtttatcatttaaagatttatgcactgaaccgttactggcgaagcaattcctggaaaatgaacgcaggcaaataaagaaaacgtaa

SEQ ID NO: 28282 - protein, 176 aa, Unknown
  Obtained from environmental sample
  DOMAIN (60)...(106): Bacterial regulatory helix-turn-helix proteins, AraC family
  misc_feature (1)..(176): Xaa is any amino acid
MLKPYDLLENILLDIENGIKNNINASILSKKYGFSEGHLRRLFSFAFKQSIAAYIRSRTLAASLYNILETDTNILNIAAEYGFEYEQSYIRTFKREFGITPGDLRKKGKIIKIKPPLHLLDKKRVDNGVLFGPDFVMVPQFHVIGKRCRLSFKDLCTEPLLAKQFLENERRQIKKT

SEQ ID NO: 28283 - DNA, 1236 bp, Unknown
  Obtained from environmental sample
  misc_feature (1)..(1236): n is a, c, g, or t
atgctggaggaggtccgcaacaacgccctctccggcgctatggggcgtgttcgcgacccggcgtcggcgcggagggatcacgccaataagagcatcgccgccgagggcgccgccgtgcccgtgggcgtcggtacccgaacaatgcggatagacggcggcgcgtcgtccgtcgataccatatcgctcctcaacgtaggcggcgacggcgtgaacgcgcaactcaaatctatgctctactttatgcgctacaacttcaaatgcctcaccgcgagcgccttcatatacgacccgtcaaagaacaacctgacgctcaactgctatgagacaaagatgggcgtgcagatagtggaaaacgcgcagataccgataggcgtcggcgtaataggccaggtagccggcggcaacaagctattcatgagcggcgatctgtcgctctatcagggcggcgagcagccctactacgccaagagcgagggcgtcaactccatactcgccgcgcccattgtcgccgaaggcagcaatgaactgataggcgtgcttgccgtagacagcataaacaaaaacgcattcagcgaacacgacaaagagcagatgaaccgcttcaccaaaatcgccgccgcgctcatagtgaacatccgtatgcgcgtctcgctggagcacgcggccaaaaccttcaacgccctgtacgaactcgggcacaacctctccgtggcgttgaaaccggaggagatattcaaggctatcctagacgtggtgcctaaggccgtccccgcttgttcgcggctggttatagcccttcacgaccgcgagaggaattccataagactgcagcacatcggcggcgcggccggggaactagcagaggggatggagttctcgacggccacaggcggcatatacgcctacgcgttcaacaagtgctgcccggtgaatgtcggcgacgtgcaggcgaagagaaactaccgcttcgtccccgaagaaccgcagaacccgaacgtccgctcgctcttaatcataccggtcttcggcggcgaggaacgcagatgcgtaggcctcttctccgccgagagcgccacgccggagttcttcaagcccgatttggaacagatacttaatactatggtggagaacgcctcggtagccctcaccaggtctatgctgtacttgaagatggagaaactggccacgaccgacggcctgaccggcctaaacaaccaccgcaccttccagagatag

SEQ ID NO: 28284 - protein, 411 aa, Unknown
  Obtained from environmental sample
  DOMAIN (69)...(209): GAF domain
  misc_feature (1)..(411): Xaa is any amino acid
MLEEVRNNALSGAMGRVRDPASARRDHANKSIAAEGAAVPVGVGTRTMRIDGGASSVDTISLLNVGGDGVNAQLKSMLYFMRYNFKCLTASAFIYDPSKNNLTLNCYETKMGVQIVENAQIPIGVGVIGQVAGGNKLFMSGDLSLYQGGEQPYYAKSEGVNSILAAPIVAEGSNELIGVLAVDSINKNAFSEHDKEQMNRFTKIAAALIVNIRMRVSLEHAAKTFNALYELGHNLSVALKPEEIFKAILDVVPKAVPACSRLVIALHDRERNSIRLQHIGGAAGELAEGMEFSTATGGIYAYAFNKCCPVNVGDVQAKRNYRFVPEEPQNPNVRSLLIIPVFGGEERRCVGLFSAESATPEFFKPDLEQILNTMVENASVALTRSMLYLKMEKLATTDGLTGLNNHRTFQR

SEQ ID NO: 28285 - DNA, 732 bp, Unknown
  Obtained from environmental sample
  misc_feature (1)..(732): n is a, c, g, or t
ttggtcagaattcggcacgagacgaaatacggaaaattctctgactattggtacgataccgccaccacgtatttccttgtgaggttggtcgaaaagaaaaagatcaacgtcctgaatatgaacaatatgctggtcagaaatatagacttcagcaaatacgatatagatcacatgacggccgcgccgattttgtgccaagccggttacctcacgatctccggctacaacgcggaaacgggcgtgtacacgctcgacttcccaaacaccgaggtacgcgccgccttcgccggaacgcttgtcagacactatgtaggggcggcggacgaggatagactggacttaaaactactaagcgcaatcgccgagggcgatttagatacggcaatggataccctgaaccgtttcttcgccacaatcccatacgagatcgtcgtcgaaaaggaaatgtacttccaaacggtagttcacctgctcttcacaatgctgaacctcaactgccgctcggaagtacgtattgcgaccggacggatcgacacattggtggaaacgcggaatttcgtctactgcttcgagttcaaactaaacggcaccgcggaggcggcgctcgcgcagatcgacaccaaagaatacgccgttccttggacagggcgcgggaagaaggtctttaaggtcggggtgaactttgactttgagaagaggaatatcggggagtgggtgtatgcggcgggttga

SEQ ID NO: 28286 - protein, 243 aa, Unknown
  Obtained from environmental sample
  DOMAIN (1)...(238): Protein of unknown function (DUF1703)
  misc_feature (1)..(243): Xaa is any amino acid
MVRIRHETKYGKFSDYWYDTATTYFLVRLVEKKKINVLNMNNMLVRNIDFSKYDIDHMTAAPILCQAGYLTISGYNAETGVYTLDFPNTEVRAAFAGTLVRHYVGAADEDRLDLKLLSAIAEGDLDTAMDTLNRFFATIPYEIVVEKEMYFQTVVHLLFTMLNLNCRSEVRIATGRIDTLVETRNFVYCFEFKLNGTAEAALAQIDTKEYAVPWTGRGKKVFKVGVNFDFEKRNIGEWVYAAG

SEQ ID NO: 28287 - DNA, 318 bp, Unknown
  Obtained from environmental sample
  misc_feature (1)..(318): n is a, c, g, or t
gtgtgggaaatggatcttgccagggacgcctattgggaactaacggaatatttccgccgccatgatccccgccacgaacgggaggacgaggtctttacaaaactgggctacatcgacatccagttcctggccccgaaagtaaaggcggaagtactcatgcagaccgggctcatggatacggtctgtccgccctcaagccagtttgcggcgtacaataaaatcagctcccccaagaaaattcttatatacccggactttgcccacgaggaagcgcccggacattgggataccattttaaccttcatgaccgggctgtaa

SEQ ID NO: 28288 - protein, 105 aa, Unknown
  Obtained from environmental sample
  DOMAIN (1)...(105): Acetyl xylan esterase (AXE1)
  misc_feature (1)..(105): Xaa is any amino acid
MWEMDLARDAYWELTEYFRRHDPRHEREDEVFTKLGYIDIQFLAPKVKAEVLMQTGLMDTVCPPSSQFAAYNKISSPKKILIYPDFAHEEAPGHWDTILTFMTGL

SEQ ID NO: 28289 - DNA, 453 bp, Unknown
  Obtained from environmental sample
  misc_feature (1)..(453): n is a, c, g, or t
gtggatgccatgctggccgccatggaaaacatgaacccgccgccgagacccgataggacgcagcttcagagaagcgcggttcccctccggtacgcccggccggcggagaagaagacggaggccatgaaaacttttcttgctttggtaaatgagtccggggattcgtcatgggagcttttgcaaaacatctattccccaaaaaatcccggcgtgcaggggctggccctggccctcgccctgaccaaaagatttttcaatggcagcgatccccatggcgcttgtaacggcgcttgccgggtacacggcggcggatttgccggaaccatccagacttaccttccccttgaacggctggaggattaccggaaatttatcgaagcaatctacggaagcggggcgctcacggtcttaaggatacgaactctgggagccgcggaactggaatttccgtga

SEQ ID NO: 28290 - protein, 150 aa, Unknown
  Obtained from environmental sample
  misc_feature (1)..(150): Xaa is any amino acid
MDAMLAAMENMNPPPRPDRTQLQRSAVPLRYARPAEKKTEAMKTFLALVNESGDSSWELLQNIYSPKNPGVQGLALALALTKRFFNGSDPHGACNGACRVHGGGFAGTIQTYLPLERLEDYRKFIEAIYGSGALTVLRIRTLGAAELEFP

SEQ ID NO: 28291 - DNA, 816 bp, Unknown
  Obtained from environmental sample
  misc_feature (1)..(816): n is a, c, g, or t
ttgccgccggttgcttttaataaaccgccggaaacaaagccgcctccagctcctcaaggaaatcaacagatgccggccgctaacgctcaaaagccgactcaccttagttcaccattagtccctcaggtcgaaggcagcctgtttgctcaaagttcttatcaaaacgtcgcaacgcggccaaattcaaacgatacttcatccgcagctcaaacggctcgtaatccttacggacaatcttctctggtaaacgattacgtctctcaaaacgaccagcagaataaacaggacttctttaacccggcttccggcggcggcgcggtctctaacggcaggttcatcggcgctaacgccgtctggattggcactattattccgggcatactcgaaacttccatcaatacggaccttccgggtaacgtcctcgcgcgcgttactcaaaatatttttgactcaaaatctggccgtaatttacttattccccagggaactatccttattgcacgctacaacagctctatttcttacgctcagaaaagaattcaaatcgtttgggatacaatgattcgtccggacggattccagatcgaccttgagggcgcaggcggcgtcgatagatccggcatgagcggacagccggccaaagtccacgaaaattggtttgaataccttaaagcggccggcattatcactctcttttcttacgctaacgctaaaatgaccgaaaccgccgccaattatacttcggaagattcttcttctaacctcgccgcttctaacgccgatttgtcggcgaactggcggcctcggccgatctga

SEQ ID NO: 28292 - protein, 271 aa, Unknown
  Obtained from environmental sample
  DOMAIN (118)...(270): Bacterial conjugation TrbI-like protein
  misc_feature (1)..(271): Xaa is any amino acid
MPPVAFNKPPETKPPPAPQGNQQMPAANAQKPTHLSSPLVPQVEGSLFAQSSYQNVATRPNSNDTSSAAQTARNPYGQSSLVNDYVSQNDQQNKQDFFNPASGGGAVSNGRFIGANAVWIGTIIPGILETSINTDLPGNVLARVTQNIFDSKSGRNLLIPQGTILIARYNSSISYAQKRIQIVWDTMIRPDGFQIDLEGAGGVDRSGMSGQPAKVHENWFEYLKAAGIITLFSYANAKMTETAANYTSEDSSSNLAASNADLSANWRPRPI

SEQ ID NO: 28293 - DNA, 435 bp, Unknown
  Obtained from environmental sample
  misc_feature (1)..(435): n is a, c, g, or t
ttgtacggtagctggaattcaagtccggggcttactgcctcacccgcgattgccgaatatgtaaaaaacattttagttgatattggcttgcagctaacggagaaaccgcactggaatccatacgtggaaaaccacccgaaggcgagagaacttgaatttaaagagcttgatgattatatcgccaaagattccacatggggcagtattgtctgtcgctgtgaaaatgtcagcgaagctgagattattcaggctgtaagattgggacacacgacattggacggagtaaaatattttacccgcgcccaaatgggacgctgtcagggcggcttttgcacttacaagataataaaaataattatgagggaagctaatctttcctgggaagaagttacaaaacacggcggaaaaagcagaatattggacggtgtgctatga

SEQ ID NO: 28294 - protein, 144 aa, Unknown
  Obtained from environmental sample
  DOMAIN (68)...(123): BFD-like [2Fe-2S] binding domain
  misc_feature (1)..(144): Xaa is any amino acid
MYGSWNSSPGLTASPAIAEYVKNILVDIGLQLTEKPHWNPYVENHPKARELEFKELDDYIAKDSTWGSIVCRCENVSEAEIIQAVRLGHTTLDGVKYFTRAQMGRCQGGFCTYKIIKIIMREANLSWEEVTKHGGKSRILDGVL

SEQ ID NO: 28295 - DNA, 456 bp, Unknown
  Obtained from environmental sample
  misc_feature (1)..(456): n is a, c, g, or t
atgaaagaactccaatatgatgcggcggtaatcggcggaggagccgcaggaatggcggctgctcttgaactggaagaacaaggttttacttgcgcgttaatcgacagggaagatcaccttggcggcattcttatgcagtgcattcataacggttttggcttgcatgaattttcagaagaactgacaggtcctgaatttgccgagcgttttattgagcgcgtaataaaatcaaagatcgcggtttaccttgacacgaccgttacgcgcttttcacaagataattcttcaccgcaggtaaaagaattatactgcgtatctcccaaaggtgcggtaaaaataaaaacacgcgccgtactgcttgcgatgggctgccgtgaaaagaaccgtggtaatgtccgcattcccggctcccgaccggcgggatttataccgcaggtcttgcgcagcgccttgtga

SEQ ID NO: 28296 - protein, 151 aa, Unknown
  Obtained from environmental sample
  SIGNAL (1)...(21)
  misc_feature (1)..(151): Xaa is any amino acid
MKELQYDAAVIGGGAAGMAAALELEEQGFTCALIDREDHLGGILMQCIHNGFGLHEFSEELTGPEFAERFIERVIKSKIAVYLDTTVTRFSQDNSSPQVKELYCVSPKGAVKIKTRAVLLAMGCREKNRGNVRIPGSRPAGFIPQVLRSAL

SEQ ID NO: 28297 - DNA, 810 bp, Unknown
  Obtained from environmental sample
  misc_feature (1)..(810): n is a, c, g, or t
gtgaatgtcgaaggatacattccgggaagagaggctgtaattataggttcaggcgatatcgttttaattatggcaagacgcatgagctgggcaggctgcaaagtaaaagccgtagtggaaattatgccgtatcccgcaggacttacgcgtaacatcgttcagtgccttaatgattttaacattccgctttatctttcgtcccagaccacaggtattttcggcaacgatcgtgtggagggaatcgaggttactccaatggaaaacggcgtacttgttcaagaaaaaagtttccttatagactgcgacacagttctgctgtcagtaggccttattcccgaaaacgagctttccaaaaccgcaggagtagaattaaacaacgtaacgaacggtcccttcgtggattctactcttatgacaaatatggacggagtttttgcctgcgggaacgtacttcatgtccacgaccttgttgactgggtttgcgaagaaagccgccgcgcggggcgtcatgctgttcaatggctgcgcggggatcgtcctttattgcaaatacgcgcacgagccggttcaaatgtgcgttatgtgaaccccgcgcggattgcgcctgatcgtgaaaaccacatttacctccgttccatgattgtaaaaaacgacgccgtcatggaaatacgccttgataaccgcgtaatccgcattaaaaaagagcgtcacgttcagccttcggaaatgataaattttaagttatctccgaaagattttgaaggaattgaagcaaactcagattccgttttggagttcgtaattaattag

SEQ ID NO: 28298 - protein, 269 aa, Unknown
  Obtained from environmental sample
  misc_feature (1)..(269): Xaa is any amino acid
MNVEGYIPGREAVIIGSGDIVLIMARRMSWAGCKVKAVVEIMPYPAGLTRNIVQCLNDFNIPLYLSSQTTGIFGNDRVEGIEVTPMENGVLVQEKSFLIDCDTVLLSVGLIPENELSKTAGVELNNVTNGPFVDSTLMTNMDGVFACGNVLHVHDLVDWVCEESRRAGRHAVQWLRGDRPLLQIRARAGSNVRYVNPARIAPDRENHIYLRSMIVKNDAVMEIRLDNRVIRIKKERHVQPSEMINFKLSPKDFEGIEANSDSVLEFVIN

SEQ ID NO: 28299 - DNA, 360 bp, Unknown
  Obtained from environmental sample
  misc_feature (1)..(360): n is a, c, g, or t
ttgctaatcgaactctccggcgcggtgaccaccgtgtcaggtacggcaagggttacctcggcaaacacaaacaccgcacaaggtacgatttatcttatggatagctcctacggatctgtcaccaaaatactgctggaaataaccggcggcagggtagaaaacacctcgaccactaccggcaacgctatacgcaacgattcgaacggcgcggtaagcattacaggcggcgcggtttctaaagccggtagtagcggctatgcggtgaataacgcaggtgaaggtgcggtaactataaagaaccctcccgccgtgactattaccgggaataacaccggtagtaatatcaccttcgtgccgtag

SEQ ID NO: 28300 - protein, 119 aa, Unknown
  Obtained from environmental sample
  SIGNAL (1)...(21)
  misc_feature (1)..(119): Xaa is any amino acid
MLIELSGAVTTVSGTARVTSANTNTAQGTIYLMDSSYGSVTKILLEITGGRVENTSTTTGNAIRNDSNGAVSITGGAVSKAGSSGYAVNNAGEGAVTIKNPPAVTITGNNTGSNITFVP

SEQ ID NO: 28301 - DNA, 678 bp, Unknown
  Obtained from environmental sample
  misc_feature (1)..(678): n is a, c, g, or t
atgggtattctggatgtaaaagtcagcaccaaaacaggcaaaattatcgacattgaaatacaagtaaatcccttattgtatattggggagcggatttcattttataagtcaagattaatagtagatcaaataggcaagggcgagcattacgataaaatacagcgggtaatctgtgtatgtataacggaccatgtaatacataaagaagacaatcggtatttgaattatttttgtttttgcaatcctgaaaccggattgcgttttaagggaatccctgaagaaatttttacattggagcttcccaaagttccggcagataaagacgggaacaaggtatgggactggctacaattcctgcgtgcaaggcagaaaggagaatttgatatgatagcaacggcaaatcctgaaatacggaaagcggtagacttactgtacgagataagcgcggatgataaaataagggcggagtataacgcgcggcaaaaagcctggatggacaggcaatcgcaatttgacggctattataaggaaggcaaagcggaaggcagagcggaaggcaaagcagaaggcaaaattgaaatcgcccgtaacctgaaatcattgggcgtttcaacggatataattatcaaatcgacgggcttatctcccgaagaaatagccaaattgtctgaccgctaa

SEQ ID NO: 28302 - protein, 225 aa, Unknown
  Obtained from environmental sample
  misc_feature (1)..(225): Xaa is any amino acid
MGILDVKVSTKTGKIIDIEIQVNPLLYIGERISFYKSRLIVDQIGKGEHYDKIQRVICVCITDHVIHKEDNRYLNYFCFCNPETGLRFKGIPEEIFTLELPKVPADKDGNKVWDWLQFLRARQKGEFDMIATANPEIRKAVDLLYEISADDKIRAEYNARQKAWMDRQSQFDGYYKEGKAEGRAEGKAEGKIEIARNLKSLGVSTDIIIKSTGLSPEEIAKLSDR

SEQ ID NO: 28303 - DNA, 1506 bp, Unknown
  Obtained from environmental sample
  misc_feature (1)..(1506): n is a, c, g, or t
atgcccgacaccaaagaccccttcgatgccattgacgccatcgatacagaaacaaccgcagtcgacgacgagacgcgcgagatcgacgcctccgccgacgccgcccccgcgccccaggaagcggagaacataggggtcacagacctaacgatcgacgaggatcgcagcgacccaaaagacgaagacaacagcgaccccgaagatttcgacccgttcgccgaattaaccgacttggtcgaaaagcgccgctggatcgacctccgccgcgaactctcctccatgccgcccccggacgtcgccgaattcgtcagccgcctctcgggaacgcagcgcacgctggtcgtgcgttttctgccccgctactgcgccgccgacgtcttctcggaactcccgctggcaattcaagacgagatactgaccgacctgaccaacacggagatacgcaacctcctgtccgacttggacccggacgaccgcgccgcccttatggacgagatgccggcctccatgacgcgcaaactgctcaacctcctcagcccgcaagaccttaaactgacccgcgaactcctgggctacccggaggacagcgtgggcaggatcatgacgccgaacatcgtctacatcaaggagcgttggacggtccgccaagcggtggatcacatccgaaccttcgggcgcgacagcgagactatcaacgtggtctatataacggactccaccgggcgtctgatagacgacatcgccttaagcaagctggtcatggccgaccctaacaaagagatacaggagatcatggactacaacttcatagcgatctccgccacagagagccagaaaaaagctgtggagatgatacggaagtacaactacttcgcgctgccggtggtggactccgtcggcgtgatcctcggtattgtgaccgtcgacgacctcatggacatagccgacacccacgcgacggaggacttccaccgtatcggcgccatcagcgtcatgtccgaggacggcccgatagaggatctcaaggaggcctcaccctggctgctttacagacggcgtatcgtgtggctggtgcttttggtcttcgtaaacgtgttttccggcgcggcgctctccttctttgaggacactatcgccgcgaagacggtgctggtgttcttccttaccctgcttataggcagcggcggcaacaccggctcgcagtcggccacgctcatggtccgcgccctcgccaccggcgacgtaaagatgaaagactggagcaggatgctcctgaaggagttgtctgtcgccggcgccttgggcggcgtgatggccggagccgccgcggtgcttggggtgttcaggggcggtatgacagacggcccgaaattagccgcagtagttgcaatatcaatgttcctgatagtgatcgccggaagcctgataggcatgtcgctgccgttcatcctcaagtgttcaaaaaagaccccgcgatggcgagttcgccccttgtggcgagcatag

SEQ ID NO: 28304 - protein, 501 aa, Unknown
  Obtained from environmental sample
  DOMAIN (387)...(491): Divalent cation transporter
  misc_feature (1)..(501): Xaa is any amino acid
MPDTKDPFDAIDAIDTETTAVDDETREIDASADAAPAPQEAENIGVTDLTIDEDRSDPKDEDNSDPEDFDPFAELTDLVEKRRWIDLRRELSSMPPPDVAEFVSRLSGTQRTLVVRFLPRYCAADVFSELPLAIQDEILTDLTNTEIRNLLSDLDPDDRAALMDEMPASMTRKLLNLLSPQDLKLTRELLGYPEDSVGRIMTPNIVYIKERWTVRQAVDHIRTFGRDSETINVVYITDSTGRLIDDIALSKLVMADPNKEIQEIMDYNFIAISATESQKKAVEMIRKYNYFALPVVDSVGVILGIVTVDDLMDIADTHATEDFHRIGAISVMSEDGPIEDLKEASPWLLYRRRIVWLVLLVFVNVFSGAALSFFEDTIAAKTVLVFFLTLLIGSGGNTGSQSATLMVRALATGDVKMKDWSRMLLKELSVAGALGGVMAGAAAVLGVFRGGMTDGPKLAAVVAISMFLIVIAGSLIGMSLPFILKCSKKTPRWRVRPLWRA

SEQ ID NO: 28305 - DNA, 705 bp, Unknown
  Obtained from environmental sample
  misc_feature (1)..(705): n is a, c, g, or t
atggtgcgttattatgaacccgcggaaaaatacggctttgcccctgatgagctgggcaaggttgtatttttcaatatttccgcctttggaacgccgattaaaacggcaatttttttgggagggcaggaatttgaaacatggtcgggtttttttatgaagctgcacgggaggacggacatacccggctgggatgaagggctgtaccgccgcatactgaaagaaaagcggctttttctgctgccggaattaacgcccggttcggggcagttccccggttccagggcgcgtatcgttgcggatgggaaaaattattttttcaataccgcggattcgcgcagctgccctgcggggtatgaggaattattcgcggccctgcgaatagcgctggttatgcagaccatcaccgcgctggaacgtgccggcattgaaaagggtaacgaagtgtacaccgagggcggtttccgcaaggatgaatcctacagccgcctgcttgcctcggcgcttgcggacaaccgggcgtatgtcaccaatattgccgaggccacggctctgggagcggctatgaccgctaaaatggctctgacaggaaaatccctgaaagacctgtcgggggattttgaagttggttaccaagaagccggaaagaacgacatacccgaacttttctcctacagggacgcgtggattgcagaagttgaaaaataa

SEQ ID NO: 28306 - protein, 234 aa, Unknown
  Obtained from environmental sample
  misc_feature (1)..(234): Xaa is any amino acid
MVRYYEPAEKYGFAPDELGKVVFFNISAFGTPIKTAIFLGGQEFETWSGFFMKLHGRTDIPGWDEGLYRRILKEKRLFLLPELTPGSGQFPGSRARIVADGKNYFFNTADSRSCPAGYEELFAALRIALVMQTITALERAGIEKGNEVYTEGGFRKDESYSRLLASALADNRAYVTNIAEATALGAAMTAKMALTGKSLKDLSGDFEVGYQEAGKNDIPELFSYRDAWIAEVEK

SEQ ID NO: 28307 - DNA, 834 bp, Unknown
  Obtained from environmental sample
  misc_feature (1)..(834): n is a, c, g, or t
gtgcaggatatgagcgatactgaaatccccgccgacgtgcaggaaaagctgctgcggttcggcagagctgcgctggcggcggccacaatgcggggcaagagttatctgcaaatcggctcaatctgcatgggcatcgccggttccattgtcaatcccgaattctttgaggaatatctggggatgagggtcgaaagcgtcgatgaagttgaaatcatccgccgtatggaaaagggcatctacaacgaacaggaattcaaaaaagcgctcgcgtggacaaaacaatactgcaaggaaggctttgacaaaaatcccgccgagttacagcgctcccggcaggagcaggacgcggcgtgggaatttgtcgttaagatgatgtgcatcatcaaagaccttttcaacggcaatcccaacctgcccgcaggctgcgaagaagagaggctgggacataacgcgatcgccggcggcttccagggccagcgccagtggacggacttttaccccaactgcgacttccccgaatccatgatgtgttcctcttttgattgggaaggcgcgcgggagccgtatattctggcaaccgaaaacgacaccctcaacggcgttggaatgttattcggaaaactcctgaccgggactgcgcaaatcttcgccgacgtgcgtacctactggagtcccgacgcggttaagcgcgtaacaggttatgaattgacgggcaaagcgaaggaagcgggaggtttcatacatctaatcaactcangggcggcttgtgtggacgcttcangggaaatgaaagattcaagaggcaaagcccttattaaccgttctgggaagtaa

SEQ ID NO: 28308 - protein, 277 aa, Unknown
  Obtained from environmental sample
  DOMAIN (33)...(212): L-fucose isomerase, second N-terminal domain
  misc_feature (1)..(277): Xaa is any amino acid
MQDMSDTEIPADVQEKLLRFGRAALAAATMRGKSYLQIGSICMGIAGSIVNPEFFEEYLGMRVESVDEVEIIRRMEKGIYNEQEFKKALAWTKQYCKEGFDKNPAELQRSRQEQDAAWEFVVKMMCIIKDLFNGNPNLPAGCEEERLGHNAIAGGFQGQRQWTDFYPNCDFPESMMCSSFDWEGAREPYILATENDTLNGVGMLFGKLLTGTAQIFADVRTYWSPDAVKRVTGYELTGKAKEAGGFIHLINSXAACVDASXEMKDSRGKALINRSGK

SEQ ID NO: 28309 - DNA, 375 bp, Unknown
  Obtained from environmental sample
  misc_feature (1)..(375): n is a, c, g, or t
ttgccaatcggttttaattcatttataataaaaaaacctaaaatttcggagaaaaccatgacagaggaaaatcttgaaattacccaaaatattaaagacggaatatgcagaatttctttgaaaggccgtgtcgattccaatacttcagaccttttgcttacaaaacttgaaaccgccatagaagaagggaacaagaatataattcttaatatgtatcatgttcagtatcttagttctatcggaataaggataatcttaaaaacctataaaagtctttcagaagaagatggatcatttaaaattgagcatccgtctgaaactgtaaagaatgttttaggtatggttgcccttcaggaaatgcttgtaacaaattaa

SEQ ID NO: 28310 - protein, 124 aa, Unknown
  Obtained from environmental sample
  DOMAIN (26)...(122): STAS domain
  misc_feature (1)..(124): Xaa is any amino acid
MPIGFNSFIIKKPKISEKTMTEENLEITQNIKDGICRISLKGRVDSNTSDLLLTKLETAIEEGNKNIILNMYHVQYLSSIGIRIILKTYKSLSEEDGSFKIEHPSETVKNVLGMVALQEMLVTN

SEQ ID NO: 28311 - DNA, 855 bp, Unknown
  Obtained from environmental sample
  misc_feature (1)..(855): n is a, c, g, or t
ttgcaggaaatattcgcttttaaatacggaaagggcaggcacacaattgtaactcttaacggaagtttccacggcaggacaattacaacgcttgcggcgacagggcaggagaaatttcacaaggactttggtccctttacggaaggttttgttcatattcagggcggcgatattgaggctcttgacaaagcgctggacggaaaaaccgtagccggtcttttaattgaagcggtgcagggagagagtggcatagtcccgcaaagcgaggaatttataacggcagccgcaaagttatgcgcacaaagggatatactgttaatctttgatgaaatccagtgcggcatgggcagaaccggaactttccttgcccttgaacagtacaacgtaaaagccgacattgttacccttgccaaaggtcttgcaggcggtattcccgcaggcgcagtccttgcgggagataaggctgcggatgtttttgttgtaggagatcacggcagcacattcggcggaaacccggttgccgcggcagcggggattgtcgttcttgagaccgtgaataatcccgatttcttaaaagaaaataaacgaaagggcgaaaaaattttagcggcgctaaaaaagcaccctaaagtgaaggaagcgcggggaagaggccttatgacaggctttgacattgaaggcgacagttgggcgtttttggaagcgggcatcgcaagagcggataaagcaaaaaaccaatgcggtcttcttatgctgtcgtcgggacctaatacgataaggttattgccgccatactgcataaccgacgatgaaatagagaaagggctgacgatactgtctgagttgttgggttga

SEQ ID NO: 28312 - protein, 284 aa, Unknown
  Obtained from environmental sample
  DOMAIN (1)...(227): Aminotransferase class-III
  misc_feature (1)..(284): Xaa is any amino acid
MQEIFAFKYGKGRHTIVTLNGSFHGRTITTLAATGQEKFHKDFGPFTEGFVHIQGGDIEALDKALDGKTVAGLLIEAVQGESGIVPQSEEFITAAAKLCAQRDILLIFDEIQCGMGRTGTFLALEQYNVKADIVTLAKGLAGGIPAGAVLAGDKAADVFVVGDHGSTFGGNPVAAAAGIVVLETVNNPDFLKENKRKGEKILAALKKHPKVKEARGRGLMTGFDIEGDSWAFLEAGIARADKAKNQCGLLMLSSGPNTIRLLPPYCITDDEIEKGLTILSELLG

SEQ ID NO: 28313 - DNA, 777 bp, Unknown
  Obtained from environmental sample
  misc_feature (1)..(777): n is a, c, g, or t
ttggactttgcccaagttatggcggaattttaccactactgcgcaagtttccacggctggcaatcggcggaacaggacgaaaaaacattggcggaaatggaacacgatttttcccgctcgcactggaccgcgatttgtcccgcccctgttcccggcgcggaaatatttttgcaggcgctggatttcgacggcgggaaaaagcgttatggtcttcatgaggcatttgactattttgtgcaattttccgccgaagacggaaccgcctcttatacgtttcttttctatctttttaaattcttaaaccttatttgcacagccggcgctttcatcccctttgttttatctgaagatgaaactttaaaaatcgtctggcgcccttttgaaacagtcccgcccgtttccggcattttaaaggcaatcgctgtccgtgaatgcggattattcacggtaaaaaacaacaggaaaaaagagcaaattataagcggacaaagcgcggttgatattctgtcttgcgcgtttttaaacgaatggattcggcggaaatttatttttatacggagtaactttaacaaacacggaactgacgaagaataccgcgaactgttgaatttgttttttcaaggttttcgcattgacgtttccgcccccgctcaaaggtctttacccacggcaattgaccgctggctgtcggtactgcacattgattttacggcttatcaatatgcccttacggtgaaagagtatggcataaaaaagacaggtaaaaaccgaggataa

SEQ ID NO: 28314 - protein, 258 aa, Unknown
  Obtained from environmental sample
  misc_feature (1)..(258): Xaa is any amino acid
MDFAQVMAEFYHYCASFHGWQSAEQDEKTLAEMEHDFSRSHWTAICPAPVPGAEIFLQALDFDGGKKRYGLHEAFDYFVQFSAEDGTASYTFLFYLFKFLNLICTAGAFIPFVLSEDETLKIVWRPFETVPPVSGILKAIAVRECGLFTVKNNRKKEQIISGQSAVDILSCAFLNEWIRRKFIFIRSNFNKHGTDEEYRELLNLFFQGFRIDVSAPAQRSLPTAIDRWLSVLHIDFTAYQYALTVKEYGIKKTGKNRG

SEQ ID NO: 28315 - DNA, 1116 bp, Unknown
  Obtained from environmental sample
  misc_feature (1)..(1116): n is a, c, g, or t
gtgcgccttacggaaaaagtaaacgacatatgtaccctgcaaatttctgtaaccgataccggaatcggcataactcccgaacagcaaaaaagattgttccagtcttttgagcaggcggaatccagcacaacccgtaaatacggcggtacgggcttgggccttgcgatttcaaaaaacatagtagaaatgatgggcggtagtatttggatacaatcagaacccggaaaaggttctacatttacttttacgattcaactggagcgcggcaaggaagaaaagcagaaacgtttgctggatgttagtttaaaagacatccgtattttagctgttgacgatgacccggatattttaacgtacttccttgaaatagcgcaggggtttggcttattttgcgacaccgccataagcggggaaaaagcgcttgaactcgtagaccaaaagaacgattaccatatctattttatagactggagaatgccggtcatggacggcgtacaacttgcccgtgaaataaaggagcgaaaatctgagaattccattgtaaccatgatttccgccgccgaatggggcgcggttgccaaagaagcaaaagcggcgggcgttgacaaatttttgtcaaaaccccttttcccttctaccatcgcggaagtaatcaatgaatgtctcggcgttcaaaagcaaaaaacggaagatacgcaggcggctgatatcaacggtatatatgcggggcggcgcatactgctggcggaagacgtggagataaaccgcgaaatagtacaggcgctgcttgaaccgacgcaattggagatagacttcgcggaaaacggcacagaagccgtccgcaaattcaacgaagcaccggacaaatatgatttaatttttatggacgtacagatgccggaaatggacggctacgaggcgacgcggcgcatcagggccattgaggcggatctgaacaaggacaagccggaaccagtcagggttcccattgtcgcgatgaccgccaatgtattccgcgaagacattcaaaaatgccttgacgccggcatggacagccatgtcggcaagccgcttgatttcgatgaagtgatcaacaggctgcggaattactggtaa

SEQ ID NO: 28316 - protein, 371 aa, Unknown
  Obtained from environmental sample
  DOMAIN (5)...(87): Histidine kinase-, DNA gyrase B-, and HSP90-like ATPase
  misc_feature (1)..(371): Xaa is any amino acid
MRLTEKVNDICTLQISVTDTGIGITPEQQKRLFQSFEQAESSTTRKYGGTGLGLAISKNIVEMMGGSIWIQSEPGKGSTFTFTIQLERGKEEKQKRLLDVSLKDIRILAVDDDPDILTYFLEIAQGFGLFCDTAISGEKALELVDQKNDYHIYFIDWRMPVMDGVQLAREIKERKSENSIVTMISAAEWGAVAKEAKAAGVDKFLSKPLFPSTIAEVINECLGVQKQKTEDTQAADINGIYAGRRILLAEDVEINREIVQALLEPTQLEIDFAENGTEAVRKFNEAPDKYDLIFMDVQMPEMDGYEATRRIRAIEADLNKDKPEPVRVPIVAMTANVFREDIQKCLDAGMDSHVGKPLDFDEVINRLRNYW

SEQ ID NO: 28317 - DNA, 396 bp, Unknown
  Obtained from environmental sample
  misc_feature (1)..(396): n is a, c, g, or t
atgctgagcgtaaaagacacgcgcctaaaaggctttatcttgtctggcggcgaggaaaatgacgcgccggcagggcgtcttttgcttgaaacggttggcaagcaggaaagtaccgtcccggttcttatggacagggcctatgcggatttcaagacgcgttttaccgcatggagcctgtgctttaaggctgttgttccgcctaaatcgaacgcaacgtatcaatgggactacgacaaggaattatacaaaagacgcaatgagatagagcgtttcttccgcaggctaaaagctttcagggctgttttcacccgctatgacaaacttgatgccattttttcatcttctgttcttttcgctgctattattatacttttacgttgtgtgaacacgccctag

SEQ ID NO: 28318 - protein, 131 aa, Unknown
  Obtained from environmental sample
  misc_feature (1)..(131): Xaa is any amino acid
MLSVKDTRLKGFILSGGEENDAPAGRLLLETVGKQESTVPVLMDRAYADFKTRFTAWSLCFKAVVPPKSNATYQWDYDKELYKRRNEIERFFRRLKAFRAVFTRYDKLDAIFSSSVLFAAIIILLRCVNTP

SEQ ID NO: 28319 - DNA, 948 bp, Unknown
  Obtained from environmental sample
  misc_feature (1)..(948): n is a, c, g, or t
ttggcccttattatcaacgaacccttggatccttactattctgcggcaatggacaagccgattatcggcacggaatgttatgagtattattccgggactctgcattcctacgaggattatgacagaaagaatccatggcgttatgtgctggaagacgacaatgtgcttggccagtttatatgggccgggattgattatcttggcgaagccagctggccttccaaaggatggaccggttcaagccttgacatctgcggcttttataaagaccagacctggctgcgcaaaagttattggtcacaggagcctgtggcgcatatatgcttttacgacaatacattgcctaataactatgccagagggcgctggaattttccctataccgcttctcatcttaatctggataacctgaaccgccgtgtcgttaacgccgccgtgtataccaactgcgaagaggttgaactcctgattaacggaaaaaaaatcggccgcagaaagcttaaagattttgagaacaatattattgagtggccttttgattacacgccgggagacttaaaactgattggtttccgtaacggaaaagaggttgttgtacaggaaatcaaaactgccggccctcccgccgctatcagcttaaaggccgataagaccgcactggagccgggttctctggcacacatagaaataaccatcacagatgcagctggtctgccctgtcctgttgagaatttgcttcttggtttttccctggaaggggacggcgaaataatgggagcgtcatctcccagccttaataattttttgggctttgatcttacaagggtctatacatccatgggccgggcattggcaataatcaaggccggagactctgcggggaaattgattttttccgtttacggggaagacttaaaaacaggatctctgggttttactgtcggctaa

SEQ ID NO: 28320 - protein, 315 aa, Unknown
  Obtained from environmental sample
  misc_feature (1)..(315): Xaa is any amino acid
MALIINEPLDPYYSAAMDKPIIGTECYEYYSGTLHSYEDYDRKNPWRYVLEDDNVLGQFIWAGIDYLGEASWPSKGWTGSSLDICGFYKDQTWLRKSYWSQEPVAHICFYDNTLPNNYARGRWNFPYTASHLNLDNLNRRVVNAAVYTNCEEVELLINGKKIGRRKLKDFENNIIEWPFDYTPGDLKLIGFRNGKEVVVQEIKTAGPPAAISLKADKTALEPGSLAHIEITITDAAGLPCPVENLLLGFSLEGDGEIMGASSPSLNNFLGFDLTRVYTSMGRALAIIKAGDSAGKLIFSVYGEDLKTGSLGFTVG

SEQ ID NO: 28321 - DNA, 447 bp, Unknown
  Obtained from environmental sample
  misc_feature (1)..(447): n is a, c, g, or t
gtggccttgttgggggagggcggcggggaggcggccttgaaggcccgggccgaagggctggctgaggcgcgtttcctgggcgccttgccggacgaagacaaggaagccttgctgagtctctgttacggcctggttctgccctcccatctgcgttccgaggctttcggcctggcgctcctggatggggcccgccacggcaagcccctggtctgttgtgaaatagccaccggcaccacctatatcaatgtccagggtgaaaccgggctggccgtgcccccggccgacccggccgccttgaaggcggccctcctggccctgtgggccgacccggccttggccgcccgcctgggggccggagccaggcaacgctacgagaaattgttcaccgcggaaaaaatggtgaaggcttatatggatttgtacggcgaacttttaagttcacggtga

SEQ ID NO: 28322 - protein, 148 aa, Unknown
  Obtained from environmental sample
  DOMAIN (1)...(123): Glycosyl transferases group 1
  misc_feature (1)..(148): Xaa is any amino acid
MALLGEGGGEAALKARAEGLAEARFLGALPDEDKEALLSLCYGLVLPSHLRSEAFGLALLDGARHGKPLVCCEIATGTTYINVQGETGLAVPPADPAALKAALLALWADPALAARLGAGARQRYEKLFTAEKMVKAYMDLYGELLSSR

SEQ ID NO: 28323 - DNA, 603 bp, Unknown
  Obtained from environmental sample
  misc_feature (1)..(603): n is a, c, g, or t
ttgatggccgagcggccgagggctctcggcgaggaagattgccggacatttatcaaaagggcaatagagctaggtatcaattttttcgatacggcaaatatttacgccgcaggaacgagcgaggagtttcttagccgtgccattaaagatttcgccaaacgcgatgaaatggttattaccacaaaagtattctttccacctaacgaaaccccaaacagcaacggcctttcccgcaaggcgataatgagggaaattgacaacagccttacccgtcttgggatggattatattgatctatatataatccaccgttgggactacaaaactcctatagaagaaacaatggaagccttacatgatgtgataaaaaccggaaaaacacggtacataggcgcgtcagccatgtatgcctggcaatttcaaaaagcgcaatacacagcagaaaagcacaactggacaaagtttgtatctatgcagaatcattataaccttctctatcgggaggaagaacgtgaaatgatgcctctttgcattgatcaaaatatagcgtcaacaccatacagtccattagcttcaggacgcttcaggacgcttaactcgtga

SEQ ID NO: 28324 - protein, 200 aa, Unknown
  Obtained from environmental sample
  DOMAIN (4)...(200): Aldo/keto reductase family
  misc_feature (1)..(200): Xaa is any amino acid
MMAERPRALGEEDCRTFIKRAIELGINFFDTANIYAAGTSEEFLSRAIKDFAKRDEMVITTKVFFPPNETPNSNGLSRKAIMREIDNSLTRLGMDYIDLYIIHRWDYKTPIEETMEALHDVIKTGKTRYIGASAMYAWQFQKAQYTAEKHNWTKFVSMQNHYNLLYREEEREMMPLCIDQNIASTPYSPLASGRFRTLNS

SEQ ID NO: 28325 - DNA, 1137 bp, Unknown
  Obtained from environmental sample
  misc_feature (1)..(1137): n is a, c, g, or t
atgagtttagcacaagaacggattatcgcctacttccagcctatcttgtccgcagatacaaaagacgtatacgcttatgaggttttaggtcgttacgcagccgatgacggagtcgtaaaatctttggggcctttttttaccgcacctgatatatcgcaccaggaagccctcagggtagacaggatagtcagaagatacggcattaaaaaatatgccgaaaaaaagcgcagcgaatacctgtttatcattatcagattggcgtggctcctgccgtatgttgaaaaccccgaagaaatgagaactttacagttagcgaaagaattcgacattcccaatgaaaaactggttatagaaattacagaagaagattttaacgctagcgaggaatacctgcgcgccatagtccactacaaaaaagcgggctgcagaatagcgttagacgattacggaaaagaagcaagcaatattgacaggctggcgaaacttcagcccgacattataaaaataaatatcgattatattcacaactgcgaaacgtcttatcattaccgcgaatatttgcgcgccatcgccgcctttgccgactccgtaggtattgaggttttacacgagggtgtggagacggaacggcagcttgacgtttgtatttcgtcaaagggaagattttatcagggatttttactcgcccgccctcagccttccatgatagaccctaacgttaacaagtttgttttttccgcgttaatcgcaacttcttattccatgatacaagccacggtagccgacgctgaaaaccaaaagaactccattgacgttctgattgagcgtttctttaaagaaaacacttttagttatgaaaaaataaataacaacgaatatcttacgaaacttttccgcgcgctgccggaagtaatacgcgtttatttgtgcaacagaaaaggcatgcagctttcaaacaacattgaaaaacaagaagataaagttgtatgcagggaatttcaaaacaaaaactgggcgtggcgcggatattttcatgaaataataaaggcttttatccgtggcagaaaaagctgcccttacaacccgtaccgcgattttaccacgaaagaaaaatatgcacctactggtacgcgataa

SEQ ID NO: 28326 - protein, 378 aa, Unknown
  Obtained from environmental sample
  DOMAIN (1)...(231): EAL domain
  misc_feature (1)..(378): Xaa is any amino acid
MSLAQERIIAYFQPILSADTKDVYAYEVLGRYAADDGVVKSLGPFFTAPDISHQEALRVDRIVRRYGIKKYAEKKRSEYLFIIIRLAWLLPYVENPEEMRTLQLAKEFDIPNEKLVIEITEEDFNASEEYLRAIVHYKKAGCRIALDDYGKEASNIDRLAKLQPDIIKINIDYIHNCETSYHYREYLRAIAAFADSVGIEVLHEGVETERQLDVCISSKGRFYQGFLLARPQPSMIDPNVNKFVFSALIATSYSMIQATVADAENQKNSIDVLIERFFKENTFSYEKINNNEYLTKLFRALPEVIRVYLCNRKGMQLSNNIEKQEDKVVCREFQNKNWAWRGYFHEIIKAFIRGRKSCPYNPYRDFTTKEKYAPTGTR

SEQ ID NO: 28327 - DNA, 951 bp, Unknown
  Obtained from environmental sample
  misc_feature (1)..(951): n is a, c, g, or t
atgcctactttccccagtctcttatccgtctgcgagacgacgtggaatgacaatttaatcccattgatgactgtccatagaaaacatgacaggcctgcggcggccaaagtgcttatccgcgaaggcattaggcaaagtgccaagcagcttgatcctgatgtaaaacctgccgcccagacagccgcagagcaaagctccgttacgcaaaattcttccgttaatgaaatgacagataacgtgaatcatgctgaattaatgtctcttcctgcggctgaaccggctcttcttggagacggagtatacaaaacaatccttgatattgatgagttaatttctattttagaaaaggcaaaaaaacaaaaacttttagctctcgattttgaaacagattccctcgatgcgtggcattcccatcccgttggcatatcgcttgcgataaaaccaaaagaggcgttttatgtgcctatcgctccccacaacattgacagcgaaccttcagcgttcaataatcctgaaaaagtccgctccctgctttcccccctgtttgcagataacgagatgacaattgccgcacataacgccaagtttgattacaaagtcagccgaggctggggcattgaccgctggaagtgcaaaatctgggatacgatgactgccgcatgggttgttgatcccgagcgtaccgcttattcattggactcgcttgtcgcctacacttttgactgcacccctataaaatacatggacattgttccaaaaggcatgacgtttaacgttgtctctctggagaccgcaacgcgctattcaggcgaagacgctgacttttgtcttaggctgaaacatcatctcgaaccaattttaaagaaaactgaatcgctagctctttttgaaaatcttgaaatgcccctgcttcccattctgcggaaatggctcggccgatctgatcattga

SEQ ID NO: 28328 - protein, 316 aa, Unknown
  Obtained from environmental sample
  DOMAIN (101)...(288): 3'-5' exonuclease
  misc_feature (1)..(316): Xaa is any amino acid
MPTFPSLLSVCETTWNDNLIPLMTVHRKHDRPAAAKVLIREGIRQSAKQLDPDVKPAAQTAAEQSSVTQNSSVNEMTDNVNHAELMSLPAAEPALLGDGVYKTILDIDELISILEKAKKQKLLALDFETDSLDAWHSHPVGISLAIKPKEAFYVPIAPHNIDSEPSAFNNPEKVRSLLSPLFADNEMTIAAHNAKFDYKVSRGWGIDRWKCKIWDTMTAAWVVDPERTAYSLDSLVAYTFDCTPIKYMDIVPKGMTFNVVSLETATRYSGEDADFCLRLKHHLEPILKKTESLALFENLEMPLLPILRKWLGRSDH

SEQ ID NO: 28329 - DNA, 471 bp, Unknown
  Obtained from environmental sample
  misc_feature (1)..(471): n is a, c, g, or t
atggcgttactgcaaacgcttatgataatgctggctgttcagacgcccttaaaaatgattaccggcagggccttgcccgatattgttaccgaactcgaccacacaagaaagctccatactgaaaatttcagcggtgaatttgaatggtttaataaaaatccaatcgggggctggccaagcgctcataccgcaaacgcgtttgcggctgcggcggcaatatcggaaatttattcggaaaatatatggttaaaaataggagcgtattcatatgcctccataatcggcttcggcgttacggtaaacgtacattgggcgtcggaggctttagcgggcgcattaatcggatacgcggtaggcagtaccgtaggcaaaagttataaaaagttattggaaaacaaatcaaataattcagaaaacaatgtatcattctatgtttatccaaacagcataggaatgataataagaatataa

SEQ ID NO: 28330 - protein, 156 aa, Unknown
  Obtained from environmental sample
  DOMAIN (1)...(131): PAP2 superfamily
  misc_feature (1)..(156): Xaa is any amino acid
MALLQTLMIMLAVQTPLKMITGRALPDIVTELDHTRKLHTENFSGEFEWFNKNPIGGWPSAHTANAFAAAAAISEIYSENIWLKIGAYSYASIIGFGVTVNVHWASEALAGALIGYAVGSTVGKSYKKLLENKSNNSENNVSFYVYPNSIGMIIRI

SEQ ID NO: 28331 - DNA, 1113 bp, Unknown
  Obtained from environmental sample
  misc_feature (1)..(1113): n is a, c, g, or t
atgataaagcaaaaatttctaaagccgccgtggctggaaatgataattatgcttgccgctgtagcgctctcggctgtcggccttttaattatttcttacctgtcccggccgaatatttctgcgcaaatgaattacggcacaatagggctttggcttgcggcgttctttcttctaagtttctcaatagggcttgtatctgttctggcagggataggcggcagtattatttttacgccgttaatgctggctttcactccggtcaacagccttgttatacgcgctaccgggcttattgtctcaatgttcagcgggcttatatcaaccggggtctttatgaaaaaaggccttggaaatttaaaaatgtgcataatcctcacggtgagtcagggactcggggcgcttatcggcgcgcagtgcgccatagtcgcggtcagctcttttggggataccggagaagggatgatacgcactgttctgggaagtattcttgttttaattgcgatcaatttccttacgactgacaaaagatatgattggccgaatatacagaatgttgacaaacttaccaaatggatgggtctcagttctacatattacgaggagtcggaaaacagggtatattcatataaaattacccgaatcctgctgggtctggcgcttgtgttctgcgccggattcataggaggttttttcgggatgggggctggctgggcaattacgcctatacaaaacctcgcccttggcgttcctcttaaactggcggcggccaacagcggcataattctgggaatggtggattgtgttgccgtgtggccgtatatgctggcaggcggtattattcccctgtttgtactgccctggctcctgggcaaggtggccggcggttatctgggagcttttgcgcttgttaaggccaaagctgcggtaatacgttttatcctgagcgggatcctgatttataccagttttcagcttataaccgacggatgggcgaaactctatcttatccccaaaataccgagccggatttctctggccatattcctgatcattatggtgattgacgctcttttattgttcagagcgcaaagaaaagaagcggggaggaaataa

SEQ ID NO: 28332 - protein, 370 aa, Unknown
  Obtained from environmental sample
  SIGNAL (1)...(27)
  DOMAIN (53)...(326): Domain of unknown function DUF81
  misc_feature (1)..(370): Xaa is any amino acid
MIKQKFLKPPWLEMIIMLAAVALSAVGLLIISYLSRPNISAQMNYGTIGLWLAAFFLLSFSIGLVSVLAGIGGSIIFTPLMLAFTPVNSLVIRATGLIVSMFSGLISTGVFMKKGLGNLKMCIILTVSQGLGALIGAQCAIVAVSSFGDTGEGMIRTVLGSILVLIAINFLTTDKRYDWPNIQNVDKLTKWMGLSSTYYEESENRVYSYKITRILLGLALVFCAGFIGGFFGMGAGWAITPIQNLALGVPLKLAAANSGIILGMVDCVAVWPYMLAGGIIPLFVLPWLLGKVAGGYLGAFALVKAKAAVIRFILSGILIYTSFQLITDGWAKLYLIPKIPSRISLAIFLIIMVIDALLLFRAQRKEAGRK

SEQ ID NO: 28333 - DNA, 933 bp, Unknown
  Obtained from environmental sample
  misc_feature (1)..(933): n is a, c, g, or t
atgccgcaaatactcaccgatgaagatcaggaacttaccagccagtttaccggggacatacccacgccgcgggaaattaaaatctaccttgaccagtttgtgattgggcaggacgcggcaaaaaaagccctgtcggtggcggtgtacaaccattacaaacgaatcgccaatcccggcaagggcggctcaactgacgttgaaattgaaaaatcaaacgtgctgttgatcggccccacgggaacgggcaaaaccctgcttgccaaaatactcgccaaaaaactgagagttccctttgccattgttgacgcgaccactttaaccgaggcaggctatgtcggcgaagacgtggaaaacatcctccttaaactgattcagaacgcgggcgggaacatagccgccgccgagcggggcattgtttatattgatgaaatcgacaagatcgcccgcaagggggaaaatgtttccataacccgcgacgtatccggcgaaggagtgcagcaggcgctgctgaaaatcatcgaggggactgtagcctcggtgccgccgcagggtgggcgcaaacatcccaaccaggaaatgatccgcattgacaccaccaacatactgtttatatgcggaggcgcttttgtcggtcttgataaatttatcgcccgtcgggtagtacaacaccccctgggattcggagccgaggccggtgtcggagagaaaagcctgaaagagctgtttgacgcattacacccggacgatttgatccacttcggtatgatccccgaattcatcggcaggcttcccattgtcgtgagccttgatgaacttaagcgcgaggatttacggcggatcatcaccgagccgcataacgctatcgtcaaacagtatcaggcatccctcgcttacgatgacgttacgctggaattttaccgaaggggccattga

SEQ ID NO: 28334 - protein, 310 aa, Unknown
  Obtained from environmental sample
  DOMAIN (72)...(289): ATPase family associated with various cellular activities (AAA)
  misc_feature (1)..(310): Xaa is any amino acid
MPQILTDEDQELTSQFTGDIPTPREIKIYLDQFVIGQDAAKKALSVAVYNHYKRIANPGKGGSTDVEIEKSNVLLIGPTGTGKTLLAKILAKKLRVPFAIVDATTLTEAGYVGEDVENILLKLIQNAGGNIAAAERGIVYIDEIDKIARKGENVSITRDVSGEGVQQALLKIIEGTVASVPPQGGRKHPNQEMIRIDTTNILFICGGAFVGLDKFIARRVVQHPLGFGAEAGVGEKSLKELFDALHPDDLIHFGMIPEFIGRLPIVVSLDELKREDLRRIITEPHNAIVKQYQASLAYDDVTLEFYRRGH

SEQ ID NO: 28335 - DNA, 453 bp, Unknown
  Obtained from environmental sample
  misc_feature (1)..(453): n is a, c, g, or t
ttgacgatagcgttatgcggctcggtgatgatccgccgtaaatcctcgcgcttaagttcatcaaggctcacgacaatgggaagcctgccgatgaattcggggatcataccgaagtggatcaaatcgtccgggtgtaatgcgtcaaacagctctttcaggcttttctctccgacaccggcctcggctccgaatcccagggggtgttgtactacccgacgggcgataaatttatcaagaccgacaaaagcgcctccgcatataaacagtatgttggtggtgtcaatgcggatcatttcctggttgggatgtttgcgcccaccctgcggcggcaccgaggctacagtcccctcgatgattttcagcagcgcctgctgcactccttcgccggatacgtcgcgggttatggaaacattttcccccttgcgggcgatcttgtcgatttcatcaatataa

SEQ ID NO: 28336 - protein, 150 aa, Unknown
  Obtained from environmental sample
  misc_feature (1)..(150): Xaa is any amino acid
MTIALCGSVMIRRKSSRLSSSRLTTMGSLPMNSGIIPKWIKSSGCNASNSSFRLFSPTPASAPNPRGCCTTRRAINLSRPTKAPPHINSMLVVSMRIISWLGCLRPPCGGTEATVPSMIFSSACCTPSPDTSRVMETFSPLRAILSISSI

SEQ ID NO: 28337 - DNA, 636 bp, Unknown
  Obtained from environmental sample
  misc_feature (1)..(636): n is a, c, g, or t
ttgcttggcgatggcgagtttttcattttccccgtagccgggaatgttgatgatttccatacggtcaagcagggggtacggtatactgtgcagggagttggcggtggtgataaacagcacacgggaaagatcgtaggttacttccagataatgatcggtgaaggcgacgttttgttccgggtcaagcacttcaaggagggcgctggcggggtctccccggaaatcgctggaaagtttgtctatctcatccagcatgataacgggattcatcgtttcggccttgcgcatggactgaatgatcttgccgggaagggctcccacgtaggttttccggtgtccgcgaatttcagcctcgtccctcagcccgcccagggaaatccggacaaaccgccgccccaatgcccgcgccacggatttgcccaggctggttttgcccgtgccgggcggccccacaaaacagaggatcggccctttaacagcggtcatcgccacgccgttcaaagctggcgcacggcgataattccacaatgcggtctttggccttgcgcatattgtaatgatcttcgtcaagtattttttgcgcttcctcaaggtctcctgaatcaacgctgtaattactccagggaagatcggtga

SEQ ID NO: 28338 - protein, 211 aa, Unknown
  Obtained from environmental sample
  misc_feature (1)..(211): Xaa is any amino acid
MLGDGEFFIFPVAGNVDDFHTVKQGVRYTVQGVGGGDKQHTGKIVGYFQIMIGEGDVLFRVKHFKEGAGGVSPEIAGKFVYLIQHDNGIHRFGLAHGLNDLAGKGSHVGFPVSANFSLVPQPAQGNPDKPPPQCPRHGFAQAGFARAGRPHKTEDRPFNSGHRHAVQSWRTAIIPQCGLWPCAYCNDLRQVFFALPQGLLNQRCNYSREDR

SEQ ID NO: 28339 - DNA, 756 bp, Unknown
  Obtained from environmental sample
  misc_feature (1)..(756): n is a, c, g, or t
atggaacagcgggttgattattctctggtaaaaatcgagccgatagactcaggctttttttccaacccgccgctgccggaagacgtcgccctcatgcgggccgtacaacggtcttttgcccagtacgccgaactttcaaaaaaaatcggatcggagactctgctggcggtagagcgcacggaaagtcccgaacgcctcgccaaccttatctgtaactccatgcagcttaaacctgaaaagaaaattgaactgcttgccatatccggagccgccgagcggctggtggcgatactggaaacgcttgaacgggaaaatgaaatatacggcatacaaaaaaatatttcgggtaaggtcagaagccgcatggaaaaacaccagcgcgaatactatcttcatgaacagcttaaagaaattaacaaagaactgggcaaggataaaacagaagatgaattcggcgaaatggaaaaacaaattgcccagaagaatcccccggcggaagtactggcaaaagccggcaaggaaatcagccgtctgcgcaaactccagcctctttcgccggaagcgggcgttctgcggggataccttgagtggatcaccgatcttccctggagtaattacagcgttgattcaggagaccttgaggaagcgcaaaaaatacttgacgaagatcattacaatatgcgcaaggccaaagaccgcattgtggaattatcgccgtgcgccagctttgaacggcgtggcgatgaccgctgttaa

SEQ ID NO: 28340 - protein, 251 aa, Unknown
  Obtained from environmental sample
  misc_feature (1)..(251): Xaa is any amino acid
MEQRVDYSLVKIEPIDSGFFSNPPLPEDVALMRAVQRSFAQYAELSKKIGSETLLAVERTESPERLANLICNSMQLKPEKKIELLAISGAAERLVAILETLERENEIYGIQKNISGKVRSRMEKHQREYYLHEQLKEINKELGKDKTEDEFGEMEKQIAQKNPPAEVLAKAGKEISRLRKLQPLSPEAGVLRGYLEWITDLPWSNYSVDSGDLEEAQKILDEDHYNMRKAKDRIVELSPCASFERRGDDRC

SEQ ID NO: 28341 - DNA, 627 bp, Unknown
  Obtained from environmental sample
  misc_feature (1)..(627): n is a, c, g, or t
atggattatttacagcaattaacgaaacgttaccctcagcttgaatcaattgaagcagatataaacaaggcgtttttcatcattgcggaatcatttgccaaaggcggaaagctgctgatagcgggaaacggcggcagcgccgccgatgccgaacatattgtcggggaaatgatgaaaaattttattaaaaaaagaaaacttgacgacgagtttatctcaaatatcaaggaagttgataccgaaatcgcccagtatttgatttccagtttacagcctggtcttcccgctatcgatctttccagccaaacttcgcttattaccgcctctgttaacgatattgatgttaatgtcgtttttgcccagcaattatacggttacggaaaagaaggcgatgtttttcttggaatatctacatcggggaacgcaaagaatgttttatacgcagccgccgccgcgaaagcgaaaaaactgcgtgtaatcgccctgtccggcggttccggcggcgcattacgccgctttgccgacgtttccattattgtgcctgagacggaaacctataaaatacaggaactccatctgcccatttaccattgcctgtgcctaatgattgaggagagatttttttaa

SEQ ID NO: 28342 - protein, 208 aa, Unknown
  Obtained from environmental sample
  misc_feature (1)..(208): Xaa is any amino acid
MDYLQQLTKRYPQLESIEADINKAFFIIAESFAKGGKLLIAGNGGSAADAEHIVGEMMKNFIKKRKLDDEFISNIKEVDTEIAQYLISSLQPGLPAIDLSSQTSLITASVNDIDVNVVFAQQLYGYGKEGDVFLGISTSGNAKNVLYAAAAAKAKKLRVIALSGGSGGALRRFADVSIIVPETETYKIQELHLPIYHCLCLMIEERFF

SEQ ID NO: 28343 - DNA, 423 bp, Unknown
  Obtained from environmental sample
  misc_feature (1)..(423): n is a, c, g, or t
gtgccgggtttatttgaattgtgccggcattttcagaacagggattacaaaataattgttattaccaatcagtcgggcgtggcgcgcgggtattttaccgaagaagatttgagggaactgcataaatatatgtcagccgaattgcaaaaagaaggaataaccgttaccgatattttttactgtatttccgttgacgatgcgcatcccgaccgcaagccaaacccgggcttattcctgaaagcaagggacacttactctctggacatggcggcttcggtatccatcggcgacaaggaaagggacattaccgcggcgcgaaaagccggtgtcggagtcaatatattacttggcagcgccgccgccacagccgccgaatacaaagtcggaaatttgagcgaggtgcaagccttatgtatttcctga

SEQ ID NO: 28344 - protein, 140 aa, Unknown
  Obtained from environmental sample
  misc_feature (1)..(140): Xaa is any amino acid
MPGLFELCRHFQNRDYKIIVITNQSGVARGYFTEEDLRELHKYMSAELQKEGITVTDIFYCISVDDAHPDRKPNPGLFLKARDTYSLDMAASVSIGDKERDITAARKAGVGVNILLGSAAATAAEYKVGNLSEVQALCIS

SEQ ID NO: 28345 - DNA, 519 bp, Unknown
  Obtained from environmental sample
  misc_feature (1)..(519): n is a, c, g, or t
atgtatttcctgacaggcggagccggatttatcggctccaatatcgcggcggctctcagtgagcggaacgtctctcaggcaatagccgacacgctgggaaacgccgataaatggcagaacatcgccggactgccccttgaagcaatcgtgccgccttctgaaatcttcgattttcttttggaacggagaaaatccgtaaaggcggtcattcacatgggcgctatatcatcaacgaccgaacaaaacgccgatttgataatcagtaccaacttcacgctgtcccagcggctctggaatttctgcgctcaaaacggtgtcccgtttatttacgcttcatccgcggccacttacggcaacggagagaatgggttcgaggacgaattcaacgccgaatatctggctaaactgtgccccctcaatccttacggctggagcaagcatttgtttgaccgctgggtattcgcgcagacggaacgcccgcgtaccccgccgcagtgggcggggcttaaaattttttaa

SEQ ID NO: 28346 - protein, 172 aa, Unknown
  Obtained from environmental sample
  SIGNAL (1)...(18)
  DOMAIN (2)...(172): NAD dependent epimerase/dehydratase family
  misc_feature (1)..(172): Xaa is any amino acid
MYFLTGGAGFIGSNIAAALSERNVSQAIADTLGNADKWQNIAGLPLEAIVPPSEIFDFLLERRKSVKAVIHMGAISSTTEQNADLIISTNFTLSQRLWNFCAQNGVPFIYASSAATYGNGENGFEDEFNAEYLAKLCPLNPYGWSKHLFDRWVFAQTERPRTPPQWAGLKIF

SEQ ID NO: 28347 - DNA, 1338 bp, Unknown
  Obtained from environmental sample
  misc_feature (1)..(1338): n is a, c, g, or t
atggcggagcggacaaagttttcggcttactgtctttacagcttcatcatcagcgccgtgatttacccaatctccggccactggatttggggcggcggctggcttgcggatcttggcttccatgactttgccggttctaccgccgtacacatggtcggcggcatcgcatcgctcgtgggcgcggcaattgtcggcccccgccttggcaagtatgatcccaagacaggcgaatcgcgggcgattcccggccacagcctgacgctcggcgcgcttggtgttttcattctctggttctgctggttcggttttaacggcggttctaccgtttccatgacaggtgaaaatgtcgtgtctgccagcagcatctttgttacgacaaacctggcggcggcaaccgccgcagtctttaccatgttcattacgtggatacgctacaaaaagcccgacgtgtccatgacgctgaacggcgcccttgccggcctggtagcaattaccgccgggtgcgatgttgtatcgccgtttggttcgttctgtatcggcattgtatcggcatttgtgattgtattcggtattgagtttgttgataaagtattgaagattgacgatcctgtcggggcaatcggcgtacacggccttgccggagcggcgggaacaattttgaccggcatattcgcgcttgacggcggcctggcttacggcggcggatgggcgatggttggcgttccagccctcggcgttgtttcggtaatggcctgggtagggataacaatgaccatcatctttacgttgatcaaaaagactattggcctgcgtgtttcgcaagccgaggaaattgccggtatggatattactgaacacaacatagttagcagttatgccgattttatgatagcccctatcagtgtaagttcttcgtccggtatggatgccgcggttccggttgaaaaggcaattcatgttgttaataactctaaacccggcgcaaagatgacgaagataaccatcatcaccaatcaagataaacttgcgctccttcactcaggtctggacaagatcggcataacaggccttacggttacaaacgtcctcggccacgggatgcaaaaaggccacacggagctgtaccgcggggcacaggtagaaatacgcttgcttcccaaagtgcaggtcgatattgtcgtaagcaaaataccgcctgaaaccgtaatagaagcgacgaaaaagatactgtacacgggaaaagtcggcgatggaaagatattcgtttccgatattgaaaacgtcattaaagtccgcactggagagcaaggttacgatgccttgcaggataacgaatag

SEQ ID NO: 28348 - protein, 445 aa, Unknown
  Obtained from environmental sample
  DOMAIN (333)...(434): Nitrogen regulatory protein P-II
  misc_feature (1)..(445): Xaa is any amino acid
MAERTKFSAYCLYSFIISAVIYPISGHWIWGGGWLADLGFHDFAGSTAVHMVGGIASLVGAAIVGPRLGKYDPKTGESRAIPGHSLTLGALGVFILWFCWFGFNGGSTVSMTGENVVSASSIFVTTNLAAATAAVFTMFITWIRYKKPDVSMTLNGALAGLVAITAGCDVVSPFGSFCIGIVSAFVIVFGIEFVDKVLKIDDPVGAIGVHGLAGAAGTILTGIFALDGGLAYGGGWAMVGVPALGVVSVMAWVGITMTIIFTLIKKTIGLRVSQAEEIAGMDITEHNIVSSYADFMIAPISVSSSSGMDAAVPVEKAIHVVNNSKPGAKMTKITIITNQDKLALLHSGLDKIGITGLTVTNVLGHGMQKGHTELYRGAQVEIRLLPKVQVDIVVSKIPPETVIEATKKILYTGKVGDGKIFVSDIENVIKVRTGEQGYDALQDNE

SEQ ID NO: 28349 - DNA, 708 bp, Unknown
  Obtained from environmental sample
  misc_feature (1)..(708): n is a, c, g, or t
atgacctataagggcgtttttcgggaatttttactgttttttgctggtttttctctctttgcgcaggggcatgagatgggtaatatgccctatgttatcagagccgaggtttatgttgatttagagccgatttacgccggccatgtcgattccgagtaccctttgagtattcccacagccggacagcgcgcccttgaggaggcggccatatttttttcggctatggtttacggttggtcttttatttatgatgtaggagaaagggcaaggcgtatagaagaaaatctggagttaacgtcgggaggcgtaatagaaaaaggcgacccgcgccttagcgttaccgatgttgaagtcagcgacaacagacttaaaatatggacagattatcatttgacggacctccagcaaagccgcatgcagacatggcgcagcggtatgatcaggagcgcgcagggtattggttatggtcccgcgagcattgacgaataccccggctggcttcagttgaaaaagaccgcgctggaaaacgcggcaaaagccgccctccgcgcaatgcttcgcggcagcgaacgcaaccgccccaaagaagtaaccggctttatcagccttgcctcttttccaaggtactatatcgacagcggcaggtggacagcttccgcgcgttttagagttcaaattatcgaaatcatacccttcgctgtttattag

SEQ ID NO: 28350 - protein, 235 aa, Unknown
  Obtained from environmental sample
  SIGNAL (1)...(23)
  misc_feature (1)..(235): Xaa is any amino acid
MTYKGVFREFLLFFAGFSLFAQGHEMGNMPYVIRAEVYVDLEPIYAGHVDSEYPLSIPTAGQRALEEAAIFFSAMVYGWSFIYDVGERARRIEENLELTSGGVIEKGDPRLSVTDVEVSDNRLKIWTDYHLTDLQQSRMQTWRSGMIRSAQGIGYGPASIDEYPGWLQLKKTALENAAKAALRAMLRGSERNRPKEVTGFISLASFPRYYIDSGRWTASARFRVQIIEIIPFAVY

SEQ ID NO: 28351 - DNA, 582 bp, Unknown
  Obtained from environmental sample
  misc_feature (1)..(582): n is a, c, g, or t
atgaaaacagaatccgaattacttgagctttacgctgaaacgcataaaaccggaaaagttgataaaaatgagattctttcagatattgaacggttggatcttatttatcaattatttggaaaatttaaatatcttgatttcggcgcgttgttgatatcggaaaaaaataatcctgatgaagctatagatataattattaatacgtattatccttacgagttttgtgttggtgtaaatttcaaaattccgtatctgataaatttaataaaaaacaatttttatataatgtcggaatattataaacgaatggatatatatataatgatagctatgcatcatttaacaaaatccgttttattttttgaccgtcttcatataaaaaaatccataaaaaagcatctttcaaaatatgaattaagggtaaacgcggattttgaaaagattgtagataaatgcgttgatagtcatgatgataagtggttaacggaaccgcttgttgccgcgattaaaaaaattcaccacttaaacaaccccgacgcgacttttatatcttttggtttatatagtgacggcaaactgtag

SEQ ID NO: 28352 - protein, 193 aa, Unknown
  Obtained from environmental sample
  misc_feature (1)..(193): Xaa is any amino acid
MKTESELLELYAETHKTGKVDKNEILSDIERLDLIYQLFGKFKYLDFGALLISEKNNPDEAIDIIINTYYPYEFCVGVNFKIPYLINLIKNNFYIMSEYYKRMDIYIMIAMHHLTKSVLFFDRLHIKKSIKKHLSKYELRVNADFEKIVDKCVDSHDDKWLTEPLVAAIKKIHHLNNPDATFISFGLYSDGKL

SEQ ID NO: 28353 - DNA, 675 bp, Unknown
  Obtained from environmental sample
  misc_feature (1)..(675): n is a, c, g, or t
gtgctggcagaggaaagtgacgggactttgataatagtagaaattcaattcacccccgaaatagactatttccatcgtatgcttttcggttcaagcaaggcgataacagaacatttaggcgaaggaatgccttatgctgatgttagaaaagtgtattccgttaatgtggtatattttgaccttggttctggcaaggattatatttactatggttcaacaacctttaagggtttgcattacaacgatgagctagaacttaccgagaagcagaaagccgagtttgcgaagctggaaataaaggatatttaccctgagtattatattttgaaaattgatcgttttaagaacatagtccaaaacaagatagacgagtggatatattttttgaaaaattcagagataaagcctgagttcaaagcccctggcttgaacgaagccataaacaagctgaattataacggtttgagtttggaagaccagcgagcttatgatagctatgttgattcgcggcgcagcgatgcgagtagtattcgcaccgctaagatagacggcagagcagagggcatagaggaaggcagagaagaagtctttcgtaaagtcgctgcgaaaatgctttcacagggtaagactgaaaaagatgttgcggagtttttggatattccttggataaggtga

SEQ ID NO: 28354 - protein, 224 aa, Unknown
  Obtained from environmental sample
  misc_feature (1)..(224): Xaa is any amino acid
MLAEESDGTLIIVEIQFTPEIDYFHRMLFGSSKAITEHLGEGMPYADVRKVYSVNVVYFDLGSGKDYIYYGSTTFKGLHYNDELELTEKQKAEFAKLEIKDIYPEYYILKIDRFKNIVQNKIDEWIYFLKNSEIKPEFKAPGLNEAINKLNYNGLSLEDQRAYDSYVDSRRSDASSIRTAKIDGRAEGIEEGREEVFRKVAAKMLSQGKTEKDVAEFLDIPWIR

SEQ ID NO: 28355 - DNA, 978 bp, Unknown
  Obtained from environmental sample
  misc_feature (1)..(978): n is a, c, g, or t
atggaacagattaaatgggtctggaattacatgaagggaaagagagccgtctttatgggcgggctttttcttacggttgtcacatcggcgatgcgcgttattaatccattgttgggcatacaaataattgacgtggttattataaaacatgatacaagcccgttaataaggctccttgtcattatgatgatagtacaacttgcccgcctttcgcttaactatcttcagataatactgatggagattgcaagcaccgacgtgatgacgcgccttcgccaagacatgtaccagacagtccaatggcaggattataaatttttaaaccgcttcccaaccggaaaccttatgacaaggatgacgcaggacttggaccgtctgcgccataccgtcgcatgggtttcctatcaattcataggggcaatcgccctttttgccgcgacttttatcttttatctgtttataaattggaagctcgccatttgccttgtagccattacgccatttattctgtatataagcagaaagtttgtaaaaaaaataaggccccgttttcaattactgcggcaaaaacttacggagttggggacggccgttactgaaaatattgacggcaaccgcgtggtaaaagctttcgcgcgcgaagaacatgaaaaagaaagagttgaaaaacaaaacgccgaataccgcgacataagttgtgaaaacgccctcctttccgcgaaataccagccgtttcttgaaaccgcgagccagttcctcacggtaataacgcttgttgtgggcggttttttcctaataaaggaatggatgacccccggcgaatacatggcgttctcatcgcttacatgggcgctgtacatgccgatgcagatgcttggccccctgcttgccgaccttgaacgctacacttccgcagggcagatgatccgtgaagttgttgaaacgccaaaaggaataagcgatatgtcggggctatga

SEQ ID NO: 28356 - protein, 325 aa, Unknown
  Obtained from environmental sample
  DOMAIN (18)...(289): ABC transporter transmembrane region
  misc_feature (1)..(325): Xaa is any amino acid
MEQIKWVWNYMKGKRAVFMGGLFLTVVTSAMRVINPLLGIQIIDVVIIKHDTSPLIRLLVIMMIVQLARLSLNYLQIILMEIASTDVMTRLRQDMYQTVQWQDYKFLNRFPTGNLMTRMTQDLDRLRHTVAWVSYQFIGAIALFAATFIFYLFINWKLAICLVAITPFILYISRKFVKKIRPRFQLLRQKLTELGTAVTENIDGNRVVKAFAREEHEKERVEKQNAEYRDISCENALLSAKYQPFLETASQFLTVITLVVGGFFLIKEWMTPGEYMAFSSLTWALYMPMQMLGPLLADLERYTSAGQMIREVVETPKGISDMSGL

SEQ ID NO: 28357 - DNA, 555 bp, Unknown
  Obtained from environmental sample
  misc_feature (1)..(555): n is a, c, g, or t
atggacctcgcgaacctttccgaagcgagcaaggaatacaacatagacttgcacatctacaatttgggcacttacacaaatgacaatattgtagccactcagaaacgctttatgaaggaaaaattggacactgacattgactgtcttgaagcgtacaacaccggttacaatcttggaatagacggacagaaactccacaagattctgcacgacattcaagaaaagaatttcgggcatattatacttacggttcccacattaaacccggaaaaaacgcatacatactacgccgagcttgaaacgccagtacgcaaccactgcgttgtcccctggtgccagttaaacgtaaactacaacggggacgtgcatttttgcgccgattatcccgactacatattaggcaacataaagaatcagtcaattaaagagatatacaacggggatcgcgcaaatttattcagaaaaaccctgcatgaatgtgaaggcggaatgtttcccggttgcctgagatgctaccagaatatgctttttggtaaaaagattaaaagtttttaa

SEQ ID NO: 28358 - protein, 184 aa, Unknown
  Obtained from environmental sample
  misc_feature (1)..(184): Xaa is any amino acid
MDLANLSEASKEYNIDLHIYNLGTYTNDNIVATQKRFMKEKLDTDIDCLEAYNTGYNLGIDGQKLHKILHDIQEKNFGHIILTVPTLNPEKTHTYYAELETPVRNHCVVPWCQLNVNYNGDVHFCADYPDYILGNIKNQSIKEIYNGDRANLFRKTLHECEGGMFPGCLRCYQNMLFGKKIKSF

SEQ ID NO: 28359 - DNA, 1551 bp, Unknown
  Obtained from environmental sample
  misc_feature (1)..(1551): n is a, c, g, or t
ttggagggcaaatgcaaattctgctatgccgaccttacttccgatgacgcgctgttctgccccgaatgtggcaagcccaaagatggcattccctgcccccattgcggcacattgagcatatttgatttttgctccaactgcggcaagcccgtcaccgaagaagccattgcggagctaaaacatgcccagaaagaaatggcaggaaaggcatcgcccgccgcgccggaaacgtccgctgcacaagcagcgggaaagaaaacgtttggttcaaatcaggatgccagacgctggtataacgcgcaagccgccgcgcagacagccggaatcgagacggaacttgcccaacttgaagcgcttatcaacagcaagccggagccggaagaacctgaacaaatagaaaatgaaacatctcctcccgcaagaaaatcccttttttcagacaggcaaatggagtctatcaggaaaacaggcgcggtcgtggatgaaattacccggcagcgccttgaagcggaaaggatcgcggaagaaaaaagaaaagcggaagaagccgagagaaagcgcaaagaagcggagcgccagaggcaactaaaggaagcgcaggagcgcaaagaagagcttgagagaaactccgttcgagagcctggcgctgtaacgcttacaacaccttacatcccggcggtcctaatgaatgtgccgatccgtccatgggcggtcaatgggtatgatgaatggcagtacataaatatagaggggcgtaatatgcaatgtgttaaatgtaataccaataaccgcagttctgcaaagttttgtaaacagtgcggtagcgcgataaccaacgcggaaactacaaccggcctgggtttatctatcgatcaacttgtagggcttgatgaaataaaaaaagaattatccgtattgcaggcgatacttgaaggaatgaaacagagtaataaagtcgcccgtttcccttatgatacaattatcatcggcgcttccggaaccgcaaagacgctcatatccaatctcattgccgatctgttttttaaattcggtatgatctcaaaaagcaagccggaaaaaatagacggcgcttttcttaacggaatgtcctcaaaagatattgacaaccttttttcaaaagcgaaaggcgggatgctttttgttgacaatgcccagaagcttctggattccgaaggtaaggccgcgcacgctttttctcattttattactgcgatggatgccaaccaggacgaccctgttgtgcttatggcgggtcttcctacgggcttgagagaaatggtaaaaagcgccgaatcggcaaacaagcaaataataaaccattttgaaaagatatttattattcccgattacacgccggatcaatatgttaaaattaccgagaacgaattgaaaaaacaaagctttacgttcaaatccggattttccgaaaactcctccctgcgttccgttacctatacaaggaactacagaaagcggacaataactttaaatgcaacggttatcatgcccattcagaagcccaagacataa

SEQ ID NO: 28360 - protein, 516 aa, Unknown
  Obtained from environmental sample
  misc_feature (1)..(516): Xaa is any amino acid
MEGKCKFCYADLTSDDALFCPECGKPKDGIPCPHCGTLSIFDFCSNCGKPVTEEAIAELKHAQKEMAGKASPAAPETSAAQAAGKKTFGSNQDARRWYNAQAAAQTAGIETELAQLEALINSKPEPEEPEQIENETSPPARKSLFSDRQMESIRKTGAVVDEITRQRLEAERIAEEKRKAEEAERKRKEAERQRQLKEAQERKEELERNSVREPGAVTLTTPYIPAVLMNVPIRPWAVNGYDEWQYINIEGRNMQCVKCNTNNRSSAKFCKQCGSAITNAETTTGLGLSIDQLVGLDEIKKELSVLQAILEGMKQSNKVARFPYDTIIIGASGTAKTLISNLIADLFFKFGMISKSKPEKIDGAFLNGMSSKDIDNLFSKAKGGMLFVDNAQKLLDSEGKAAHAFSHFITAMDANQDDPVVLMAGLPTGLREMVKSAESANKQIINHFEKIFIIPDYTPDQYVKITENELKKQSFTFKSGFSENSSLRSVTYTRNYRKRTITLNATVIMPIQKPKT

SEQ ID NO: 28361 - DNA, 1311 bp, Unknown
  Obtained from environmental sample
  misc_feature (1)..(1311): n is a, c, g, or t
atgggaggaatcctttttatcgatgaagtgtacacgctgaaacaaaacgacagcgacagtttcggtcaggaatgtatcgacaccctgctaaaacggatggaagacgataggggcaagttcatggttatagttgccggatacaaaagcccgatggaaaaattccttacggccaacgaaggtttaaaaagcaggtttaccaaatattttaacctagaagattacagcccggaagaacttgcggcaatatttgaatctcttgccaaaaaacagcgctttatagtaccgccagagacaagggttaaaattgtcgctttcttcaaagacaggtgcgcgcggaaaaccaaagacttagcgaacggaagggaagcgaggaatttattggacgaagcgaggaagaaccaggcggaacgtttgtctcaggcgtatatcgcgggcatgtccggtgaagacacccttacatttctccaggaagacattcccggcacgactgccgataaaatggtttccattgacgaggcgctcaaagacctcaacatgctggtggggcttaagtcggttaaggatgcggtaacaaggataaccaactcattgcaggcccaaaaacttaccggcgaaacagaaacgcttgccaagcactttgtttttacgggcaaccccggtacgggaaaaacgactgtcgcacggattatgggcgacgtgttcaaggccgtaggcatgcttcccactaacaatttgatagaagcggacaggggaaaactggttgcgtcctatgtaggccagacggccaagctagtggcgcagcaatgcgacaacgccatgggtggcatcctctttattgacgaagcgtactcgctgaaacaggggccgcaggacagtttcgggcaggaagcggtggatacgcttcttaagcggatggaagacgacaggggcaaatttgtggttatagccgccggctataccaaagaaatggaagaatttttggcgtctaacagcgggtttaaatcgcgcttttcggactatatcaactttgacgactacaatacctccgaaatgcgggaaatctttataggtatgtgcaaaaagagaaaaatcgaatttgcccccggctttgacgaagcgctgaaaaaaaggctggaaagattgtatgccggaaggaacgcccagttcgcgaacgcccgcacggtaaggcaactgtttgacaaaacaagagagaacgtatccggaagagtgcttgccatgcagaaaaccgaagaagagctaaagcgcgaaatattgatcatgcgcccggaagatttggatatgaccgtatag

SEQ ID NO: 28362 - protein, 436 aa, Unknown
  Obtained from environmental sample
  DOMAIN (212)...(404): ATPase family associated with various cellular activities (AAA)
  misc_feature (1)..(436): Xaa is any amino acid
MGGILFIDEVYTLKQNDSDSFGQECIDTLLKRMEDDRGKFMVIVAGYKSPMEKFLTANEGLKSRFTKYFNLEDYSPEELAAIFESLAKKQRFIVPPETRVKIVAFFKDRCARKTKDLANGREARNLLDEARKNQAERLSQAYIAGMSGEDTLTFLQEDIPGTTADKMVSIDEALKDLNMLVGLKSVKDAVTRITNSLQAQKLTGETETLAKHFVFTGNPGTGKTTVARIMGDVFKAVGMLPTNNLIEADRGKLVASYVGQTAKLVAQQCDNAMGGILFIDEAYSLKQGPQDSFGQEAVDTLLKRMEDDRGKFVVIAAGYTKEMEEFLASNSGFKSRFSDYINFDDYNTSEMREIFIGMCKKRKIEFAPGFDEALKKRLERLYAGRNAQFANARTVRQLFDKTRENVSGRVLAMQKTEEELKREILIMRPEDLDMTV

SEQ ID NO: 28363 - DNA, 774 bp, Unknown
  Obtained from environmental sample
  misc_feature (1)..(774): n is a, c, g, or t
atggcgcaggcccggcagcattaccgggaatgcgcccaggcttcggccttatttttttacccgtcgcccccggcggcgctgcgcgtgggcgaggtatcctttgcgcatttgccgggcgccttttccgcttccgaaacggcgtaccggtacgccgcgctgtattacggccaaagccccgaggcggcgacggggtatgcgggcgggctgatggcccgctgcgctgcgtccgccgtttacccggcggaggcgagggcctttttcgccgaaacggcgcggcgggtggccgacgccgtttcggatggccggggcaggccgctggagccggacatgggcgccagcggcgaaaacggggcggaagcctttatggcgcagtggctgggccagctatccgccttgctggaggcggcgcggccctcgttttttgagccttccgcgcgctttaagaaggaagtctgcgacgccatattgtttatccgcttccactacaccgaaaagattacgctggacggcgtggcggaggccgtgagccttaaccggagctatttatgccgcgtgtttaagaaggaaacaggcgagcatatgttccgctatatcaaccggctgcggatgcagaaagccgccgcccttatggaggagggcggcagctacgtgcgcggggtttccgaggccgtgggcatggacgaccccttttactttgcgcgggtttttaagaaataccatggggtatcgcctagcgagtaccgggcggccgcagcggggcgcggcacggtgtag

SEQ ID NO: 28364 - protein, 257 aa, Unknown
  Obtained from environmental sample
  DOMAIN (153)...(199): Bacterial regulatory helix-turn-helix proteins, AraC family
  misc_feature (1)..(257): Xaa is any amino acid
MAQARQHYRECAQASALFFYPSPPAALRVGEVSFAHLPGAFSASETAYRYAALYYGQSPEAATGYAGGLMARCAASAVYPAEARAFFAETARRVADAVSDGRGRPLEPDMGASGENGAEAFMAQWLGQLSALLEAARPSFFEPSARFKKEVCDAILFIRFHYTEKITLDGVAEAVSLNRSYLCRVFKKETGEHMFRYINRLRMQKAAALMEEGGSYVRGVSEAVGMDDPFYFARVFKKYHGVSPSEYRAAAAGRGTV

SEQ ID NO: 28365 - DNA, 396 bp, Unknown
  Obtained from environmental sample
  misc_feature (1)..(396): n is a, c, g, or t
atgcgcccaggcttcggccttatttttttacccgtcgcccccggcggcgctgcgcgtgggcgaggtatcctttgcgcatttgccgggcgccttttccgcttccgaaacggcgtaccggtacgccgcgctgtattacggccaaagccccgaggcggcgacggggtatgcgggcgggctgatggcccgctgcgctgcgtccgccgtttacccggcggaggcgagggcctttttcgccgaaacggcgcggcgggtggccgacgccgtttcggatggccggggcaggccgctggagccggacatgggcgccagcggcgaaaacggggcggaagcctttatggcgcagtggctgggccagctatccgccttgctggaggcggcgcggccctcgttttttga

SEQ ID NO: 28366 - protein, 131 aa, Unknown
  Obtained from environmental sample
  misc_feature (1)..(131): Xaa is any amino acid
MRPGFGLIFLPVAPGGAARGRGILCAFAGRLFRFRNGVPVRRAVLRPKPRGGDGVCGRADGPLRCVRRLPGGGEGLFRRNGAAGGRRRFGWPGQAAGAGHGRQRRKRGGSLYGAVAGPAIRLAGGGAALVF

SEQ ID NO: 28367 - DNA, 921 bp, Unknown
  Obtained from environmental sample
  misc_feature (1)..(921): n is a, c, g, or t
ttggagcctgttccggctttagcggagaaatggctgctttccgaagataaaactcagtggacttttacattgcgccgtaatgcgcgtttttccaacggcgatcccgtgcgcgcggaagattttcgcgcggcgtggttttctcttattgaacccagcaaagaatctccttattcaagtttttttgacgttatcgagggagcgcgcgaataccgtaacggtaatttaaaagacaaagataaagtcggaataaaagcggttgatcaaagaacgcttgtaataaaactcggctcccccgcttctttttttccggcaatgctttgtcatcattcattcagcccgatacacccttcaatgttaaacaaaacagaatggtctccgtataaagccggaaaaaactggacgcctcctgtttccaacggaccgtatcagattatttctatggataaagaaagcattgttatgcaaaagtcggaacagtattgggactcaaacagggttgcgttaaaaaaaataattattaaatttaccgaaaccggagaagaggccgctcacctctggaattcgggcgaagcgcgctggatttcgggtgaagtaaacacggaagcgttgacggatcgttccgggattcaggtgaacgttatgtttgccacgcattattattttattcgcagcgcggaaaaaccatggaacgatcacagagttcgcagggcgatgattctggttcttccgtggaatgaaatacgcagcagttattttcttcccgctgaaacgctgatttttccaatttcggggtatcctgacgttgagggaatatcggaaaccaattttgaagaagcccagcagttaatgactgaagccggatacaagacggcgcaggatgcccgctcttgttattcccataacgccgtcccgcgatgctga

SEQ ID NO: 28368 - protein, 306 aa, Unknown
  Obtained from environmental sample
  DOMAIN (2)...(305): Bacterial extracellular solute-binding proteins, family 5 Middle
  misc_feature (1)..(306): Xaa is any amino acid
MEPVPALAEKWLLSEDKTQWTFTLRRNARFSNGDPVRAEDFRAAWFSLIEPSKESPYSSFFDVIEGAREYRNGNLKDKDKVGIKAVDQRTLVIKLGSPASFFPAMLCHHSFSPIHPSMLNKTEWSPYKAGKNWTPPVSNGPYQIISMDKESIVMQKSEQYWDSNRVALKKIIIKFTETGEEAAHLWNSGEARWISGEVNTEALTDRSGIQVNVMFATHYYFIRSAEKPWNDHRVRRAMILVLPWNEIRSSYFLPAETLIFPISGYPDVEGISETNFEEAQQLMTEAGYKTAQDARSCYSHNAVPRC

SEQ ID NO: 28369 - DNA, 1044 bp, Unknown
  Obtained from environmental sample
  misc_feature (1)..(1044): n is a, c, g, or t
atggcgaattacggagacttaaccagagttctggaagagcagataaaaaactggaatggcaaggccatcaccgaatcttcggggtttgttgtacaggcaggcgacggggttgtcagcatacacgggctttccagggccatttacggggagcttttggaatttgcctcgggagcttccggtatcgcgcttaaccttgaagaagacggcgtgggatgcgtccttctttccggggattccgccgtaaaggacggggatgaagtaaagggcacaggcagggtagtgtccgtgccgtcaggccattcccttatcggcagggtgctaaacccgcttggcaaaccggtggacggcaaggggcctgtccaggcggaagaatggctgcccgtggaagcgccagccgcgcctgtaatagagcgcggcagtgtggagacccccatgcagacaggcatcctctcggtggactccatgatccccatcggccgggggcagagggagctaattattggcgacaggcagaccggcaaaaccgccctcgccgttgacgccattgccaaccagaagggcaaagggatgtactgcgtttactgcgccatcggccaaaagtcatcatcggtagccgccattatcaaaacctggaaaaagcggagccatggattatacctttgtggtacttgcttcagcttcggattcggcggcccttcaatacctggccccttattcggcggtggcaatggccgaacactttatgcacaaaggcaaggacgtgcttgtagtctacgacgatctttccaagcacgcggtagcgtaccgtacaataagcctcctcttgcgaaggccgccgggcagggaagcttttcccggcgacgtgttctacctgcactcccggcttttggaacgggcggcaaagctttcggaggcgcggggcggcggttccattaccgcactgccaatcgtcgaaacccaggccggggatatttcgtcttacattcccaccaatgtaatttcaataacagacggccagatctttttggacacagagctttttaa

SEQ ID NO: 28370 - protein, 347 aa, Unknown
  Obtained from environmental sample
  DOMAIN (147)...(325): ATP synthase alpha/beta family, nucleotide-binding domain
  misc_feature (1)..(347): Xaa is any amino acid
MANYGDLTRVLEEQIKNWNGKAITESSGFVVQAGDGVVSIHGLSRAIYGELLEFASGASGIALNLEEDGVGCVLLSGDSAVKDGDEVKGTGRVVSVPSGHSLIGRVLNPLGKPVDGKGPVQAEEWLPVEAPAAPVIERGSVETPMQTGILSVDSMIPIGRGQRELIIGDRQTGKTALAVDAIANQKGKGMYCVYCAIGQKSSSVAAIIKTWKKRSHGLYLCGTCFSFGFGGPSIPGPLFGGGNGRTLYAQRQGRACSLRRSFQARGSVPYNKPPLAKAAGQGSFSRRRVLPALPAFGTGGKAFGGAGRRFHYRTANRRNPGRGYFVLHSHQCNFNNRRPDLFGHRAF

SEQ ID NO: 28371 - DNA, 384 bp, Unknown
  Obtained from environmental sample
  misc_feature (1)..(384): n is a, c, g, or t
atgatccagaaagccctttatgaaggaggggattttttttgtttcgatatccataagatggccgttcacagccgtgaaaagaataacgtattgctctgctgttgtataaggcgagaactgggtttgcttaagtacttccataagccgttccccctgggccagttttgtttgcgttgccttgtccagatcgcttccgaactgggcaaaggccgccatctcgcggtattgcgccaaatccagcctgagcctgcccgctattttacgaatggctttgaactgcgcggagccgcccaccctgctgaccgaaaggccgacatcaatggccgggcgaaaaccggaattaaaaagctctgtgtccaaaaagatctggccgtctgttattga

SEQ ID NO: 28372 - protein, 127 aa, Unknown
  Obtained from environmental sample
  misc_feature (1)..(127): Xaa is any amino acid
MIQKALYEGGDFFCFDIHKMAVHSREKNNVLLCCCIRRELGLLKYFHKPFPLGQFCLRCLVQIASELGKGRHLAVLRQIQPEPARYFTNGFELRGAAHPADRKADINGRAKTGIKKLCVQKDLAVCY

SEQ ID NO: 28373 - DNA, 1167 bp, Unknown
  Obtained from environmental sample
  misc_feature (1)..(1167): n is a, c, g, or t
atgaaaaaggtatatattgattacaacgccacaactccattaaggcaggaagtaaaagccgcaataacagacgacttggaaatatacggcaacgcttccagtatgcacgcttcgggaagactggctcacacaagggtagagcaggcaagaacagccgttaaaaatcttatcggcgcaaagggcggaacaataatttttacatcgggcggatcggagtccaataataccgtctttcaaacaatgcggcaattaatcgatacgcgcgcctcgaaagaccgtaatgaatttattactacggctatagaacatccgtgcgtaatgaattccgccgccttcttaaaagattcagggtataaagttaccgttctgcccgttgatgaatacggaaaacttaaaatcagcgaacttgaaaaagcgcttaacgataaaacattgtttgtgtccgtaatgacggctaacaatgaaatcggcactatacaggatattaaagaaattaccgctcttgtaaagaaagccggcgcgtatatgcacacggacgcagtgcaagctgtcggaaaaatccccgtaaacgcagaagagcttggagtggattatcttacaatgtcggcgcataagatttacggtcccaagggagtaggcgctttatatgcaagaaaaggcgctccgctgtctccgttggtacacggcggtcatcatgaagacggccttagagcggggacttacaataacgcggggattcttggtttcggaaaagcggcggaaattgccgcctcctctatagacagatacgcttcgtattttctgcctctgcgcgaaaaactgcgcagcggtttatcggaaaaaatccccaatataaagataaacggacatcctgttgatacaatcccgaatactttaaacgtttcttttcccggcgcggagggggaggcgattctgctttccatggatatgcagggaattgaagcctctacaggttctgcctgcgcgtcaggaagccttgaaccttcgcacgttcttttggcgacaggcgtagggccggaacttgcgcacggttcgatccgtttcagcatggggtggggtatcacggaagacgatattgattatataattgaaacgcttccgccgattatcgcgcggttaagggcaatgtcaacattgtctgtttag

SEQ ID NO: 28374 - protein, 388 aa, Unknown
  Obtained from environmental sample
  DOMAIN (7)...(304): Beta-eliminating lyase
  misc_feature (1)..(388): Xaa is any amino acid
MKKVYIDYNATTPLRQEVKAAITDDLEIYGNASSMHASGRLAHTRVEQARTAVKNLIGAKGGTIIFTSGGSESNNTVFQTMRQLIDTRASKDRNEFITTAIEHPCVMNSAAFLKDSGYKVTVLPVDEYGKLKISELEKALNDKTLFVSVMTANNEIGTIQDIKEITALVKKAGAYMHTDAVQAVGKIPVNAEELGVDYLTMSAHKIYGPKGVGALYARKGAPLSPLVHGGHHEDGLRAGTYNNAGILGFGKAAEIAASSIDRYASYFLPLREKLRSGLSEKIPNIKINGHPVDTIPNTLNVSFPGAEGEAILLSMDMQGIEASTGSACASGSLEPSHVLLATGVGPELAHGSIRFSMGWGITEDDIDYIIETLPPIIARLRAMSTLSV

SEQ ID NO: 28375 - DNA, 738 bp, Unknown
  Obtained from environmental sample
  misc_feature (1)..(738): n is a, c, g, or t
ttgaaaaagtggtccctcgacgggctgcctattattccggaacaggtcaaatacaaaccggtcgaaaaaaccaaagcccagctcgctgttgttaaaagctgttttgcccggcataaaaacgatccttttctgcttgccacggatgcggaacgcgaaggggagctcatcggcgcggaaatccttgactatgtaggttttgccggttatgccgtcgccaggcgcttctgggtgtccgaagcccttactccggaggttatcaaaaaaggcatagcaaacgccaaaccgcttgcggaatataaaccctaccgcgaccagggttttgcccggcagtttgccgactggctgattggtatgaaccttacccgcctggccacgctcaaatcaaataaactgctgcatttcgggcgcgttcagacggccgtcctgggcgctgtttatgaacgggaaaaatccatacaaaattttacttctgaaaaatattatgaagtaattgccgccctcgatacaaaaacccccgccctggtaaaactcataaatccggacaatgaagaattccctttccgtttcaatgaaaaatcaagtcttctccgggagataatgggaaaaatatcatctttaacttcaggggaaataaccgaagtaaaaaagaaaagaaaacggtccagccgccgcagctttttaatcttaccgccctgcagaaagaagcgcacaaacagtacggtatctccgccgcgataa

SEQ ID NO: 28376 - protein, 245 aa, Unknown
  Obtained from environmental sample
  misc_feature (1)..(245): Xaa is any amino acid
MKKWSLDGLPIIPEQVKYKPVEKTKAQLAVVKSCFARHKNDPFLLATDAEREGELIGAEILDYVGFAGYAVARRFWVSEALTPEVIKKGIANAKPLAEYKPYRDQGFARQFADWLIGMNLTRLATLKSNKLLHFGRVQTAVLGAVYEREKSIQNFTSEKYYEVIAALDTKTPALVKLINPDNEEFPFRFNEKSSLLREIMGKISSLTSGEITEVKKKRKRSSRRSFLILPPCRKKRTNSTVSPPR

SEQ ID NO: 28377 - DNA, 687 bp, Unknown
  Obtained from environmental sample
  misc_feature (1)..(687): n is a, c, g, or t
ttgatgaaaatgaggaattatttcatggacttaataatatttagttgttctcccagaccaaagaacaaaagcaatacagccgctattgtagaaagtttcaaaaacggctttttatcaaacggaagattaaatgttggtgtatattatttatatgaacgcaacgaatgggataattttaggaagatatttaaagagaatattgatattatttttgccttgccactgtttgttgaatgtattcccggtctcttaatggaattcattgaatcattagagccaaaaaatgctaaagaaattgttactaaaataagctttattttgcaaggaggttttgaagaagcgtgccagttaagaacgtgtgaaaagtatcttgaaaaacttccgtcttatttaaattgtaaatataacggaacattaattaagggaggtatgtttgccttgtctattgtatccaataacagtaggaataaaatgcttcaaccattttttgatatgggtgaacggtatgcaaaagacagaatgtttgaaaaaacaatcgtaacaaaatttgctgctccagaaaaatactctaaattattatgttttatagccatcattttgaaacctataagtaaaattgcttgggtatttttatctcgtaaattagatgcaaatgggaaattagatgcacgtccttatgaaatataa

SEQ ID NO: 28378 - protein, 228 aa, Unknown
  Obtained from environmental sample
  misc_feature (1)..(228): Xaa is any amino acid
MMKMRNYFMDLIIFSCSPRPKNKSNTAAIVESFKNGFLSNGRLNVGVYYLYERNEWDNFRKIFKENIDIIFALPLFVECIPGLLMEFIESLEPKNAKEIVTKISFILQGGFEEACQLRTCEKYLEKLPSYLNCKYNGTLIKGGMFALSIVSNNSRNKMLQPFFDMGERYAKDRMFEKTIVTKFAAPEKYSKLLCFIAIILKPISKIAWVFLSRKLDANGKLDARPYEI

SEQ ID NO: 28379 - DNA, 741 bp, Unknown
  Obtained from environmental sample
  misc_feature (1)..(741): n is a, c, g, or t
gtgcccgatgaaacagacgaggcggcgcgggacttgcagcggtgccgggaggacgtgagtgaagacctgaggcggatgaagcagcggttgctgaagttcctggtacgccacgggcatatctacgggaacgaaacgggccactggacgcacaagcactggcagtggatggacaagatagagttcggcaacgggcatgagaaggaggtatatgaggagtaccgcagccagatacgggcgttagaggaacggttaacacggctggagcagcggttaacggaaatagcggaaagcccgcggtataaggccgcagtgaacaaaatacgggcgttcaaaggcatagactatatcatcgcattggcggtggtatgcgagataggggacttccggcggtttgcggacgcgaaaagtttcatgtcgtatctggggtttgtgccgagcgagaactcaagcggggggaaacggcatcagggagggatcacgaaggcggggaacgggcatctgaggcggctgcttattgaaggggcatggcattacacgaagagcgcacgggtcgggaagcggctggaacaacggcggcagcacagccctgtaagcgcgatagaggccgccgaccgggcattgcaccggctgcacaagaagtatatccggctgctgatgaaggggaagcataagaacgtggcggtcacggcggtagcgcgcgagcttgcgggctttatctgggcggtgcaggtttccgcgtag

SEQ ID NO: 28380 - protein, 246 aa, Unknown
  Obtained from environmental sample
  DOMAIN (80)...(190): Transposase IS116/IS110/IS902 family
  misc_feature (1)..(246): Xaa is any amino acid
MPDETDEAARDLQRCREDVSEDLRRMKQRLLKFLVRHGHIYGNETGHWTHKHWQWMDKIEFGNGHEKEVYEEYRSQIRALEERLTRLEQRLTEIAESPRYKAAVNKIRAFKGIDYIIALAVVCEIGDFRRFADAKSFMSYLGFVPSENSSGGKRHQGGITKAGNGHLRRLLIEGAWHYTKSARVGKRLEQRRQHSPVSAIEAADRALHRLHKKYIRLLMKGKHKNVAVTAVARELAGFIWAVQVSA

SEQ ID NO: 28381 - DNA, 303 bp, Unknown
  Obtained from environmental sample
  misc_feature (1)..(303): n is a, c, g, or t
atggaaagagaagaaaaaatgtctaccggtatgaagcacggaatcgccatccctcacggcaaatgcgcctctacggaggatctggtcgcctgtatcggtatttccaaaaatcccgtagactttgattctctggataaacagccgtgcagaatcttcatcatgacgctttctccggtggaaaaaacaggaccccatttgcaattcctggcggaagtaagtttattatttaaaagcgcggaaaaacgcgaagaaattataaacgcaaaatctcccgaagaagttctggaaatacttgccgaataa

SEQ ID NO: 28382 - protein, 100 aa, Unknown
  Obtained from environmental sample
  misc_feature (1)..(100): Xaa is any amino acid
MEREEKMSTGMKHGIAIPHGKCASTEDLVACIGISKNPVDFDSLDKQPCRIFIMTLSPVEKTGPHLQFLAEVSLLFKSAEKREEIINAKSPEEVLEILAE

SEQ ID NO: 28383 - DNA, 378 bp, Unknown
  Obtained from environmental sample
  misc_feature (1)..(378): n is a, c, g, or t
atgcagaatcaaaataatatttcgtttataggaaacccttttccccttgaagaagccgaagaacgtttccgcgagcttagaaaagcggggactgctccttttaagctgacaattccatgggcggcgattgagcatgagggagcgggaatctacgacgaagcgtatttggcgtatttgcgaaaaattttaatagcagcggataaagaggggatttccgtttttattgagcctgataaggattcgcaaagcgttccctcttgggctgtaaaagatgaaaataaagacaattacattgctgcgtttaagcacgcgcagcgccgtttaaaaattgcaaagcaatcgcgggttggggggatgttaattaaaatacacggctga

SEQ ID NO: 28384 - protein, 125 aa, Unknown
  Obtained from environmental sample
  misc_feature (1)..(125): Xaa is any amino acid
MQNQNNISFIGNPFPLEEAEERFRELRKAGTAPFKLTIPWAAIEHEGAGIYDEAYLAYLRKILIAADKEGISVFIEPDKDSQSVPSWAVKDENKDNYIAAFKHAQRRLKIAKQSRVGGMLIKIHG

SEQ ID NO: 28385 - DNA, 732 bp, Unknown
  Obtained from environmental sample
  misc_feature (1)..(732): n is a, c, g, or t
atggaattatcagagttagaacaattgcaaaatgaaaattcgaagaatgaacatccgcctgtaaaaattgaacggcggatgaattttcgaaatgtgaaaatggagatagtagctcctctgttttttggattaataggctctcttcttttatgcgcggttgtatccgccgataccgcgattttttccaaagattacggcgcaataagaataagaggcgagcttggggaagacattgaagacagtgatttttttcttgcggtatcggaaagggctcccgaccctattattgaatattaccgcagaagcgaatataaagactgggtaattgatttttttaccgatatttgttcaagcaaggaaatatcgcaggtaattttgatgaacgcggatgaatttgaagtgccggccgcgcttgcctttgccctaagctgggaagagagcaggtttaacccgcgcgctgtttcaaggcctaaccgcgacggcagcatagaccgcggcctgtttcagcttaacaacaagtctttccctgatttggatccgcttgcttattttaacattcgatataatacgcgtgtcggtataggccatctgcgctactgcctggatacaggcggcagcgagatttcggctcttgccatgtacaacgcgggggcgggacggatttcgtctatgggcgcgcctaaggttacgcttaattacataagccgtattctggaaaacagagcaagatag

SEQ ID NO: 28386 - protein, 243 aa, Unknown
  Obtained from environmental sample
  DOMAIN (123)...(237): Transglycosylase SLT domain
  misc_feature (1)..(243): Xaa is any amino acid
MELSELEQLQNENSKNEHPPVKIERRMNFRNVKMEIVAPLFFGLIGSLLLCAVVSADTAIFSKDYGAIRIRGELGEDIEDSDFFLAVSERAPDPIIEYYRRSEYKDWVIDFFTDICSSKEISQVILMNADEFEVPAALAFALSWEESRFNPRAVSRPNRDGSIDRGLFQLNNKSFPDLDPLAYFNIRYNTRVGIGHLRYCLDTGGSEISALAMYNAGAGRISSMGAPKVTLNYISRILENRAR

SEQ ID NO: 28387 - DNA, 558 bp, Unknown
  Obtained from environmental sample
  misc_feature (1)..(558): n is a, c, g, or t
atgcgttacgccgtatttggagttgatccggtttcatgctttaatatcggtatcgcgaaacagcttggaatatcattcggaacatggcaattaatattttgtttcattttacttatcggggtatttatttttgatcgaagcaaaataggttttggaaccgtatacattatgattgccgcaggcttcacatcggatttatttttatggcttttccaaaaaatatattttatggaagcattttctattgagataagaatgattgcctttttgttaggattgattttttactatttaggcgcggctgtttatatagagacaaatatgggccttgcgccttatgacgcggttggaataataatatcggaaaaaataaacagacaaaattggtttagatggataagaatagggacagatgctctatgcgtaattggaggattaataacccaaagcgatgtcggaataggaacattattagccgtattattgggcggacctttaattgcgttctttagaaaaataataatgaaattaaaaatatttaaattgatactaatataa

SEQ ID NO: 28388 - protein, 185 aa, Unknown
  Obtained from environmental sample
  misc_feature (1)..(185): Xaa is any amino acid
MRYAVFGVDPVSCFNIGIAKQLGISFGTWQLIFCFILLIGVFIFDRSKIGFGTVYIMIAAGFTSDLFLWLFQKIYFMEAFSIEIRMIAFLLGLIFYYLGAAVYIETNMGLAPYDAVGIIISEKINRQNWFRWIRIGTDALCVIGGLITQSDVGIGTLLAVLLGGPLIAFFRKIIMKLKIFKLILI

SEQ ID NO: 28389 - DNA, 423 bp, Unknown
  Obtained from environmental sample
  misc_feature (1)..(423): n is a, c, g, or t
ttgaaaaaagcgcaagctattgccgccgatccgcaattgggcgctgaggaaaaattgttatcagtgtttatggcgcaaaaactgaaaaaaccggtaaagaaaaatattttaccgattattcataaacctgccaatgcgttacttcaccagaaaattatttccgaatatgtccttaggcttagtcccattctaactgatattgttcaagaggggatcgctaaaaaagattttaacactccatatcccaaagaaattaccgagatacttttgactgccggtttggttattttcgataccgcctacttccgctggacacaggaagaacagatgcggcgtatttccgcctttatttatactatggaacggctaacgggagcaaaaccgggaagtatggcgcaattatccggtatgtttacacaataa

SEQ ID NO: 28390 - protein, 140 aa, Unknown
  Obtained from environmental sample
  misc_feature (1)..(140): Xaa is any amino acid
MKKAQAIAADPQLGAEEKLLSVFMAQKLKKPVKKNILPIIHKPANALLHQKIISEYVLRLSPILTDIVQEGIAKKDFNTPYPKEITEILLTAGLVIFDTAYFRWTQEEQMRRISAFIYTMERLTGAKPGSMAQLSGMFTQ

SEQ ID NO: 28391 - DNA, 681 bp, Unknown
  Obtained from environmental sample
  misc_feature (1)..(681): n is a, c, g, or t
atgaataaatccatgtataaaacaatagaaaattatatgtatgaatgtatgaaagatgccgcgcatgacccggaacatatttttagggtgttgtatctttcattaaatattgcttcaaaaaggattgaaaaaataaattttgacattttaattgcttcatgtttattgcatgatattggaagagaggaacaatttaaaaatcacaatatatgtcatgcggaaataggcggaataatggctaaagagtttttattaaaagatggctggtcagaaaaagattcagatcatgtaaaaaattgcatttcaactcatagattcaggggaaataatgttcctgagacattagaggcaaaaattttatttgattcagataaactggatgcggcaggttgtttaggtatagccagaaccttaatgtataaaggcattgtaggcaataatttatatgaaataaagaataataaaatatgttttggtgaaaataaaaatgatactgaaacatttttaaaagaatataattttaaattaaaaaatctctatgataatttttatacaaaagaagcaattgaaatggcaaagaatcaaaaagaatgtgcacaattattttataataatttagtagatcaaataatgggaatatacgaatccaagggaataataaatgaatatattactgaataa

SEQ ID NO: 28392 - protein, 226 aa, Unknown
  Obtained from environmental sample
  DOMAIN (23)...(129): HD domain
  misc_feature (1)..(226): Xaa is any amino acid
MNKSMYKTIENYMYECMKDAAHDPEHIFRVLYLSLNIASKRIEKINFDILIASCLLHDIGREEQFKNHNICHAEIGGIMAKEFLLKDGWSEKDSDHVKNCISTHRFRGNNVPETLEAKILFDSDKLDAAGCLGIARTLMYKGIVGNNLYEIKNNKICFGENKNDTETFLKEYNFKLKNLYDNFYTKEAIEMAKNQKECAQLFYNNLVDQIMGIYESKGIINEYITE

SEQ ID NO: 28393 - DNA, 462 bp, Unknown
  Obtained from environmental sample
  misc_feature (1)..(462): n is a, c, g, or t
gtggctgaaggcgttaaggtcattgccgtaaaccgaaaggcgcggcatgattattcggttgacgaagcctacgagtgcggcatagaactgctcggcaccgaggttaagtccttccgtgacggaaagatttcatttcccgacgcctgggccgaggtgatcgacggagaagtgtggcttaggtctttacgcgtcgcggagaatcctttttcatcggtattcaaccacgatcccgaccgtaaaaaacggctccttcttaaaaaagacgagatcaagcggatacgccgcaaggtggaggaaaaaggctatacgcttatccccctgtcgttttactttaaaaaaagcagggtaaaggtggagcttggcctgtgcaaggggaagaaggtttatgacaaacgcgccgacatccgggaacgcgatgtaaagagggagatggcgcgggagttcaggaataaaaacgaatag

SEQ ID NO: 28394 - protein, 153 aa, Unknown
  Obtained from environmental sample
  DOMAIN (6)...(73): SmpB protein
  misc_feature (1)..(153): Xaa is any amino acid
MAEGVKVIAVNRKARHDYSVDEAYECGIELLGTEVKSFRDGKISFPDAWAEVIDGEVWLRSLRVAENPFSSVFNHDPDRKKRLLLKKDEIKRIRRKVEEKGYTLIPLSFYFKKSRVKVELGLCKGKKVYDKRADIRERDVKREMAREFRNKNE

SEQ ID NO: 28395 - DNA, 747 bp, Unknown
  Obtained from environmental sample
  misc_feature (1)..(747): n is a, c, g, or t
ttgaaaataaagaaagcgcactggtgtgccggcttatatggagaaattctatcaattataccttggggaaagaatagcgttcgcgttatttcctcgttaatggtacttcctcctaaaaaatttgaatgggctcttcttgagccggctcatgattgcgctcctgttataaccataggcgagaaccgggcttcgttaacctcgggaaagatcaatgctgtggtggaaagaaaaaactggcccgacaggctggagctttcattttacaatcagaaaggaaaactgctttttaaggaatatgaagcagggggagctttaaaattaaaggcgagaaaatatacgcctctttccggaggcagtttcaaaataaacgcctactttgaatctgaaaccggagagcatctatacggaatgggacagtatcaacaggaatatttcgacctaaagcattgcaaccttgaactggcgcacaggaattcccaatccagcgttccgtttgttttatcaagcctgatgtacgggtttctctggcataacccgtctatcggcaaggtttcttttggagagaactataccgagtgggtttctgaaagctccgagcagcttgactactgggtaacagccggagatacgccgaaggaaatactgtccgcctacgctgacgcaagcggtcatgtcccaatgatgcctgaatatgggcttgggttttggcaatgcaagctccgctacggaatcaggaacagctcctaa

SEQ ID NO: 28396 - protein, 248 aa, Unknown
  Obtained from environmental sample
  misc_feature (1)..(248): Xaa is any amino acid
MKIKKAHWCAGLYGEILSIIPWGKNSVRVISSLMVLPPKKFEWALLEPAHDCAPVITIGENRASLTSGKINAVVERKNWPDRLELSFYNQKGKLLFKEYEAGGALKLKARKYTPLSGGSFKINAYFESETGEHLYGMGQYQQEYFDLKHCNLELAHRNSQSSVPFVLSSLMYGFLWHNPSIGKVSFGENYTEWVSESSEQLDYWVTAGDTPKEILSAYADASGHVPMMPEYGLGFWQCKLRYGIRNSS

SEQ ID NO: 28397 - DNA, 1665 bp, Unknown
  Obtained from environmental sample
  misc_feature (1)..(1665): n is a, c, g, or t
ttggccgagttacagcgcggttacgagcgcataggagccggcgaatatcagcgggcgaatgagctgtttcaggaagcgtcaaattataaacgaaagaaaaaatggtattacacttatgccgaaggtttcagggatcaaaggcgttatctgcttgcggaaaataaatacgacgagcttttaaggttctatccccgggataaaaaaggcgttctggattacgccaacctggaaacgaattacataatgaattacgagaaagccaacaagctccttcagcacgagcttcttgattacgcgcccgacgattatgacgggcttctcgccgccggtgataatttcctcgcgtgggcggattccgatccttcaaaacattatgacaagtacgaagaagcgcgcttctgctacgcaagaatattacagaaaaacggatggacaggcccggtattggaaagaatgctgttgtactttatgcatacggacaacctgaaagaaacgcttactcttagggcatggttcgaaaacaacagcagaaaatacaaacttacgactcctacccttgcggagcttggcggatatcttttggacaaacagcttgaaaaacccaagggcgtgcccaatgcgtatgtcgaaagcatagaaagcgtgcgcgatatgcttttacaggctgtaaaacaagacaatcttctgcccgagcctcattatcaccttgcccgttactataaaaatctgggtaatctccgcgaagaaaggcttactcttgaaaacgccatacgcgcttatgatcttgcgaaaacggaatccgtacggcgcangcttaaccgcgtagacacccattacaggtatgcgaatctactcatcaacaataaggaattcttccccgccgaagaacaatttgtgagaggcatcgagctttacgaagactttatttcaagaaacttaattgcgccgtctccgcagcttggtcagctttatgccgggctgggcgatttggaatattttgtaaaatcgggcaatgtacaggccgcccttaacaactaccacaccgccgaaaaatacggctatgcgccgcctgaaattcaataccgcatgggcgccgcttattatcagcaggaaaggtggggtaacgcgcttgactatttattcaaagcagcggcggaactgcctcaaaacagaaggatactttttgcgcttggaaacgccacatacaagaggggcgactactttgcggcgcagggctactacaaccgcctgctcgacatactcgaaaaccaacgtgtaaggctgcccgtgcttctgccaaacgacagtccccaattcctggagcttggcgaacgcctgatgatggcgcgaaacaacgccgctgtcacatacgaagcgctagcgaagcagacaggaaagcgcgaataccgttcgaaagcgttgtcgctttacgccgattcagcgcgttcatgggacgcaattacccgcaacccacaatccatgacaaggatgactatcggcgacacccccggcgcgcccggtatcaacctaggctaccttaacgccaacaatgctctgcatccctcgcccggctttacaccggaaatctttatccgcatagacagggacgtgtccgaaccttcgcactgggaagagcttgctcctttcggcggattgattaattag

SEQ ID NO: 28398 - protein, 554 aa, Unknown
  Obtained from environmental sample
  DOMAIN (357)...(390): Tetratricopeptide repeat
  misc_feature (1)..(554): Xaa is any amino acid
MAELQRGYERIGAGEYQRANELFQEASNYKRKKKWYYTYAEGFRDQRRYLLAENKYDELLRFYPRDKKGVLDYANLETNYIMNYEKANKLLQHELLDYAPDDYDGLLAAGDNFLAWADSDPSKHYDKYEEARFCYARILQKNGWTGPVLERMLLYFMHTDNLKETLTLRAWFENNSRKYKLTTPTLAELGGYLLDKQLEKPKGVPNAYVESIESVRDMLLQAVKQDNLLPEPHYHLARYYKNLGNLREERLTLENAIRAYDLAKTESVRRXLNRVDTHYRYANLLINNKEFFPAEEQFVRGIELYEDFISRNLIAPSPQLGQLYAGLGDLEYFVKSGNVQAALNNYHTAEKYGYAPPEIQYRMGAAYYQQERWGNALDYLFKAAAELPQNRRILFALGNATYKRGDYFAAQGYYNRLLDILENQRVRLPVLLPNDSPQFLELGERLMMARNNAAVTYEALAKQTGKREYRSKALSLYADSARSWDAITRNPQSMTRMTIGDTPGAPGINLGYLNANNALHPSPGFTPEIFIRIDRDVSEPSHWEELAPFGGLIN

SEQ ID NO: 28399 - DNA, 528 bp, Unknown
  Obtained from environmental sample
  misc_feature (1)..(528): n is a, c, g, or t
gtgatggaagacgcgggcaggggctggcggcaggttgtggcttccccgaaaccaattaacattatcgaggttgataccatcaaggcgctgctggccgaggggcagatccccattgccgcgggcggcggagggattcccgtcgcaatgaaggacggccagtaccgggggatgagcgcggtcatcgacaaggatttttccgcggccaaactcgcggagcttatcggcgcggacatgctgatcatattaacggcggttgaaaaagtcgctgttaactttggcaagccggatcaaaagtggctggacagcatgactgtcgcccaggcggaacagtacatcgcggagaaccagttcgccaaaggctcgatgcttccaaaagtgcaggcctccatcgcttttgtaaaatcacgcggccccggcagcttcggcgccctacagggcgtgggtgaaacccacagcgcgctgattaccctgcttgcaaaggcacgtgacgggatcgccggcaggaccggcacaagaataacgccgtaa

SEQ ID NO: 28400 - protein, 175 aa, Unknown
  Obtained from environmental sample
  DOMAIN (1)...(143): Amino acid kinase family
  misc_feature (1)..(175): Xaa is any amino acid
MMEDAGRGWRQVVASPKPINIIEVDTIKALLAEGQIPIAAGGGGIPVAMKDGQYRGMSAVIDKDFSAAKLAELIGADMLIILTAVEKVAVNFGKPDQKWLDSMTVAQAEQYIAENQFAKGSMLPKVQASIAFVKSRGPGSFGALQGVGETHSALITLLAKARDGIAGRTGTRITP

SEQ ID NO: 28401 - DNA, 480 bp, Unknown
  Obtained from environmental sample
  misc_feature (1)..(480): n is a, c, g, or t
gtgaatttttccgccattgattttatatttatcggattgataggacttttaatgatccggtgtttcttgaaaggttttgttagtgaaattctatcaatggcggccgttgtgcttgggcttcttaccgcgttatttttccataaaaacggaggcgagtttttaagagagcgattctggcccggattaaatgtaattcctgaaattgccgcgtttattattctgtttataattgtttttttagttgtaaaaataatagaaaaaatgattgtcaatataattgaaagggtgagcctttccggagctaacagtttttttgggttgatttttggactggtggaaggcgtagtactgataagtttgattcttttactgttgaagatacaaccgctttttgattcaagctcattgttgcagaatagtttttttgcaaacttgatactgcccttaattaccggaaaggagaaatacttaagtgtttga

SEQ ID NO: 28402 - protein, 159 aa, Unknown
  Obtained from environmental sample
  DOMAIN (5)...(159): Colicin V production protein
  misc_feature (1)..(159): Xaa is any amino acid
MNFSAIDFIFIGLIGLLMIRCFLKGFVSEILSMAAVVLGLLTALFFHKNGGEFLRERFWPGLNVIPEIAAFIILFIIVFLVVKIIEKMIVNIIERVSLSGANSFFGLIFGLVEGVVLISLILLLLKIQPLFDSSSLLQNSFFANLILPLITGKEKYLSV

SEQ ID NO: 28403 - DNA, 885 bp, Unknown
  Obtained from environmental sample
  misc_feature (1)..(885): n is a, c, g, or t
atgacaataagcaccggcgctgataatgcccgcgtaacccttgatacagtggagtatctgcggcgcgaattgggagtacataccgtgctgggtgtttcaaatgtttcattcggactcccgggcagggagaacgttaacgcggtatttttttcccttgccatgagagcgggacttagcgcgggaattgtcaatccgatgaacagcgcgataacagacgcggtatacgcatatcaggcgttaaacggttcggatgaaaattgcacccgttacatcgcccgtttttcaagtcaggaacagccggcagcggccgcagcgaaagatgcggcgcaggaaatgagtctgcaagacacaattatacgcggactaagagaacagtccgcaaaaatggcaagcgccatgagcgccaatacaccgcctatggaaattatcaattcgcatttaattcctgcgctggataaggccggaaaagattatgaaagccaaaggacttttttaccgcagcttttgatgagcgccgaagccgcaaaagctgcgtttgaggctcttgcgttaaaaatgtcaaagcagggcggtgtacagcagaagcgcggtaaagttgtggttgcaaccgtcaaaggcgatgtgcacgatataggcaaaaatatcgtaaagacgctgcttgaaaactataactttcaggtaattgacctcggaaaaaatgtagaaccggctgttgtactggagacggtattaaaagaaaacataatgcttgcaggtttaagcgcgttaatgacaaccacagtaatatatatggaagaaacgatcaaattgctcaaggaaaaagcgccgaattgccgtgtaatggtgggcggggctgtattaacggaaagttatgccgaaaaatag

SEQ ID NO: 28404 - protein, 294 aa, Unknown
  Obtained from environmental sample
  DOMAIN (106)...(192): B12 binding domain
  misc_feature (1)..(294): Xaa is any amino acid
MTISTGADNARVTLDTVEYLRRELGVHTVLGVSNVSFGLPGRENVNAVFFSLAMRAGLSAGIVNPMNSAITDAVYAYQALNGSDENCTRYIARFSSQEQPAAAAAKDAAQEMSLQDTIIRGLREQSAKMASAMSANTPPMEIINSHLIPALDKAGKDYESQRTFLPQLLMSAEAAKAAFEALALKMSKQGGVQQKRGKVVVATVKGDVHDIGKNIVKTLLENYNFQVIDLGKNVEPAVVLETVLKENIMLAGLSALMTTTVIYMEETIKLLKEKAPNCRVMVGGAVLTESYAEK

SEQ ID NO: 28405 - DNA, 1020 bp, Unknown
  Obtained from environmental sample
  misc_feature (1)..(1020): n is a, c, g, or t
ttggcggatgaaggatcgaacgccgacgccgttctttcccttggcaggcatgccggtggagaagaggctgtttcggttgaacagacaggtcttgaggccgcgcaggataaacaggctgaaaaggctgcggtagcaaacgggaaaccgggcgagaacctggaaatcgccaaagtttcttcggaaaaaaccgcagaaaaggccagaaaccgttctgaaaccgttgtaaaaagcgggaacacagttgcggagacgtctgttcagggaacattacagcagtctgaagcgaaaagaaccgttttgggcgaaaaagacggccggaacaggctggatgaggcgcggaacagggacaaaaggcgggcagcgacgctcgaagttcgggatttccgcagcgccggcgccgaaattgtccaaaaagacaatgccgttcaggtaaaagccgggatggaaacccgtccggagcaaggttcggtaaaggaaataacccttgaactgcgcctgcccaaccagggacaggaaaaccagtccgctgcgacttcgtgggaaaccaaagcgggacaagcgtttgaagacatcctcgcgagggaactgcaccagaatctcaacaacgacattgtccgccacgcttcggttattctgcgcgattccagcgaggggacaataaggcttgccctgaaaccggaaagccttggcaatgtaaagatacgcctggaaatggccgaaaacaaaataacagggcgtatcgtcgttgaaagcgaagagaccctgcatgcctttgaaaaggagattacgtctcttgaaaaggcttttatggagtcgggctttgaaggcgctaacctggaaatgtcccttgccgcggacagcgggggcgccgggcaatggcagggaacggaagcgagccagtcccttatgaggctcatagcggcctcccattacgaagccgcctccgccgaatggacggaaatgccggccgctcttgattattactatcaggggacaaggtcggttaacatgctagcttaa

SEQ ID NO: 28406 - protein, 339 aa, Unknown
  Obtained from environmental sample
  DOMAIN (128)...(285): Flagellar hook-length control protein
  misc_feature (1)..(339): Xaa is any amino acid
MADEGSNADAVLSLGRHAGGEEAVSVEQTGLEAAQDKQAEKAAVANGKPGENLEIAKVSSEKTAEKARNRSETVVKSGNTVAETSVQGTLQQSEAKRTVLGEKDGRNRLDEARNRDKRRAATLEVRDFRSAGAEIVQKDNAVQVKAGMETRPEQGSVKEITLELRLPNQGQENQSAATSWETKAGQAFEDILARELHQNLNNDIVRHASVILRDSSEGTIRLALKPESLGNVKIRLEMAENKITGRIVVESEETLHAFEKEITSLEKAFMESGFEGANLEMSLAADSGGAGQWQGTEASQSLMRLIAASHYEAASAEWTEMPAALDYYYQGTRSVNMLA

SEQ ID NO: 28407 - DNA, 456 bp, Unknown
  Obtained from environmental sample
  misc_feature (1)..(456): n is a, c, g, or t
atgaatgtaaacgaagcgtacagagatgcgttcaggctggatgcgaatgagcaggcaaagatcaaccagtatgtgaatgaattcaacaacaagcttaacaacgggcgcaagccccagcaaaacctggggaaggatgacttcctcaaactgctgatcacccagctttcctaccaggaccccacggccccgatgcaggacaaggaattcatcgcgcagatggcccagttctcctcgttggagcaaatgaccagcatgtccagggatttcgccaagcttaccgccattgtaagcggcagcgaggcttcccaggcattgggcaagaacgtggaactggttgaaggggaaaatgtgattcagggaacggtaaaagccgtaacaaggggggaaataccgatggtattggttaacggctcatactataactggaaccaggtgaagaaagtttttgaagagtga

SEQ ID NO: 28408 - protein, 151 aa, Unknown
  Obtained from environmental sample
  DOMAIN (10)...(151): Flagellar hook capping protein
  misc_feature (1)..(151): Xaa is any amino acid
MNVNEAYRDAFRLDANEQAKINQYVNEFNNKLNNGRKPQQNLGKDDFLKLLITQLSYQDPTAPMQDKEFIAQMAQFSSLEQMTSMSRDFAKLTAIVSGSEASQALGKNVELVEGENVIQGTVKAVTRGEIPMVLVNGSYYNWNQVKKVFEE

SEQ ID NO: 28409 - DNA, 456 bp, Unknown
  Obtained from environmental sample
  misc_feature (1)..(456): n is a, c, g, or t
gtgtatgtgggcagcggtaccttcaccatgagcggcggggtaatctccggtaatactaccaccatctcctcctcctccccctcctactactacggcggcggcggtgtgtatgtggtcagcggtaccttcaccatgagcggcggggaaatctccggtaataccacttactcctactcctacacctacggcggcggcggcggcgtgtatgtgagaaatgtctctctctttgaaaaaaccgggggaactatatatggctataccgttggactcagtaagagcaatgtagtgaaaaacagttccggtgttgtacaaaacgaccgaggccatgcggtatatgttgataataataatagcgattatataaaacgcaaggaaacaaccgccggatcaactgtcaatttgtcctacaatgggagacttactcctcctatttggactggagcgtgggactattaa

SEQ ID NO: 28410 - protein, 151 aa, Unknown
  Obtained from environmental sample
  misc_feature (1)..(151): Xaa is any amino acid
MYVGSGTFTMSGGVISGNTTTISSSSPSYYYGGGGVYVVSGTFTMSGGEISGNTTYSYSYTYGGGGGVYVRNVSLFEKTGGTIYGYTVGLSKSNVVKNSSGVVQNDRGHAVYVDNNNSDYIKRKETTAGSTVNLSYNGRLTPPIWTGAWDY

SEQ ID NO: 28411 - DNA, 903 bp, Unknown
  Obtained from environmental sample
  misc_feature (1)..(903): n is a, c, g, or t
ttgtcctccaagcggaaaataagccttgccgcgttagacccagagacgggtgaagaaatacgcgatctggtatcgccgggtgaatttttcggcgttaaatccgcgcttggacactttccgcgcgaagaaaacgccatcgcggtggcggactccgccgcaatgatgttcactgttcccgaatttgaagcgtttgccatatcaaacccaaaaatcattattaaaatgctcaaggtattttccaatcaattgcggcgtgttcacactcagattgcgaaatttaaggcaaacgaaacggtaaaaccggacgaagggcttttcggcatcggggtaaaatacctgaaactcaaacgttatgcccacgcgaaatacattttcagccgttatctggctcattacccgtccggcgcgaaggcggcccttgccgtaaaaaacctccagactgcggaaaaagctattgcaaatgccgttgtcaagattcagcagaaagaaaaagccaaagaacatcgtgaagcgataagctccacttcaaaacatgaaatggatcaggacactgggggtttttcccgttttacacggacattccagagcgatgaaataatttttagtgaatatgaaccgggggatactttctacgttatccggtccggaagggtaaagctgttgaaaaacgaaggggaatctgaacgaagcctggatattctgcagccgccggaaatgtttggtgaaatggcaatacttgaaggctcgccgcgcagcgctaccgccattgctctggacgaagtagaggcgctggaattcaacacgcagaattttgatcttctcatgaccggaaacccgcagattggccttaatttgctgcgggttttttcaaagaggatttacgattcaagcggcgtttcatga

SEQ ID NO: 28412 - protein, 300 aa, Unknown
  Obtained from environmental sample
  DOMAIN (191)...(280): Cyclic nucleotide-binding domain
  misc_feature (1)..(300): Xaa is any amino acid
MSSKRKISLAALDPETGEEIRDLVSPGEFFGVKSALGHFPREENAIAVADSAAMMFTVPEFEAFAISNPKIIIKMLKVFSNQLRRVHTQIAKFKANETVKPDEGLFGIGVKYLKLKRYAHAKYIFSRYLAHYPSGAKAALAVKNLQTAEKAIANAVVKIQQKEKAKEHREAISSTSKHEMDQDTGGFSRFTRTFQSDEIIFSEYEPGDTFYVIRSGRVKLLKNEGESERSLDILQPPEMFGEMAILEGSPRSATAIALDEVEALEFNTQNFDLLMTGNPQIGLNLLRVFSKRIYDSSGVS

SEQ ID NO: 28413 - DNA, 792 bp, Unknown
  Obtained from environmental sample
  misc_feature (1)..(792): n is a, c, g, or t
ttgcttgcggacgaagcccatttgatgaaaaacgccgaaactcgtgtttccaaaacggtgaagcagcttcgctcccaatacagactcgctctttcgggaacgcctgtagaaaaccgtcttgaagacttacgctctgttttcgattttattctgcccggctatctcggagatgcggtgaaattcaaggaacagtaccgcatcccgatagaagttatgcgtagccgcgaaacagcggaagccttgcggaaaataacgtcaccgtttttactcaggcggcttaaaaccgataagaatatcatcaaagacctgccggaaaaaatcgttgccaacgaatacgccgtacttgaaaaagaacaggcagcgttatatgaaaacgttgtagcggaatcaatcaagaaatccgagaaagtcgacccgaaagaaagaatttcccttattttcagtctgctcacttcgcttaaacagatatgcgatcatccgagagtgtacgacaaggaaagtcccgctgtttcaaaactttcaggtaaggcgcagcttcttgttacattactcgaagaaattctcgcaaaccgtgaaaaagctttggtattcagtcagtatgttgaaactctcgactgcctgcaacagatcatcaaaaaagaactgggagaaaatacacttgtttaccacggcggcttgaatcagaaaacaagagcgganattgtcgacagttttcaaaatgacacttcttcgcggattatgcttgtaagtcttaaagccggcgggcttgggcttaaccttaccgctgcttaa

SEQ ID NO: 28414 - protein, 263 aa, Unknown
  Obtained from environmental sample
  DOMAIN (1)...(163): SNF2 family N-terminal domain
  misc_feature (1)..(263): Xaa is any amino acid
MLADEAHLMKNAETRVSKTVKQLRSQYRLALSGTPVENRLEDLRSVFDFILPGYLGDAVKFKEQYRIPIEVMRSRETAEALRKITSPFLLRRLKTDKNIIKDLPEKIVANEYAVLEKEQAALYENVVAESIKKSEKVDPKERISLIFSLLTSLKQICDHPRVYDKESPAVSKLSGKAQLLVTLLEEILANREKALVFSQYVETLDCLQQIIKKELGENTLVYHGGLNQKTRAXIVDSFQNDTSSRIMLVSLKAGGLGLNLTAA

SEQ ID NO: 28415 - DNA, 522 bp, Unknown
  Obtained from environmental sample
  misc_feature (1)..(522): n is a, c, g, or t
ttgtcagacggaacaaaggaagctgaatattgcctgcggttcctgccggaaacgatagagtttgtactcggtcaatgggactttaaatttgcaagaagaagaaaacgccttgcgccaaacgcggagaagccggaattcggctgggaatatcaattcaattacccgatggactgtataaggctgataaaagtatacggcgggtttagcagcagaccgaccgaaagcgaatatgtaccttacgaagtagaaaacggaatgatattaacagacgcgcaggccctgcagataatttatattgcccgacccgatgaccctgaccaattgccgcaatcggtaagaaaagcaatcagtacgcacctcgcttatttattgtcaaccgcactggcgagcaacgaacagttaaccgcattgatagcagcggaaagccagacaacccttgaaatagcaaaacgggtagacgcgcagatgaattacgatccgaatgcggcgggtgagaattttcacacagaggaaagaatttga

SEQ ID NO: 28416 - protein, 173 aa, Unknown
  Obtained from environmental sample
  misc_feature (1)..(173): Xaa is any amino acid
MSDGTKEAEYCLRFLPETIEFVLGQWDFKFARRRKRLAPNAEKPEFGWEYQFNYPMDCIRLIKVYGGFSSRPTESEYVPYEVENGMILTDAQALQIIYIARPDDPDQLPQSVRKAISTHLAYLLSTALASNEQLTALIAAESQTTLEIAKRVDAQMNYDPNAAGENFHTEERI

SEQ ID NO: 28417 - DNA, 372 bp, Unknown
  Obtained from environmental sample
  misc_feature (1)..(372): n is a, c, g, or t
atgaaaatcataactgaaaatgacgcccccctgccgcccggccgaaaaacagtggtaacggtcggcaacttcgacggcgtgcaccgcggccacgctcggttgatcgccagggcggtcggcctcgcccgcgagtccggcgcggcggcggcggcggtggccttcgatccgcacacgcgcaaggtggtctatccggagctctcgactatgctcctgacgaccatatctgagagggccgccctgatggccgaaatgggggtggattacctgtttttggcgcgttttgacgaaaaattcagggaaatggggcaggacgagttcatagaaaaggtttggtcgggaggttgcgggcggcggttggtctcggccatctga

SEQ ID NO: 28418 - protein, 123 aa, Unknown
  Obtained from environmental sample
  DOMAIN (15)...(122): FAD synthetase
  misc_feature (1)..(123): Xaa is any amino acid
MKIITENDAPLPPGRKTVVTVGNFDGVHRGHARLIARAVGLARESGAAAAAVAFDPHTRKVVYPELSTMLLTTISERAALMAEMGVDYLFLARFDEKFREMGQDEFIEKVWSGGCGRRLVSAI

SEQ ID NO: 28419 - DNA, 867 bp, Unknown
  Obtained from environmental sample
  misc_feature (1)..(867): n is a, c, g, or t
gtggacgggtttatctgcgtagacaagcccgtaggcccgtcgtcgttctcggcggcgcggacggtatgcaaggctctcggcgtttccaaaggcggccacgccgggacgctcgacccgatggcgtccggccttctcgtggtcgcgctggggcggtgcacgcggcttcttgagtacctgcccttagagccgaaagagtatgagtttacggcggcgttcggagccgctacagatacgtttgacgcggatggcagggttacggcgcgcagcggcgttattccgacaaaaaggcagttaacggacgcgatgaagttctttttaggagagatagagcagacgccgccgcagtattccgcggtgaagatcggcggggtgcccgcctacaagatggcgcgcggcggcgtctccgtagacatcaaaccgcgaacagtcagcatatattcgttagagatgcgcggttacgccgccgatgaaaaacgggcggatttcgtcgtcagctgttcgggcggcacatacgtcaggacgctggccgtggacatcaccaaagcggcggacgcggaggctgagggccatgtaagcaggctgaggcggacgagggcggggcgtttcgatctgtcgaacgcggtaaaatttgaggaacttgccaacgccggaaattattttattaacgcgtcagccgcttttgatcgggatagaagggtaattgtttacgatgaacaaaaggcggatatatcaaagggcagagaaatagtaattaatagggatggattaaatgatatattgatagcatttgatgaacagggaatgttagcggcggtattgaaaaggatagacggggatcgttatcatccaaataaagtatttgtgtaa

SEQ ID NO: 28420 - protein, 288 aa, Unknown
  Obtained from environmental sample
  DOMAIN (23)...(172): TruB family pseudouridylate synthase (N terminal domain)
  misc_feature (1)..(288): Xaa is any amino acid
MDGFICVDKPVGPSSFSAARTVCKALGVSKGGHAGTLDPMASGLLVVALGRCTRLLEYLPLEPKEYEFTAAFGAATDTFDADGRVTARSGVIPTKRQLTDAMKFFLGEIEQTPPQYSAVKIGGVPAYKMARGGVSVDIKPRTVSIYSLEMRGYAADEKRADFVVSCSGGTYVRTLAVDITKAADAEAEGHVSRLRRTRAGRFDLSNAVKFEELANAGNYFINASAAFDRDRRVIVYDEQKADISKGREIVINRDGLNDILIAFDEQGMLAAVLKRIDGDRYHPNKVFV

SEQ ID NO: 28421 - DNA, 516 bp, Unknown
  Obtained from environmental sample
  misc_feature (1)..(516): n is a, c, g, or t
gtgcctgtcgatctctataccgcggttatgacggacacgggcggctttcgcttttccaacacttgcgggcgggtgctgcgcgtctgcgcggagcttgcggagcttggggtggattgcgccgacgtttacgagcgggtcttctcgcgccacacgccgcaggcgttggcgcttcaggctcggatatggtctactcttaagtttcacttgggcgggcgcgtgtgcagtttggacatgccgcactcgctcttggacgaggttggggcgaagtacagcgattcggaggggatggccgacaacacggtgaccgcgctcggggttgaggtcggggtgatgacgaagcactcgccggaggagacgcacttcagcctgcggtctaaaggttcggtggacgtggggaagctggccaaaggcatatccggcggaggcgggcacagctgcgcggcggggtgtacgataaagaagccttatgatgaggctatgaaggagatgcttggtatattggaaagcgtgctgtag

SEQ ID NO: 28422 - protein, 171 aa, Unknown
  Obtained from environmental sample
  DOMAIN (99)...(166): DHHA1 domain
  misc_feature (1)..(171): Xaa is any amino acid
MPVDLYTAVMTDTGGFRFSNTCGRVLRVCAELAELGVDCADVYERVFSRHTPQALALQARIWSTLKFHLGGRVCSLDMPHSLLDEVGAKYSDSEGMADNTVTALGVEVGVMTKHSPEETHFSLRSKGSVDVGKLAKGISGGGGHSCAAGCTIKKPYDEAMKEMLGILESVL

SEQ ID NO: 28423 - DNA, 828 bp, Unknown
  Obtained from environmental sample
  misc_feature (1)..(828): n is a, c, g, or t
atgggcgcgaaacccaataagggacgtatacatctgccggtttctccgggctgcaatatccgctgtaatttctgcgatcgcgcgttgaataataccgatatacgccccggcgttgcctcggcaattattacacctgatgaagctctggatgtaatccgcagggccgtagctctctgtccggacatcgctgtggctggagtggcagggccgggagacgcgctggaaacgccctacgcccttgagaccttcaggcgcgtaaaacaggaatttccaggaattatcaaatgcatgagcaccaacggactgcttctgccggattttgccgccgagatcattgaaattggcatcgattccctgaccgtcaccgttaacgcggttgatcctgagattcaggcgctgatctgcgaaggcattacctttcacggcaggcaatatgagggaaaggaagcggcggatatcctgatcaagaaccagcttacgggtatccgcagggtcgcggctgagaatataaccgtcaaagtcaatacggttctgattcccgaaatcaacgcgcggcatgtgccggctatagcccggacagtaagcgaggctggggctatgatgtacaatatcattccgctcatcccccagcataaactttcctggtgttccgcgcctgactgcggactaatcagcggagccagggcggaagcggaacaatacatcacggtattccggcattgcagacgctgccgcgccgacgccgctggtatccccggcggtcttgacatcgccgctcagctgtataatcaccaggtaagacaggaaaacaccttctcgcacggctaa

SEQ ID NO: 28424 - protein, 275 aa, Unknown
  Obtained from environmental sample
  DOMAIN (12)...(194): Radical SAM superfamily
  misc_feature (1)..(275): Xaa is any amino acid
MGAKPNKGRIHLPVSPGCNIRCNFCDRALNNTDIRPGVASAIITPDEALDVIRRAVALCPDIAVAGVAGPGDALETPYALETFRRVKQEFPGIIKCMSTNGLLLPDFAAEIIEIGIDSLTVTVNAVDPEIQALICEGITFHGRQYEGKEAADILIKNQLTGIRRVAAENITVKVNTVLIPEINARHVPAIARTVSEAGAMMYNIIPLIPQHKLSWCSAPDCGLISGARAEAEQYITVFRHCRRCRADAAGIPGGLDIAAQLYNHQVRQENTFSHG

SEQ ID NO: 28425 - DNA, 903 bp, Unknown
  Obtained from environmental sample
  misc_feature (1)..(903): n is a, c, g, or t
gtgctggaagcggacatggtgaacatcgtggtacacggccacgatccggcgttttccgaaatggtggtatgcgccgccgaagcgcgggaacttgtcgattacgcgaaaagcaaaggcgcgaaaggcataaacattatcggcctgtgctgtactgccaacgaggtcgccatgcgccacggagtccgcatggcgggcaactttctccagcaggaaaacgccatcctgacaggcgcggtagaaatgatgtgcgttgacgtacagtgcatattccccgccctttcctcgttatgcgaatgttttcatacaaaatttgtcaccagctcgcccatagcccgcatacccggctcaatttacgttgagttcaaacaggacaccgcgttccaacaggcaaaagaccttgtcaaaatggcggttgacaatttcaccaaccgggataaatccaaggtatttatcccccaggtaaagcagagcgccgttgtgggttacgcctgcgaacagatcatcgggcatttggacggtgtcgtcaacagccacaccgatacctttggcagctacaagcccgccgttgacgcgatcaaggccggagtgctgaggggcgcggtggcgattgtcggctgtaataacccgcgcgtgcgcccggactttgcccacttcgagataatgaaagaattgctgtcaaacgacattttaattgtcgcctcaggctgcgcggcgcaggtcgccacaaaagccggcctgttgaacaaagaagcgaaaaaattctgcggggacggcctgcgccgtgtctgcgagcttgtcaacataccgcctattctgcacatgggcgcctgcgttgacatcagccggatgatgcttcttgccacaggcatagccaaagactggggtgtgactcggccgatctga

SEQ ID NO: 28426 - protein, 300 aa, Unknown
  Obtained from environmental sample
  DOMAIN (1)...(300): Prismane/CO dehydrogenase family
  misc_feature (1)..(300): Xaa is any amino acid
MLEADMVNIVVHGHDPAFSEMVVCAAEARELVDYAKSKGAKGINIIGLCCTANEVAMRHGVRMAGNFLQQENAILTGAVEMMCVDVQCIFPALSSLCECFHTKFVTSSPIARIPGSIYVEFKQDTAFQQAKDLVKMAVDNFTNRDKSKVFIPQVKQSAVVGYACEQIIGHLDGVVNSHTDTFGSYKPAVDAIKAGVLRGAVAIVGCNNPRVRPDFAHFEIMKELLSNDILIVASGCAAQVATKAGLLNKEAKKFCGDGLRRVCELVNIPPILHMGACVDISRMMLLATGIAKDWGVTRPI

SEQ ID NO: 28427 - DNA, 876 bp, Unknown
  Obtained from environmental sample
  misc_feature (1)..(876): n is a, c, g, or t
atggatcacatcccgaaggcatggatcagtttcatccgtgctcgcggatcacttttaccgtgttcatgggtctttagggccgcagtttacaatgggtgttcaaataaacccgttttactgttcaagtattttcacacaagcgttcaaatgtttcacatttggtgttcatttctgaccggaatatgcaacggatacgtatatcatgtatgccgtgattccagcgcgaatgccggacgtgaaaaagcggcgaaaacggcgaagaaggataaaaaaccgcctaaaaagcgcggcaggcccggtaaaaacgaggtaaagcctgtaaaagagcccgccgtcattgagaagcaggcactacaggacgcggcagcctcgattggggagctggacaaggcctgctcatggggatgcaaaatgaacagccaggggcacggctacacatggaaaggctacaagctccatttggacgtttccgatttaggcttcccgcttacggccgtcgtcaccgcggcaaacgtccatgacagccagcttgccatacccatggaaaaacttacggaaagcaaagtggtattttgctacagcctcatggatagcggatatgacgctcaagccatagacgctttcatccgaagctgtggaagaatccctatcatagacccgaacaaaaggaacgataaaaacaggccgcctcttgaccctgcaaagcaggagcggtacaaaattcgtacgacggtggagaggagctactcgcatttgaaagaccacctgcttcccaaaaacatattcgtaaaggggcatgagaaagtgtcattggttctgatgtcggctgttatttgcctctctgttttgaagcatctccaatacttcgtttgctga

SEQ ID NO: 28428 - protein, 291 aa, Unknown
  Obtained from environmental sample
  DOMAIN (125)...(282): Transposase DDE domain
  misc_feature (1)..(291): Xaa is any amino acid
MDHIPKAWISFIRARGSLLPCSWVFRAAVYNGCSNKPVLLFKYFHTSVQMFHIWCSFLTGICNGYVYHVCRDSSANAGREKAAKTAKKDKKPPKKRGRPGKNEVKPVKEPAVIEKQALQDAAASIGELDKACSWGCKMNSQGHGYTWKGYKLHLDVSDLGFPLTAVVTAANVHDSQLAIPMEKLTESKVVFCYSLMDSGYDAQAIDAFIRSCGRIPIIDPNKRNDKNRPPLDPAKQERYKIRTTVERSYSHLKDHLLPKNIFVKGHEKVSLVLMSAVICLSVLKHLQYFVC

SEQ ID NO: 28429 - DNA, 528 bp, Unknown
  Obtained from environmental sample
  misc_feature (1)..(528): n is a, c, g, or t
atggaggatattgaataccaaagtgaccgtaaactaagcaaagaacatttactgcagctttcaacttgttctttcatcaatgaaaagcacaatatcattatcctcggagcaacaggcgctggtaaaacgtatttaagctgcgcctttggaatggctgcctgccgtcatttcttttcggtaaggtacatacgtttgcctgatttactggatgagctttcggtagccaggggcgagggcatattccagaaggttatgcaaggctataaaaaaatggacctgcttatccttgacgaatggcttctggttccgctttcgcctactgaaagccgcgacctgctggaattggtagagtcgcgctattcccgctgttcaaccattttttcaagccaatttgacgtttccggttggcatacaaaaattcccgatgtcccgctgtcagaagcaattctcgatcgtattgtccataactcttataccgtaataattggcggtgaagaatcaatgcgcaagcgaaaaggcatctcataa

SEQ ID NO: 28430 - protein, 175 aa, Unknown
  Obtained from environmental sample
  DOMAIN (1)...(160): IstB-like ATP binding protein
  misc_feature (1)..(175): Xaa is any amino acid
MEDIEYQSDRKLSKEHLLQLSTCSFINEKHNIIILGATGAGKTYLSCAFGMAACRHFFSVRYIRLPDLLDELSVARGEGIFQKVMQGYKKMDLLILDEWLLVPLSPTESRDLLELVESRYSRCSTIFSSQFDVSGWHTKIPDVPLSEAILDRIVHNSYTVIIGGEESMRKRKGIS

SEQ ID NO: 28431 - DNA, 1542 bp, Unknown
  Obtained from environmental sample
  misc_feature (1)..(1542): n is a, c, g, or t
ttgcttactctggaaaacggcctgtacaatccgctccagggagtattggattacattgagaatctggagcaaaaggcggaatcggcggatgaatcggcgaaagaaataaaggaattaaaaaattttgttttggaaaaagaagcggaggcgggcagccttatggactttaccctttcacgcgtcgatgagcttactctgcggaaaacgcttttttgtcctgaggaactgctgccgggcatcggaacctttcccctgctgttaggcgatacggcacgtcttgcccagtgtttctccctgattcgcgaacagttttccggcggggacttgcccgccgggtattcagccgggatggactttagcggccttattatcacgttccggggcagacccggcagcggaaaaacagggaaggcccggcacttcagtctgctcctggtggaacggattatcctgatgcatgggggcgaattttcaatcgataatgaaagctgtactattaaactgccttggacgaccctaagcggacaggattcatcgacaaaacccatcagcccccaggatcatattctcgttttgggcgatccttcttttctgcctgagaatttttttaccctgccccgtgtctatgattcggaaaaagcgccgcgtgaccgtatcgcttttattgtctggaacgcctcaggccgcaagtgtcgaagagacggtaaaagttacggccttacagcatatcggcgaatttgccgcagtgcctttctttgctacggtgaacctggtgacggaactttaggcgttaaatcttccataattgacgcggtagaattcgtcttaaagccatcgcaaaaaggagccgtcttgtgcatcggctctcaagagcctggcgcggaacagcttttctccgattatggcgatggcggtattgagcgcatacacattgattccatggcggcttttaacgagactgtgtccgcgatacagccttcgctcgttgtttttaactcgcttaatccggcaggcgctgcggcggtgcgtcaacatcccctgacaataatgcttcccattgtcatgataagcagccgcataaacaaagccgccgatgtgatgaggttaagccagtatcccaggctcattatctgtcacagggcggttgcctcttcatcagaattcagagcgcgcctagtagccctgaccggcagggatgaaattctgcctccgcacacaggcgtactggtaaagaaggcgatactttattttgatcagaatgtcgaatctcagatttcccgctggaaactggcggacagcgttaatgtcaacgaggactacctgacaaggatttttcaccgtgaaatgggaatgtcgccgtgggattaccttaaccgtttaagggtttttcttgccgccgaatttctaaggcaaaccgacaagaccattcaggatattgcctggcagaccgggtttaacgatcaagcctatttttgccgggttttcaggaaaatatacggcgtctctccaaaacaactgagaaaagtcggaataatccaataa

SEQ ID NO: 28432 - protein, 513 aa, Unknown
  Obtained from environmental sample
  DOMAIN (412)...(458): Bacterial regulatory helix-turn-helix proteins, AraC family
  misc_feature (1)..(513): Xaa is any amino acid
MLTLENGLYNPLQGVLDYIENLEQKAESADESAKEIKELKNFVLEKEAEAGSLMDFTLSRVDELTLRKTLFCPEELLPGIGTFPLLLGDTARLAQCFSLIREQFSGGDLPAGYSAGMDFSGLIITFRGRPGSGKTGKARHFSLLLVERIILMHGGEFSIDNESCTIKLPWTTLSGQDSSTKPISPQDHILVLGDPSFLPENFFTLPRVYDSEKAPRDRIAFIVWNASGRKCRRDGKSYGLTAYRRICRSAFLCYGEPGDGTLGVKSSIIDAVEFVLKPSQKGAVLCIGSQEPGAEQLFSDYGDGGIERIHIDSMAAFNETVSAIQPSLVVFNSLNPAGAAAVRQHPLTIMLPIVMISSRINKAADVMRLSQYPRLIICHRAVASSSEFRARLVALTGRDEILPPHTGVLVKKAILYFDQNVESQISRWKLADSVNVNEDYLTRIFHREMGMSPWDYLNRLRVFLAAEFLRQTDKTIQDIAWQTGFNDQAYFCRVFRKIYGVSPKQLRKVGIIQ

SEQ ID NO: 28433 - DNA, 855 bp, Unknown
  Obtained from environmental sample
  misc_feature (1)..(855): n is a, c, g, or t
ttgccgcaacccaaacagcctgttttgaaaatcgacgggaaggaaaactccgatgtttatttacagtcgcttgatattcaagtggaggtaaccggaaatatcgcctctacgcgttacacaatggttttcaaaaacagaaccgaccgtattttagagggagcactgacatttccgttgccggatgagcgtagcgtaacctattacgcgttggatatcaacgggcacatgcgcgaagccgtgcctgtggaaaaggctcgcgggacgcgggtttttgaggaaatagagcggcggcgtgtagaccctgggttgcttgaacgagtggagggcaacaacctccgtacgcgtatctaccccatccccgctaagggaacgcgcaccgtttcaatcggttacgatgaggaattgacgcttgaaaaagatttattgcaatatcgaataccgttggattacctcgattcgctcgaaaaattcaccgtaaccgcgaccgtttggaaaagcggcgtcaaaccgcttgtttcggattccgccgatgatttacgctttgacaaaaccggcgaaaactatgtcgcttcgtttgtccgcgaaaattaccgccctgcccgcgcgttgaacttctcgctgcccgcccccacagacattccgcaaattataatgcaaccggcgcagggacgttactatttcttcgcgtctgtcacgcctattttggaaacgcgtaaaaagcaatggagcaataatatagcaatcatttgggacgtttcgctgagcggtctgcaacgcgatctaaaacgtgaattggagatacttaacattatttttgccgaaaaaaggacgcgaaagcccatctttatttcttga

SEQ ID NO: 28434 - protein, 284 aa, Unknown
  Obtained from environmental sample
  DOMAIN (17)...(134): Vault protein inter-alpha-trypsin
  misc_feature (1)..(284): Xaa is any amino acid
MPQPKQPVLKIDGKENSDVYLQSLDIQVEVTGNIASTRYTMVFKNRTDRILEGALTFPLPDERSVTYYALDINGHMREAVPVEKARGTRVFEEIERRRVDPGLLERVEGNNLRTRIYPIPAKGTRTVSIGYDEELTLEKDLLQYRIPLDYLDSLEKFTVTATVWKSGVKPLVSDSADDLRFDKTGENYVASFVRENYRPARALNFSLPAPTDIPQIIMQPAQGRYYFFASVTPILETRKKQWSNNIAIIWDVSLSGLQRDLKRELEILNIIFAEKRTRKPIFIS

SEQ ID NO: 28435 - DNA, 489 bp, Unknown
  Obtained from environmental sample
  misc_feature (1)..(489): n is a, c, g, or t
atgaacgtcaccatccagaacctgagcaaggccttcggcaaccgcgacatcctggccgatttttctctggacatggattctggcgtccgcctgtgcgtgtgcgggccgaacggctgcggcaaatccacgctcttgcggcttctggccggcgaggaaacgcccgattccggccgcgtcatcctgccgcgcggctgccgcgtgggctatgtggcccaggatttggacgaaaccgcgctggatgcttccctgcttgcctgggtgcaggacgttctgcccgactggcgcgagttttgggccgcatgggaacacgctgcggccggcgccgacaagcccgccctgatccggctggccgcgcgccaggcagaattggaagcgcagtacggctacaaccctgagcaggcggccaagaccgtgctttccggcctgggtttcgccgcggcaaaatggcacctgccgctgcgcatgtcttccggcggcgctcgcagataa

SEQ ID NO: 28436 - protein, 162 aa, Unknown
  Obtained from environmental sample
  DOMAIN (28)...(156): ABC transporter
  misc_feature (1)..(162): Xaa is any amino acid
MNVTIQNLSKAFGNRDILADFSLDMDSGVRLCVCGPNGCGKSTLLRLLAGEETPDSGRVILPRGCRVGYVAQDLDETALDASLLAWVQDVLPDWREFWAAWEHAAAGADKPALIRLAARQAELEAQYGYNPEQAAKTVLSGLGFAAAKWHLPLRMSSGGARR

SEQ ID NO: 28437 - DNA, 690 bp, Unknown
  Obtained from environmental sample
  misc_feature (1)..(690): n is a, c, g, or t
gtggaagaaatcattctggaatgccgcaaacaccacatcaccagggtggatattctgggctttgaatttgaaatgggcctgttccccaacgtgctggacgaggcgcgggccaagggcatagacatcgcgcccaagaacatcccaagggaagtattcgacaagcgggctgtggaaaagaatcaggtggtttttcacgatgttgccttcatcgaggtcaagccccattatcgcaaaaacagcctcgccgtgaaactgacggatttttccgtattctattcacaggattccgcggcagccgccgaagcgtccctgaaagacaaaagcagcaagatcgtggtggaacaaggccagatcatcaagatcagcaaggacaaaaacggcatcgtcgcccgcgagcggctaaccaagcactggacggactggattgactactggtctgtggactttgactttgagagcaagcgcgagatcatccgcgtcaaaaacccggataccggcgaaattgaggagcagtggacgggcgattttatctttgaaaacgattggcagagcttccgcaccaagaaagaccgcacgctggaactcacgagcgtgttccaggaaatgccctgcggcaggcgcaaggtggccgtcaaggtggtggacatcttcggcaacgatacgatgaccctcattgaggtgagaatataa

SEQ ID NO: 28438 - protein, 229 aa, Unknown
  Obtained from environmental sample
  misc_feature (1)..(229): Xaa is any amino acid
MEEIILECRKHHITRVDILGFEFEMGLFPNVLDEARAKGIDIAPKNIPREVFDKRAVEKNQVVFHDVAFIEVKPHYRKNSLAVKLTDFSVFYSQDSAAAAEASLKDKSSKIVVEQGQIIKISKDKNGIVARERLTKHWTDWIDYWSVDFDFESKREIIRVKNPDTGEIEEQWTGDFIFENDWQSFRTKKDRTLELTSVFQEMPCGRRKVAVKVVDIFGNDTMTLIEVRI

SEQ ID NO: 28439 - DNA, 810 bp, Unknown
  Obtained from environmental sample
  misc_feature (1)..(810): n is a, c, g, or t
atgttacaatgcggcatggcgttaaactgcggcattgtcgggcttcctaatgtgggaaagtccactattttttcagcgttaagttccgctccggcggaggcggcaaattatcccttttgcacaataaaccccaatatagggattgctaacgtaccggactcgcggctggacactctctgtgctatttttaaaccgcaaaggacagttccggcagcagtcgagtttgtagacatcgcggggcttgttaagggtgcgtcaaaaggagaaggactgggcaatcagtttctttcccatatccgggaaacgtccgtttacgcgcacgttatccgctgttttgaagacggcgatgttattcatgtcaacaataaagtcgaccctgcctccgacatggaaacaatagacattgagcttgcccttgcggatatgcaaacatccgcaaagaggcgcgagcgcgccgaaaagtcgctgaagaaccaggccgaaaagaaaaacgccgagttcgtactctcaatccttgataaaattcacccggggcttgaggacgcgcagcctatccgcacactcggtttaactgacgatgaaaaagccgctgtatacgactgccatttcattaccttaaagccgcagctttatgtgtgcaacgtagatgaggaaggcattcgctcaggcagcgtccacatcgaaaccgtaaagaaacgcgctgcaagcgaaggaactgaagctgtctgcatttgcggaaagtttgaagcggaactctccggcattgaaaaccccgatgacaaaaaagcctttcttgaggaactgggctaa

SEQ ID NO: 28440 - protein, 269 aa, Unknown
  Obtained from environmental sample
  DOMAIN (8)...(125): GTPase of unknown function
  misc_feature (1)..(269): Xaa is any amino acid
MLQCGMALNCGIVGLPNVGKSTIFSALSSAPAEAANYPFCTINPNIGIANVPDSRLDTLCAIFKPQRTVPAAVEFVDIAGLVKGASKGEGLGNQFLSHIRETSVYAHVIRCFEDGDVIHVNNKVDPASDMETIDIELALADMQTSAKRRERAEKSLKNQAEKKNAEFVLSILDKIHPGLEDAQPIRTLGLTDDEKAAVYDCHFITLKPQLYVCNVDEEGIRSGSVHIETVKKRAASEGTEAVCICGKFEAELSGIENPDDKKAFLEELG

SEQ ID NO: 28441 - DNA, 654 bp, Unknown
  Obtained from environmental sample
  misc_feature (1)..(654): n is a, c, g, or t
atgcgttcaaaagagaatgcgcaggattaccgttattttccagagcctgacttactgccattgcaaatcgacgatatgtggctcacgcagttaagagaaaccatgcctgaactggcgcagcaaaaacgtgaacgttatacgcgcgattacggactttccgaatatgaggctcaggttctcactgtacataaaaacatctgcgatttatttgagactgtttcaaagatgagcggacagccgcttgaaacagcgcatcttctgacaggtgaaattatgcgtcttatgaacaatacgaatatcttgcctgaagatttatcattggacgcatgcaaactttcgactctcattgaacttgtttgcgccgggaaaataaaccgtagcgcatataaagaaactgtagaagcggtattcacggacaatgccgatcctcaagcctatattgcggaaaaaggattattaatgattaacgatgacaaaaccgtcatcgaagcggtaaacgctgttttggctgaaaacaatgacactgcggcggactatcgtgccggtaaagaaaaagtattcgggtttttaatggggcaggtaatgaaaaaacttaaaggaaaaggaaaccctgatatcgcaaaaaaaatacttgaagacgcattaaagagttaa

SEQ ID NO: 28442 - protein, 217 aa, Unknown
  Obtained from environmental sample
  DOMAIN (1)...(66): PET112 family, C terminal region
  misc_feature (1)..(217): Xaa is any amino acid
MRSKENAQDYRYFPEPDLLPLQIDDMWLTQLRETMPELAQQKRERYTRDYGLSEYEAQVLTVHKNICDLFETVSKMSGQPLETAHLLTGEIMRLMNNTNILPEDLSLDACKLSTLIELVCAGKINRSAYKETVEAVFTDNADPQAYIAEKGLLMINDDKTVIEAVNAVLAENNDTAADYRAGKEKVFGFLMGQVMKKLKGKGNPDIAKKILEDALKS

SEQ ID NO: 28443 - DNA, 720 bp, Unknown
  Obtained from environmental sample
  misc_feature (1)..(720): n is a, c, g, or t
atgatcgctgttaaagatatttccaaaagttatggagaagttaccgcagtaagaaaggtcgatcttaccgttcctttgggatgtatttacggaattatcggcaggagcggcgcgggaaaatccagcctgctgagagtaatgagccttctggaaacgcctgacatcggcgaggtgtattacaacggcgagagggtggatactttgcgcggtacggcattgctagaacggcgcagaaaaatgggaatgatatttcaaaactttaatctgttatcgtcgcgtaacgtatcggggaatatcgcctaccctttggaaattgcgggcttttcccgaaaacaaatagacagacgggttgatgaactgctggaactggttgatattgccgacaagcgtaaagcgcgcctgcgcgagctttccggcgggcagaagcagcgggtggctattgcaagggcgctggcggcaaaccccgaagtgctgtggtgtgatgaagcgaccagttcccttgatcnccagacaacncgctcgattcttgctttgatccgcagtttacaacagcggctgaaaattaccgttgtgctgataacgcaccagatggaagtaatccgcgagatatgccatgaagtagcggtaatggatgcggggcttattatggaaacgggaagtgtcgcctcggtgtttgaatcgccgcaagccgctgcgacgcaggagttgcttcatgcttag

SEQ ID NO: 28444 - protein, 239 aa, Unknown
  Obtained from environmental sample
  DOMAIN (27)...(213): ABC transporter
  misc_feature (1)..(239): Xaa is any amino acid
MIAVKDISKSYGEVTAVRKVDLTVPLGCIYGIIGRSGAGKSSLLRVMSLLETPDIGEVYYNGERVDTLRGTALLERRRKMGMIFQNFNLLSSRNVSGNIAYPLEIAGFSRKQIDRRVDELLELVDIADKRKARLRELSGGQKQRVAIARALAANPEVLWCDEATSSLDXQTTRSILALIRSLQQRLKITVVLITHQMEVIREICHEVAVMDAGLIMETGSVASVFESPQAAATQELLHA

SEQ ID NO: 28445 - DNA, 1041 bp, Unknown
  Obtained from environmental sample
  misc_feature (1)..(1041): n is a, c, g, or t
ttgaagacagtttttattgtggatgataatgatgttattcttatagcggcagagaaaacatatcaaaagttctacaatgtttatacgcttccgtccgccgccgatatgtntgagcttctaaacgatatatttcnggatctaatcctcctggatataataatgccggaaatggacggtttggaggcaatggctaaattaaaagtcaatacccggtatctggacattcccgtcatgtttttaacaaacaagaatgatgctgtaacagaaacccttggttttgagatgggcgcggtagattttatttccaaaccgttttcagaatctgttttattgaaccggataaaaactcatttaaatattgacgaaattatccgcgaaaggacatctctgcttcagcagaagactgagagccttcaaagattaaaaacaagcatggtgtctgtcatggcggaaatgcttgaaagccgcgacaaaactacgggcggacatatagagcggactacagaatatctgcggctgcttattaacgcgatgatagaaaggaaagtatacgttgacgaattgattaaatgggatattgaattggccgtttcatcagcaaggttgcacgatgtcggtaaaattgccgtttccgatttgatattgaataagcccgccaatctgacaaaagaagaatttgaaataatgaagatccacgcggcggaaggcgagcgtattattgacaaaattataagtcaggcgggagatgaggatttcctgcattttgccaaattgtttgcaagttaccatcacgaacgatgggacggtaaaggatatccacacggattgaaaggcgaggaaattcctttgcagggacgtataatggcaatcgtggatgtttacgatgctttatcatcggcgcgtccgtataagccggcgttaagcagcgatcaggttataaatatcatatgggaaagtaagggcaaacagtttgatcctataataacggatgtattttttgaaataaaggatcaatttgtcaaggtcagttcatgccagtaa

SEQ ID NO: 28446 - protein, 346 aa, Unknown
  Obtained from environmental sample
  DOMAIN (160)...(297): HD domain
  misc_feature (1)..(346): Xaa is any amino acid
MKTVFIVDDNDVILIAAEKTYQKFYNVYTLPSAADMXELLNDIFXDLILLDIIMPEMDGLEAMAKLKVNTRYLDIPVMFLTNKNDAVTETLGFEMGAVDFISKPFSESVLLNRIKTHLNIDEIIRERTSLLQQKTESLQRLKTSMVSVMAEMLESRDKTTGGHIERTTEYLRLLINAMIERKVYVDELIKWDIELAVSSARLHDVGKIAVSDLILNKPANLTKEEFEIMKIHAAEGERIIDKIISQAGDEDFLHFAKLFASYHHERWDGKGYPHGLKGEEIPLQGRIMAIVDVYDALSSARPYKPALSSDQVINIIWESKGKQFDPIITDVFFEIKDQFVKVSSCQ

SEQ ID NO: 28447 - DNA, 1176 bp, Unknown
  Obtained from environmental sample
  misc_feature (1)..(1176): n is a, c, g, or t
ttgatggccgagatcgaatttttggatgatactgccgccggcgctgatatctttacaattgcccatgataacctgggcaagctgattgcgggtacgagcgctatcgctcccattaccgatgaaaaactgctggctcaaattgccaatgacaatccttccattttccttgatgttataaaagggaaggttggagaccctggtgttgaatatacattcggcgttccgtacattgcgcaggcgctggtactctactataacaaagcctattttaccgatgaagacgtaaaaacatgggaagggatgtgggcgaaagcgagagctaaagggaaacagaccgttaccataaacggcgatgacggctacaacaattcgttccttgtgctggcgacaagagcgtctgacggagctcacgccgcaaagatttatgagaaccagcaatttgaaaattgcgatttcacttccgatcttgccgttgcagttatgcaatggggacagaggttctttaccgattccagtccggacggacggactatatacggcgcaaagaaagtatccgactcaggctgggaagttgagttgaaaaatgaggtttccctttccctgatcggcggcgcttggaattttaacgccgcgctggcggcgcttggaagcaacctcggcatagcgccgctgccaagctttaccctcagttcttccgatgtcgccggtacaaatattcccgccggtacggttatgaggtcaggtactttcgccgacacgaaaatgttcgtgatgaaaaagcaccctaagggagataaaaaatccgatcagttacaggacatactcttgtatttgtccagcaagaaacttcaggaagaagcttttgagcaatgcgcaaatcttcccgcctacaaaaatgccagtgccgaatttgcaaagatgaaggaaaatacacctgaggggcttttggcccaggttcagtgcgagatgtttgcaaacggaaggcctcagccattcggagccaatgcgaagatgaacaattggtattattcgcaaggcgctccggctatagtgcttgacattctgacaaacgccaaagattcgggcggtaatcgtttgtatgatacaaccgctaaaatcagggcgggaatggctgtcgtagaaactatctggaaaaccggcaaaaggccggaataa

SEQ ID NO: 28448 - protein, 391 aa, Unknown
  Obtained from environmental sample
  misc_feature (1)..(391): Xaa is any amino acid
MMAEIEFLDDTAAGADIFTIAHDNLGKLIAGTSAIAPITDEKLLAQIANDNPSIFLDVIKGKVGDPGVEYTFGVPYIAQALVLYYNKAYFTDEDVKTWEGMWAKARAKGKQTVTINGDDGYNNSFLVLATRASDGAHAAKIYENQQFENCDFTSDLAVAVMQWGQRFFTDSSPDGRTIYGAKKVSDSGWEVELKNEVSLSLIGGAWNFNAALAALGSNLGIAPLPSFTLSSSDVAGTNIPAGTVMRSGTFADTKMFVMKKHPKGDKKSDQLQDILLYLSSKKLQEEAFEQCANLPAYKNASAEFAKMKENTPEGLLAQVQCEMFANGRPQPFGANAKMNNWYYSQGAPAIVLDILTNAKDSGGNRLYDTTAKIRAGMAVVETIWKTGKRPE

SEQ ID NO: 28449 - DNA, 309 bp, Unknown
  Obtained from environmental sample
  misc_feature (1)..(309): n is a, c, g, or t
ttggttaaaatacccctgcccttcattatatttgttaccactccctaccttataagttctttcatcggcaacttcaacaattttaacgttatctatcttttgactaacggtatgccaaatgtcgtaggaggttataaggccggcgctacagaccttttggtaacgtggcttttcaaattatcagtgaatgaaagggactacaatttaggttcgcttataggaattctgacattcctgtgtacatcaacaataacattgattacctaccgtcattccaaggcttacaaagaggaggacgcttttcaatga

SEQ ID NO: 28450 - protein, 102 aa, Unknown
  Obtained from environmental sample
  misc_feature (1)..(102): Xaa is any amino acid
MVKIPLPFIIFVTTPYLISSFIGNFNNFNVIYLLTNGMPNVVGGYKAGATDLLVTWLFKLSVNERDYNLGSLIGILTFLCTSTITLITYRHSKAYKEEDAFQ

SEQ ID NO: 28451 - DNA, 453 bp, Unknown
  Obtained from environmental sample
  misc_feature (1)..(453): n is a, c, g, or t
atgattaaacaagttcgatcccttaacattgacattattcacacgcatacggaatttactttgtatcttgcgtctcgtattgtcagccgaaaacttaaaatcccttctattcatactatgcacactttttataaagactatttaaattatacgccgtttcttttggaactttattttagaaaaaacatgggcgcttattttcgtcagattttacgcagtcaaaaatgtatgatagcgccttcaaaaaaaataaagaattttcttgaagaaataaaaatgacaatgccgatacatgtagttcccaacggaatagatctttcgcttttttatgaacgctcggacagcatanacaaagaatccgctaactttcgcaagacgtacaatgttgccgctaacgaagaattgatcgtctttgtaggaaggcttggaagcgaaaagaatgttgtacgctaa

SEQ ID NO: 28452 - protein, 150 aa, Unknown
  Obtained from environmental sample
  misc_feature (1)..(150): Xaa is any amino acid
MIKQVRSLNIDIIHTHTEFTLYLASRIVSRKLKIPSIHTMHTFYKDYLNYTPFLLELYFRKNMGAYFRQILRSQKCMIAPSKKIKNFLEEIKMTMPIHVVPNGIDLSLFYERSDSIXKESANFRKTYNVAANEELIVFVGRLGSEKNVVR

SEQ ID NO: 28453 - DNA, 438 bp, Unknown
  Obtained from environmental sample
  misc_feature (1)..(438): n is a, c, g, or t
ttgatgcttgtaggagacggtcntgataagaaatcactgcaggaaaagtgttatgagatgggacttgcgaattccgtcgtgtttaccgggtatttacgctggcccgatgaaatacgccaggtttacacggctgcggatatttttatgagcgcgtcgcacagcgaagttcaccctattacatttatagaggcaatggcggcggggcttcccgtcgtcgccgccgcggatccaagcattgaaggaatggttgtaaacggcgataacggctgggctgtagaaaacgataaattgatgtgggaaaaagccattgatattttagcggacaaggataaaaaagtaaaaatgggaaaacgttccgatgaaatatcaagaacttattcagttgatagttttatcagaagaatgcttgatgtttatgaagaataccggaaacggtaa

SEQ ID NO: 28454 - protein, 145 aa, Unknown
  Obtained from environmental sample
  DOMAIN (1)...(122): Glycosyl transferases group 1
  misc_feature (1)..(145): Xaa is any amino acid
MMLVGDGXDKKSLQEKCYEMGLANSVVFTGYLRWPDEIRQVYTAADIFMSASHSEVHPITFIEAMAAGLPVVAAADPSIEGMVVNGDNGWAVENDKLMWEKAIDILADKDKKVKMGKRSDEISRTYSVDSFIRRMLDVYEEYRKR

SEQ ID NO: 28455 - DNA, 834 bp, Unknown
  Obtained from environmental sample
  misc_feature (1)..(834): n is a, c, g, or t
atgcgaggaagagttgacaatgattctggatcgagaaaagaaacaggagtggaatttgaaagaaaaattgctgcattaaatgcggatattgttatagatttaataaactttacgttggaaaagacaaaatgtatgaccgatgccttgaaaagtacaaatctatcccattatatttattgttcttctatttgggcgcatggaaaagcaactacaatgccggtaattgaggatcaaccaaaatttccgttagatgaatatggtatccagaaagcaaaaagtgaagattttttacataccctttaccgtcaggaaaattttcctgaaactgttattatgccgggacaaatttcaggaccgggatgggttattatgaatccaacagcaaatcatgattattggatttttgatagaattcgatgtgggaaagaaattaacctcccgaacttcggtatggaaacattacaccatgttcatgcagacgatgtagcacaggttttttttaatgcaattaatcaccggaaaggtgcattgggagaaagttttcatgcagtaggagcagaatcaatcacactacttggttatgcacaagcgttatacaattattttggacaggaagaaaaaattaattttcttccgtggaaagaatggtgtaattatacaaaagataaagattttatagatagaacttactatcatattgtcagaagtggttattatagtattgaaaaggggaaacgcttaattgaatataatccaaggcatacacttttggaaactgtgatagaaagtgttgcttatatggttgaacacaaatggtttgataaagataaataa

SEQ ID NO: 28456 - protein, 277 aa, Unknown
  Obtained from environmental sample
  misc_feature (1)..(277): Xaa is any amino acid
MRGRVDNDSGSRKETGVEFERKIAALNADIVIDLINFTLEKTKCMTDALKSTNLSHYIYCSSIWAHGKATTMPVIEDQPKFPLDEYGIQKAKSEDFLHTLYRQENFPETVIMPGQISGPGWVIMNPTANHDYWIFDRIRCGKEINLPNFGMETLHHVHADDVAQVFFNAINHRKGALGESFHAVGAESITLLGYAQALYNYFGQEEKINFLPWKEWCNYTKDKDFIDRTYYHIVRSGYYSIEKGKRLIEYNPRHTLLETVIESVAYMVEHKWFDKDK

SEQ ID NO: 28457 - DNA, 1188 bp, Unknown
  Obtained from environmental sample
  misc_feature (1)..(1188): n is a, c, g, or t
ttgttaggtgtaactttaggctttaattttattggggacgcgctcagggatttctttgatccgtatcatatcggcggaacaagaagcgaaaaatggggattagggaaaatgattcaaaaaatttccctgtttttcaatcgccgctcccatctcaccattccccaaagcgacagcaccgctaccccactacccactacccactatccactacccactactccccttctatttgtccacgatctttcagttaccttcaatgtccaacgcggcagagattatgtcggtattcaggcggtacgcggagtttcatttaccttgcaaaaaggtgaaaccttaggcattgtaggggaaagcggatcgggaaaaagcgtgagtactttggcaattcccgggcttcatcccaagaatgcggatatttacggttcaatttgctatgagggcaaggaattaataaatcttgaaacagaggcgttacgcgaatacagaggaaaaaagattggcatgatctttcaggaacccggacgctcttacgatccgctccaaaacattggcggcgtatttttagaaacgttcagaaacagcgaacctgacattaccaaagaagagtccgcaaaacgcgccgtggcgcttcttgaagaaacagggcttgataacggcatagagcgcctttccaattttccacatcaattttcaggcggacaacttcaacgcatcggcatcgcacttgctcttgcgcagggctgcgaacttttaatcgccgacgaaccgactacggcgcttgatttgacaattcaaaaacagatagtggaacttttaaaaaccttgcggcgaaagcgcaatatttcaatcatctttatcagccacgacattgatttggtagcggaaatatcagatcgcataatggtgatgtacggcggccttataatggaatccgcaggcgcggctgaaattacaaacaacccgcgccacccctacactatcgctctccttgccgcctcgcctcgcttcgggagtcattattctaaagagcgtcttttaaccattccggggaaagtgagcgatccggctaatccgcagtcggggtgtccgtttgcgccgcgctgtgataaagcggggagtgagtgtgcgagggagattccgcagttgctaattaaagatgggcatgagttgcggtgttgtgttgggtaa

SEQ ID NO: 28458 - protein, 395 aa, Unknown
  Obtained from environmental sample
  DOMAIN (309)...(375): Oligopeptide/dipeptide transporter, C-terminal region
  misc_feature (1)..(395): Xaa is any amino acid
MLGVTLGFNFIGDALRDFFDPYHIGGTRSEKWGLGKMIQKISLFFNRRSHLTIPQSDSTATPLPTTHYPLPTTPLLFVHDLSVTFNVQRGRDYVGIQAVRGVSFTLQKGETLGIVGESGSGKSVSTLAIPGLHPKNADIYGSICYEGKELINLETEALREYRGKKIGMIFQEPGRSYDPLQNIGGVFLETFRNSEPDITKEESAKRAVALLEETGLDNGIERLSNFPHQFSGGQLQRIGIALALAQGCELLIADEPTTALDLTIQKQIVELLKTLRRKRNISIIFISHDIDLVAEISDRIMVMYGGLIMESAGAAEITNNPRHPYTIALLAASPRFGSHYSKERLLTIPGKVSDPANPQSGCPFAPRCDKAGSECAREIPQLLIKDGHELRCCVG

SEQ ID NO: 28459 - DNA, 426 bp, Unknown
  Obtained from environmental sample
  misc_feature (1)..(426): n is a, c, g, or t
atgaatttttcagcaaattctttaccgaaacgggagtggcttttgcccccttccgtttcaggaaaaaggcacaataattattttggacgttttacaataaggaggttcttggtgaaaaaactttttcttttgctgctgctggttttaacggcggcggcttttgcgcaggaagcggcacaaccgcaggcggcgcaggcggctcctgaggcgcaaagtacagaggtgtggaagtattttgccgccgcgctggcagtggggatttcctgtattgccggaggcattgccgtcggccagataggttcggcagccatgggggctatgagcgaaaacccggaactttccggcaaggccctgccctacgcgggcctcgcggaagggatttgcctttggggtttcctcgtggcgctttttatccttttggtttaa

SEQ ID NO: 28460 - protein, 141 aa, Unknown
  Obtained from environmental sample
  DOMAIN (76)...(141): ATP synthase subunit C
  misc_feature (1)..(141): Xaa is any amino acid
MNFSANSLPKREWLLPPSVSGKRHNNYFGRFTIRRFLVKKLFLLLLLVLTAAAFAQEAAQPQAAQAAPEAQSTEVWKYFAAALAVGISCIAGGIAVGQIGSAAMGAMSENPELSGKALPYAGLAEGICLWGFLVALFILLV

SEQ ID NO: 28461 - DNA, 750 bp, Unknown
  Obtained from environmental sample
  misc_feature (1)..(750): n is a, c, g, or t
atgttcggcgatatgggacagggcggcgtattgctgcttttgggtctgcttaccggcaagtacagccgtcttgcgaaattcaaaaattattccaccccgttgatatcggtgggcattgcctcaatggtgatgggcctcgtcacaggcgagattttcaccagggaagaactgctggttgcccctaccaggacgcttacccaggccattatcggtaagcctttagacagattagttacagtcatgccccttgccgaaagcggcggcagcgtaattaaacttttctatttttttggctttaccatcggcatgggggttatcctcaattcgctggggctcttaataaatatatacaacaaatgcgcgcttaaaaaatacgaagaggcgttcttcggaaaaacagggctgtccggccttctgctgttctggtacgcgatattcattgccgtgcgctgcattttttttaaagggcgttttgagtatttcgacttggcgggaattctggttccctgcgtctgcatttttttcggcccgattatatggcggtgcataacgcgtgaaaggccgttattgagtcacggcattatgacctttattatggaaggtttcgtcgaggttatggaaaccgcttccggctatatttccaacaccgtcagttttctccgcgtcggggccttcgccctgtcccacggagtattgtcatacatcgtgttccggtttaccgaggagcttgccggaagcggccccccgtag

SEQ ID NO: 28462 - protein, 249 aa, Unknown
  Obtained from environmental sample
  misc_feature (1)..(249): Xaa is any amino acid
MFGDMGQGGVLLLLGLLTGKYSRLAKFKNYSTPLISVGIASMVMGLVTGEIFTREELLVAPTRTLTQAIIGKPLDRLVTVMPLAESGGSVIKLFYFFGFTIGMGVILNSLGLLINIYNKCALKKYEEAFFGKTGLSGLLLFWYAIFIAVRCIFFKGRFEYFDLAGILVPCVCIFFGPIIWRCITRERPLLSHGIMTFIMEGFVEVMETASGYISNTVSFLRVGAFALSHGVLSYIVFRFTEELAGSGPP

SEQ ID NO: 28463 - DNA, 948 bp, Unknown
  Obtained from environmental sample
  misc_feature (1)..(948): n is a, c, g, or t
atgctgcggcgcgtggtgactgtcgtcattttccgcatagatgaaaaacatcagcagctttccgtacatatagaccgttccatcccgcgcgtcntgataggcgacgatcagcgcatagcgcaggtaattacaaacctgctgggaaacgcggttaagttcactcccgaacagggcgcaatcggccttgcggtgcgccttgcggaaaaagtaaacgacgactgtaccttgcaaatttcggtaaccgacacaggaataggcataagccccgaacagcagaaaaaattattccagtcttttgaacaagctgaatcaagcacaacccgcaaatacggcggcacaggtttaggcctcgctatttcaaaaaacatagtggaaatgatgggcgggtcaatctcaattaattcagaagccggaaaaggttccacatttacttttacaattcaggttaagcgcggcaaagaagaaaaacaggatcatttactgggcgtaaatttacaaaacatccgtattttagccgttgacgatgacccggatatattaacttactttacggaaataacgcagatgttcggctcatcctgcgacaccgccataagcggggaaaaagcgctcgaaattatcgaccaaaagggcagttaccatatttattttatagattggaaaatgccgggcatagacggcatacagcttgcccgtgaaataaaatccagaaaatccgaaaattccattgtaacaatgatatccgccgccgaatggggcgcgattgccaaagaagcgagagaagcgggcgttgataaattcctgtcaaagcctcttttcccttctacaatcgcggaagtaatcagagaatgtctgggtgttaatcaacaggcagaaaaaacacagccggccgacattaacggcatattcgaggggcggcgcatctcggccgatctgatccttgggtag

SEQ ID NO: 28464 - protein, 315 aa, Unknown
  Obtained from environmental sample
  DOMAIN (168)...(282): Response regulator receiver domain
  misc_feature (1)..(315): Xaa is any amino acid
MLRRVVTVVIFRIDEKHQQLSVHIDRSIPRVXIGDDQRIAQVITNLLGNAVKFTPEQGAIGLAVRLAEKVNDDCTLQISVTDTGIGISPEQQKKLFQSFEQAESSTTRKYGGTGLGLAISKNIVEMMGGSISINSEAGKGSTFTFTIQVKRGKEEKQDHLLGVNLQNIRILAVDDDPDILTYFTEITQMFGSSCDTAISGEKALEIIDQKGSYHIYFIDWKMPGIDGIQLAREIKSRKSENSIVTMISAAEWGAIAKEAREAGVDKFLSKPLFPSTIAEVIRECLGVNQQAEKTQPADINGIFEGRRISADLILG

SEQ ID NO: 28465 - DNA, 405 bp, Unknown
  Obtained from environmental sample
  misc_feature (1)..(405): n is a, c, g, or t
atgaaattttcatttctaattcggtttataacctttggactttctacaatttatgattatatacagcggataaatgaaaacaatcttcctacatcgcttactctggatttttcaaaaaggcagagagcctgttattttttgttttgggcgtgttattcaatgcgtatagatacggcggcgttttttgaaatattcggagaaaagttagaaaatttattcggcatagatattttattttgcagggcgttcggcttactgaaaaaatcaaatgataaatattgtcttactgacaaaggggcgtatttatatcataaaattgaacaggcttatacgacggcatatatagataaatcatggaatatatcccaattacaggcttttcccgaagaaatcatattaaaatag

SEQ ID NO: 28466 - protein, 134 aa, Unknown
  Obtained from environmental sample
  misc_feature (1)..(134): Xaa is any amino acid
MKFSFLIRFITFGLSTIYDYIQRINENNLPTSLTLDFSKRQRACYFLFWACYSMRIDTAAFFEIFGEKLENLFGIDILFCRAFGLLKKSNDKYCLTDKGAYLYHKIEQAYTTAYIDKSWNISQLQAFPEEIILK

SEQ ID NO: 28467 - DNA, 1143 bp, Unknown
  Obtained from environmental sample
  misc_feature (1)..(1143): n is a, c, g, or t
atgaaagcctttcttccatcagtgtcctccctgaaagacaggttcagccagatttttcttgaagaaagggaatctgtttttctgcgtgaaataagcgcgataggcaaaggcttttctatttccgtagtggcaggggggcctgaactatcgcggaacgacagacggcttcaatttgtttatgccaacaacaggcgcattcaggattactcgctgctgcaggccctggagtacgggcttcagggctggttcccgaacggcgctcaccccatcggcgctgtattcataacgatagatcccgccctcgcggactgcaacatacatccggcaaaacgggaagtgcgtttcgccgatcccggggcaatacaccacgccctcagctccgcgctcagggacttctgccgccacgcgaccctggctgaaaagccgtccggcgcgcaagccgaaattgagttcgcgccaactgaaccggcgtctggtcaaagccgggggcccggccaaagccgaaagtcagaccaacgatccgtgttagacgcaattttcgcggcggaggaagcggcgtcttactccgcgccggagcctgagacaggacttgaggcggataaaagcaaggcgcgctatctgggacggctttttgatctttttattctggtagaaaagaatgaaactctttttgttatcgatcagcacgccgcccatgaaaggatactttacgacaggtttatgagcggaaaaataccaagacaggaacttcttgtggctatacccttcattactgaaagtgccggagacgacagctttctggaagaaaaaaaagaagagcttgccaaactggggatagcgataaaacgaaacgaagacgaatggcttattgaagccctgccttccggctggaaactttcggataaagaaaccgtggaagaaatcctaaatctcaagaatgcgaatgaaaaccccgccgagcgctgggcggctacctactcctgtcgaagcgccgtaaaagacggtgacttccttgacgaaagaaccgcccttgccctggctgaagaagcccttgccctgccgatcagccgctgtcctcacggaagacccatctggctcaaagtaagccgcgacgatctttttaaagctgtaaaacggacttga

SEQ ID NO: 28468 - protein, 380 aa, Unknown
  Obtained from environmental sample
  DOMAIN (24)...(134): DNA mismatch repair protein, C-terminal domain
  misc_feature (1)..(380): Xaa is any amino acid
MKAFLPSVSSLKDRFSQIFLEERESVFLREISAIGKGFSISVVAGGPELSRNDRRLQFVYANNRRIQDYSLLQALEYGLQGWFPNGAHPIGAVFITIDPALADCNIHPAKREVRFADPGAIHHALSSALRDFCRHATLAEKPSGAQAEIEFAPTEPASGQSRGPGQSRKSDQRSVLDAIFAAEEAASYSAPEPETGLEADKSKARYLGRLFDLFILVEKNETLFVIDQHAAHERILYDRFMSGKIPRQELLVAIPFITESAGDDSFLEEKKEELAKLGIAIKRNEDEWLIEALPSGWKLSDKETVEEILNLKNANENPAERWAATYSCRSAVKDGDFLDERTALALAEEALALPISRCPHGRPIWLKVSRDDLFKAVKRT

SEQ ID NO: 28469 - DNA, 576 bp, Unknown
  Obtained from environmental sample
  misc_feature (1)..(576): n is a, c, g, or t
ttgcggatagcatttccgcagtattgtacgccttttgaaaaaatcggcgagagatggcataaaggcataatgaaaaattttgacgaaatatgggttccagattacgaggaatttccggggcttgctggcaaattgagccatccttcttattcggataaaagaataaaatacataggtcccttgtctcgtttggatttgcaagatgcagggcaggggaaaggggagccagaaaaaagcatagatattttggctctgatttccgggccggagccgcaacgctcaatttttgaaaaacacgctataaggcttttaaccaagagccctggcaataattgcatagttcgcgggcttcccaacgaaacgcaaattccagatttgccttttgaggcattcaaccatttatccgctgtggatttacgggataaaattttggcgagttgcacggttctttgccgttctggttattcaacccttatggatttggctttattgaaagccaatgcgattttagtcccaacgccggggcaaacggagcaaatttatttggcagaactttggagaaaacgttgcgtataa

SEQ ID NO: 28470 - protein, 191 aa, Unknown
  Obtained from environmental sample
  misc_feature (1)..(191): Xaa is any amino acid
MRIAFPQYCTPFEKIGERWHKGIMKNFDEIWVPDYEEFPGLAGKLSHPSYSDKRIKYIGPLSRLDLQDAGQGKGEPEKSIDILALISGPEPQRSIFEKHAIRLLTKSPGNNCIVRGLPNETQIPDLPFEAFNHLSAVDLRDKILASCTVLCRSGYSTLMDLALLKANAILVPTPGQTEQIYLAELWRKRCV

SEQ ID NO: 28471 - DNA, 843 bp, Unknown
  Obtained from environmental sample
  misc_feature (1)..(843): n is a, c, g, or t
ttgcacggttctttgccgttctggttattcaacccttatggatttggctttattgaaagccaatgcgattttagtcccaacgccggggcaaacggagcaaatttatttggcagaactttggagaaaacgttgcgtataaatcaatacatatcgcagtgcggaatagcgagcagacgcaaagccgaagccttaattttggaaggcagggtttttgtcaacggaattgtcgccaaggaattatcgcagcaagtcagcgaaacggacatcgtttccatagacggagaaaaaatttctccagtgaaacggcacaccacaatagcgttccacaaaccgcccggagttatatgcaccgccaccgaccctcagggcagaaaaaccatttacgattgtttgccgagcggcttttcaacccttaaatacataggcaggctggatttgcagagcaggggactagttttgctctccgatgacggggaacttgtttacaaattaacacatcctaaatatcaaatagagaggagctatttggtttggactagcagggagctttctcgccgtgctatagagagtttgctcgctggcatagatataggcgatggcgagattgggcaggcaaaggaaatttatttggacaacggcttttttgagcttgtgctaaccgagggcaaaaacagggaaatccgcaaaatgctccacgctttgcattaccacatagaagatttaaaacgcgttagatatgcaaacattgaactgggcgatttagccgttggcgactacagggagataaaggggaaggagttgaaggagttgttttcgtgtttccgctatcccctcgtgccttga

SEQ ID NO: 28472 - protein, 280 aa, Unknown
  Obtained from environmental sample
  DOMAIN (104)...(233): RNA pseudouridylate synthase
  misc_feature (1)..(280): Xaa is any amino acid
MHGSLPFWLFNPYGFGFIESQCDFSPNAGANGANLFGRTLEKTLRINQYISQCGIASRRKAEALILEGRVFVNGIVAKELSQQVSETDIVSIDGEKISPVKRHTTIAFHKPPGVICTATDPQGRKTIYDCLPSGFSTLKYIGRLDLQSRGLVLLSDDGELVYKLTHPKYQIERSYLVWTSRELSRRAIESLLAGIDIGDGEIGQAKEIYLDNGFFELVLTEGKNREIRKMLHALHYHIEDLKRVRYANIELGDLAVGDYREIKGKELKELFSCFRYPLVP

SEQ ID NO: 28473 - DNA, 876 bp, Unknown
  Obtained from environmental sample
  misc_feature (1)..(876): n is a, c, g, or t
atggtaagaaaaaagaaagttgaagatgacgataaagagttaaaattaacctacctgtcaaaaaaagaatatacctgcccggcgtgtggggcgatattccgtaaagaggaacttttttcgggcggcggcagacttatagcgggaaaactcacggaggagcttcacaggctttacgatccttcaaaaaaatacggagtaatattcccgctcgtatacgaatcaatcgtctgccctgaatgttggttttcatcaatggaagcggattttatgtcactgccaaaggaaaacgccagaaaagtcaaagaagattcggataatcgaatgaaagaaacccagcttgtttttccaaatgtcgaattccatgaaaataggacgttgatggatggagcggcttctttataccttacattacgctgttatgactattacaacaaaccgacttcccctacaattaaacaggggcttgcggcgatccgatgcgcatggcttatagacgaacttgataaaaaattccccggccagcattatgactggcttggcaccctttttagaaaaaaagcccagtacctttacaatgaggctctttcccgcgaacagagcggcagggaaacgctttccggaatgaaagctttcggtcctgacacggataaaaattatgcttacgaaggaatgttgtacatgtgcgcctaccttcgttataaattcggccccgcccataacgaagaagagagaaaaacatcccttgaagacgcgcgccgcacaatcgcaaaattattgggcatgggcaaggcgtccaaagacaagccgggcgcgtttcttgaactggcaagaaaactctacgacacaatcaataaagacctttccgaaaacgaataa

SEQ ID NO: 28474 - protein, 291 aa, Unknown
  Obtained from environmental sample
  misc_feature (1)..(291): Xaa is any amino acid
MVRKKKVEDDDKELKLTYLSKKEYTCPACGAIFRKEELFSGGGRLIAGKLTEELHRLYDPSKKYGVIFPLVYESIVCPECWFSSMEADFMSLPKENARKVKEDSDNRMKETQLVFPNVEFHENRTLMDGAASLYLTLRCYDYYNKPTSPTIKQGLAAIRCAWLIDELDKKFPGQHYDWLGTLFRKKAQYLYNEALSREQSGRETLSGMKAFGPDTDKNYAYEGMLYMCAYLRYKFGPAHNEEERKTSLEDARRTIAKLLGMGKASKDKPGAFLELARKLYDTINKDLSENE

SEQ ID NO: 28475 - DNA, 306 bp, Unknown
  Obtained from environmental sample
  misc_feature (1)..(306): n is a, c, g, or t
atgccaatttcatcgtggatgcggtcaagctctataagcatgtgctggcgcagttttgcgtcaagggcggaaagaggttcgtcaagaagcagaacccgcggttcatttattagggcgcgggctatggccaccctctgcttttgtccgcccgaaagttggttgggttttttatcggcgtgtccttcaagacgcacaaggtttaagtactgttcaactttagatttgatttccgattcgggaagttttttcaaccgtggggagaaagctacgttttcaaatactgacagatggggaaaaagggcgtaa

SEQ ID NO: 28476 - protein, 101 aa, Unknown
  Obtained from environmental sample
  SIGNAL (1)...(23)
  DOMAIN (26)...(64): Protein of unknown function (DUF1602)
  misc_feature (1)..(101): Xaa is any amino acid
MPISSWMRSSSISMCWRSFASRAERGSSRSRTRGSFIRARAMATLCFCPPESWLGFLSACPSRRTRFKYCSTLDLISDSGSFFNRGEKATFSNTDRWGKRA

SEQ ID NO: 28477 - DNA, 564 bp, Unknown
  Obtained from environmental sample
  misc_feature (1)..(564): n is a, c, g, or t
gtggggcaagttgccaattttcacacggatatcgacagcattccccccgaccgtttcgctcccgcgctgaactcgtccctgccccatgaggtaagagtgcttgaatcccgcgaaacagacaaggaatttcacgcccgcttcagcgcaaaggcgcggacttaccgttatcaatttatctgccgtccgcttctgccgcatgaaagccgctacaatctgcaattacgccgttttccgcgcgtagagcttcttaacgaatacggcagactgctcttgggagaaacagactgctccatttttgccggcgcgggggacacaagcgcctcaaagaaccgctatgtttacagagcgtacttttacatggcgggggacacattgatttttgaaatctgcgccaacgccttccttcgcaacatggttcgctcagtagccggaaccttccttcactacgaagaagccgacacgccgcctgagaaactgcgggaaatcatcgcgtcaggagagcgagccctcgcaggtcccaccctgcctcctcagggactcttcctgtggcaagtggaatattaa

SEQ ID NO: 28478 - protein, 187 aa, Unknown
  Obtained from environmental sample
  DOMAIN (86)...(187): tRNA pseudouridine synthase
  misc_feature (1)..(187): Xaa is any amino acid
MGQVANFHTDIDSIPPDRFAPALNSSLPHEVRVLESRETDKEFHARFSAKARTYRYQFICRPLLPHESRYNLQLRRFPRVELLNEYGRLLLGETDCSIFAGAGDTSASKNRYVYRAYFYMAGDTLIFEICANAFLRNMVRSVAGTFLHYEEADTPPEKLREIIASGERALAGPTLPPQGLFLWQVEY

SEQ ID NO: 28479 - DNA, 429 bp, Unknown
  Obtained from environmental sample
  misc_feature (1)..(429): n is a, c, g, or t
atgaacacacctgaagaagaaaataaagctgttcttatcatcgactcggaattaccaaccggaataatagcaaatacggctgctattcttggaattacattaggttacaaacatcaatgcattataggagaggacataacagacgcttcaaatcaaagtcatttaggaatcaccaacattccgattccggttttaaaaggaacaaagtcattaataaaagaattgttggcggaagtaaaattcaaatataataatgaggtaacggtgatagatttttcaaaaacggcgcaattatctacggattatgatgattacacagcaaaagccaaaaaacttgcttcagatgaatttgaatatttggggattgggctatatgggccaaaaaaaatcttaaataaactaacagggagtatagctcttttacgttaa

SEQ ID NO: 28480 - protein, 142 aa, Unknown
  Obtained from environmental sample
  misc_feature (1)..(142): Xaa is any amino acid
MNTPEEENKAVLIIDSELPTGIIANTAAILGITLGYKHQCIIGEDITDASNQSHLGITNIPIPVLKGTKSLIKELLAEVKFKYNNEVTVIDFSKTAQLSTDYDDYTAKAKKLASDEFEYLGIGLYGPKKILNKLTGSIALLR

SEQ ID NO: 28481 - DNA, 435 bp, Unknown
  Obtained from environmental sample
  misc_feature (1)..(435): n is a, c, g, or t
ttggcaaggggcggtacaaggcttctgatcccagaagcgtggctggggtctacgataacaggcagatgcgatttttgtttgagaagcgcgactgctgataaatccagcgtgttacgcgtcattgtttcaaaggtacgaatgccgcgctcgcagagtataacctgcgtgtttccagcggatacgatatattccgcgctcatcagcaattcttcgattgtgttggccaatccgcgcttcaataacacaggctttctcaacctgccgacctctttcagtagatcgaagttctgcatatttctagcgccgatttgcataatgtcaacgtcattaaacaaatcgatctgcgtttggttcattatttcagagacaatgggaagcccagtttcatgtttcgccatacgcagcagatcaagtccttcggcctgtttgccctga

SEQ ID NO: 28482 - protein, 144 aa, Unknown
  Obtained from environmental sample
  misc_feature (1)..(144): Xaa is any amino acid
MARGGTRLLIPEAWLGSTITGRCDFCLRSATADKSSVLRVIVSKVRMPRSQSITCVFPADTIYSALISNSSIVLANPRFNNTGFLNLPTSFSRSKFCIFLAPICIMSTSLNKSICVWFIISETMGSPVSCFAIRSRSSPSACLP

SEQ ID NO: 28483 - DNA, 564 bp, Unknown
  Obtained from environmental sample
  misc_feature (1)..(564): n is a, c, g, or t
atggcgaaacatgaaactgggcttcccattgtctctgaaataatgaaccaaacgcagatcgatttgtttaatgacgttgacattatgcaaatcggcgctagaaatatgcagaacttcgatctactgaaagaggtcggcaggttgagaaagcctgtgttattgaagcgcggattggccaacacaatcgaagaattgctgatgagcgcggaatatatcgtatccgctggaaacacgcaggttatactctgcgagcgcggcattcgtacctttgaaacaatgacgcgtaacacgctggatttatcagcagtcgcgcttctcaaacaaaaatcgcatctgcctgttatcgtagaccccagccacgcttctgggatcagaagccttgtaccgccccttgccaaagcggctatggctgtgggagcggacggtttaatgatagaagcgcataacgacccggcgaaggcgttatgcgacggcgcccagtcccttgatttagagcaatttcactccttaatggacgagttaaaaaggcgcgcggtaatagagaacaaaattttccaggagtaa

SEQ ID NO: 28484 - protein, 187 aa, Unknown
  Obtained from environmental sample
  DOMAIN (1)...(180): DAHP synthetase I family
  misc_feature (1)..(187): Xaa is any amino acid
MAKHETGLPIVSEIMNQTQIDLFNDVDIMQIGARNMQNFDLLKEVGRLRKPVLLKRGLANTIEELLMSAEYIVSAGNTQVILCERGIRTFETMTRNTLDLSAVALLKQKSHLPVIVDPSHASGIRSLVPPLAKAAMAVGADGLMIEAHNDPAKALCDGAQSLDLEQFHSLMDELKRRAVIENKIFQE

SEQ ID NO: 28485 - DNA, 630 bp, Unknown
  Obtained from environmental sample
  misc_feature (1)..(630): n is a, c, g, or t
atgaaagttctgggcatgataaagctgggtgtcattcttgcccttttcgccgccgcggcctgtgtaatgcttgcgtttgtctatagcggcacttcggcaattatcgcgcagcggcagcaggctgaccttgaagcggcgcttaaagaactttttccggatacggacgactttcagctaatcggcgaaattaaaagtcccgatacggcaattacagttgaaagcgcctacagcgctcttaaaaacggcaagattatcggagccgctttgactctttcctgcgcaagttacagcgggaaaataagaacaatggttggagtaagcgccgaaaattatattacaggcgtaaaaatactggaacattcagacacgccgggtcttggagcaaatgccgcttcgccttcgtattttattgaccgtgcaaaaggcattacattttacggacagtttacgggaaaaaaagtgagcgacccgtttgtagtaaaaaaagatgttgtcgcaataacagcctccaccattacaagccgcgccgtgtctaactcggtcaaagccgcaggactggctttcagcgcatggctttcaggcggggaaccggatgcaatttcttccgccagcgcaggagaagaagaatga

SEQ ID NO: 28486 - protein, 209 aa, Unknown
  Obtained from environmental sample
  SIGNAL (1)...(27)
  DOMAIN (95)...(188): FMN-binding domain
  misc_feature (1)..(209): Xaa is any amino acid
MKVLGMIKLGVILALFAAAACVMLAFVYSGTSAIIAQRQQADLEAALKELFPDTDDFQLIGEIKSPDTAITVESAYSALKNGKIIGAALTLSCASYSGKIRTMVGVSAENYITGVKILEHSDTPGLGANAASPSYFIDRAKGITFYGQFTGKKVSDPFVVKKDVVAITASTITSRAVSNSVKAAGLAFSAWLSGGEPDAISSASAGEEE

SEQ ID NO: 28487 - DNA, 816 bp, Unknown
  Obtained from environmental sample
  misc_feature (1)..(816): n is a, c, g, or t
atgagcatcgtgataattactttcattttcgctacgcttcttgcctttgcgcttggaaccgcactcgggtttttcagggattttttcgcagtgccggaagacccggtaaccgccagaatacgcgaagtcctgccgggcgcaaactgcggagcctgcggcttccccgggtgcgataattacgcctccgccgttgcctcaggcagcgccgcaggaacagcatgtactgtaggcggtccttccgcagcggcaaaaatcgccgccatcacaggcaaggcaggcggagaagtagtacaaaccatggcagtactcgcctgccagggttcgtcattgcacacgcccttaaaaggaacttacaccggtattaaaacctgccgcggcgcaaagctcgcgggcggaacaaaactctgctcttggggctgccttggtttcggcgactgcgtgaacgtgtgcaaattcggcgctctttcaatgggcgaaaacagactgccaaaggtaaattatgcaaaatgtacaggctgtggtctttgcgcttccgaatgtccgcagggacttttccaaaatattccaataaataaaaaaggctcaattgttctttgttccaacaaaaatcttgtaaaagcggcggtggcaaaaagctgtaaaatctcttgccgcaaatgcggtctttgcgtaaagaactgtcccaaacaatgcattactcttgacgcactaatcccgacagtggattacggcaaatgcgattcatgcggaacctgcgcggaaaaatgcccgactaaagtctttaaggttattgaacgggatatttttgtttcttga

SEQ ID NO: 28488 - protein, 271 aa, Unknown
  Obtained from environmental sample
  SIGNAL (1)...(17)
  DOMAIN (43)...(77): Putative Fe-S cluster
  misc_feature (1)..(271): Xaa is any amino acid
MSIVIITFIFATLLAFALGTALGFFRDFFAVPEDPVTARIREVLPGANCGACGFPGCDNYASAVASGSAAGTACTVGGPSAAAKIAAITGKAGGEVVQTMAVLACQGSSLHTPLKGTYTGIKTCRGAKLAGGTKLCSWGCLGFGDCVNVCKFGALSMGENRLPKVNYAKCTGCGLCASECPQGLFQNIPINKKGSIVLCSNKNLVKAAVAKSCKISCRKCGLCVKNCPKQCITLDALIPTVDYGKCDSCGTCAEKCPTKVFKVIERDIFVS

SEQ ID NO: 28489 - DNA, 450 bp, Unknown
  Obtained from environmental sample
  misc_feature (1)..(450): n is a, c, g, or t
ttgcgcacttttggcgcgacggaagtttttccgccggatgacgcggatatgattatcgataacacttcttccggtcagacgctcaaagacaacggtcttaaaattatcgcgaccctgcttgaatcttcaacgcgctttgtcgcgtcaaaagccgcacttgccaatacggagaaaaaacgcagaattgacgagctttccatgctttttagcgccgtccttgatgggcgtgatcgcgtaatgcttgaaatgaatatcccaaaggagcagtttgaatctttggcaagccttcccgcgatgcgaagtcccacggtcgccccgctttacggggacgcgggttttgccgttaaaattgccgttaaaaaacatgaagttcccgatattattccaaaactgaaaaaacttggagcgattgatattgtggagtatgatttgcggaaagtagttttgtag

SEQ ID NO: 28490 - protein, 149 aa, Unknown
  Obtained from environmental sample
  DOMAIN (74)...(147): HisG, C-terminal domain
  misc_feature (1)..(149): Xaa is any amino acid
MRTFGATEVFPPDDADMIIDNTSSGQTLKDNGLKIIATLLESSTRFVASKAALANTEKKRRIDELSMLFSAVLDGRDRVMLEMNIPKEQFESLASLPAMRSPTVAPLYGDAGFAVKIAVKKHEVPDIIPKLKKLGAIDIVEYDLRKVVL

SEQ ID NO: 28491 - DNA, 648 bp, Unknown
  Obtained from environmental sample
  misc_feature (1)..(648): n is a, c, g, or t
atggataggattgcggagattgagagaaagactaaagagacggaaatttttattaaattgaatattgatggaagaggggtgattaagtttgattatccgttggggtttatgtcacatatgcttaatacttttgcgcgtcatgggttgtttgatattgaaataaaagcgaaaggagaccttgaggttgatcagcaccatcttgttgaagatactggaatcgttcttgggcagtgttttactaaagcgttaggtgacaagtgcggcattgttcgtagtggaagttgtcttttccctatggacgagactcttgcccgcgccgctgtggatatgtcgggccgtccttttttgttttatgacggacagcttcctgattctcacataatttcgataaacaaagacggaaaggaatataagtttcaaacaggtttaacggaagatttctggcagggtttcacaaactcggcaggttgtaaccttcaccttgaaatcttacgcggcagaagcgatcaccacaagattgaagccatgttcaaagccgccgcccgcgccattcgcgccgcctgcgagatagacggtcgagctaaagatactattccctcaaccaagggcgttctgccgggttttgacgcgccgagtgtgcttgcatga

SEQ ID NO: 28492 - protein, 215 aa, Unknown
  Obtained from environmental sample
  DOMAIN (34)...(185): Imidazoleglycerol-phosphate dehydratase
  misc_feature (1)..(215): Xaa is any amino acid
MDRIAEIERKTKETEIFIKLNIDGRGVIKFDYPLGFMSHMLNTFARHGLFDIEIKAKGDLEVDQHHLVEDTGIVLGQCFTKALGDKCGIVRSGSCLFPMDETLARAAVDMSGRPFLFYDGQLPDSHIISINKDGKEYKFQTGLTEDFWQGFTNSAGCNLHLEILRGRSDHHKIEAMFKAAARAIRAACEIDGRAKDTIPSTKGVLPGFDAPSVLA

SEQ ID NO: 28493 - DNA, 999 bp, Unknown
  Obtained from environmental sample
  misc_feature (1)..(999): n is a, c, g, or t
atgtctttaatgccttctttctcaagcgtaaacggaatcaagatgcaccagaacaaagaattgcttacggatctattaaaaggggaaatgggttataaaggctttgttgtttccgactggtcggcggttaaacaactgacaggcgacagttacaggatgcaaatcgcgaacgcgattaacgcgggagtggacatgtgtatggcgaccgacggccgcagcaactggatagattacatcaataatcttaccaagctggttgaggacggcgttgttcctatgtcgcgcattgacgacgctgttgtccgtattattcgctttaaacaaaaattaaaattatttgaaacacccatgataacacaggcgggcgagatcggcacggaagaaaacagggccgccgcgcgtgaacttgtttccgattcacttgttcttttgcgtaacgaaaaaaacgcaatcaaaaaactttctgagtgtaaaaggattttagttactggtcagggcgccaataatatcggaatgcaatgcggcggctggacaataacacggcagggcggtcatggtaaaatcacaaacggaacaacaatacttgaaggaataaaaacagcggtaaaaggcaaagctgatgtttatttttccgaagaaggaaaggctgatggtcgttttgacgcggtaattgccgtaatcggagaagatccttacgcggaaacacaaggcgatcgctcaggcaatatcaatatccgcgataaggatttggaaatgcttcatcgaatttatagtcctcgccatcttgtgatcgttatcatgctgtcaggccgcccgatgaatattagcgacgagctaagaaaatgggacgcgtttatcgccgcgtggctgcccgggcacagagggcgccggagtcgcggatgtatnttcgagggcaaaagtttcacggggcgcacaccgtacacatggcggaaaacggttacgggagaagttttgtatcctatggttttcgggctntaa

SEQ ID NO: 28494 - protein, 332 aa, Unknown
  Obtained from environmental sample
  DOMAIN (141)...(332): Glycosyl hydrolase family 3 C terminal domain
  misc_feature (1)..(332): Xaa is any amino acid
MSLMPSFSSVNGIKMHQNKELLTDLLKGEMGYKGFVVSDWSAVKQLTGDSYRMQIANAINAGVDMCMATDGRSNWIDYINNLTKLVEDGVVPMSRIDDAVVRIIRFKQKLKLFETPMITQAGEIGTEENRAAARELVSDSLVLLRNEKNAIKKLSECKRILVTGQGANNIGMQCGGWTITRQGGHGKITNGTTILEGIKTAVKGKADVYFSEEGKADGRFDAVIAVIGEDPYAETQGDRSGNINIRDKDLEMLHRIYSPRHLVIVIMLSGRPMNISDELRKWDAFIAAWLPGHRGRRSRGCXFEGKSFTGRTPYTWRKTVTGEVLYPMVFGL

SEQ ID NO: 28495 - DNA, 330 bp, Unknown
  Obtained from environmental sample
  misc_feature (1)..(330): n is a, c, g, or t
atgaaaaagaaacttgaattaatacctccgggaaccatattacgcgatgagttcatggaacctctgggaattacatcatacagattaagcaaggaaataaaagtacagcaaaccgctgtcagtcagataataaacggcagccgaagaataacagttgatatggctctgcggctttcaagatatttcggtaattcggctcaattctggcttaatctacaaaattattttgatatcgaatcagaaatggaaaaaaaagaatatttgattaacgaaatagttccctataactcggctaattatgcggcagagaaaaaagttgtttatgcgtaa

SEQ ID NO: 28496 - protein, 109 aa, Unknown
  Obtained from environmental sample
  DOMAIN (14)...(69): Helix-turn-helix
  misc_feature (1)..(109): Xaa is any amino acid
MKKKLELIPPGTILRDEFMEPLGITSYRLSKEIKVQQTAVSQIINGSRRITVDMALRLSRYFGNSAQFWLNLQNYFDIESEMEKKEYLINEIVPYNSANYAAEKKVVYA

SEQ ID NO: 28497 - DNA, 855 bp, Unknown
  Obtained from environmental sample
  misc_feature (1)..(855): n is a, c, g, or t
atgtacctctacgtgttccggtcggcgggttctgatgttttttatgaattttccttagacgcccctgtttttaacgccgcaaaaaacgggtattacagcgggtacaagcgcgcgctctggaaaatggtttacctgcacaacgaaaaccagttcctgttcaaaacctttatcgccgataatttcccgcattttgaaaaagccgccctcagcaacgcttcctacagcgcgctcaccgcttcgaaaaccgcccattactccctttcgggcgcctctaacccgggcgcggcgacagccgtcctcccgccgggggtctatgccgtcaggctggacggcgcgggcggcggcggcgggtacggcgcggttaaaggcgccgccgtttccggttcttcgtcggggggggccggcggctccgttaacgaaattattacgcttaacgccgccgcgccctttaccgccttcacgggttcgggcggcttcgccgcgcccgcgccggccccttccggtaatttctctgtctacggcacaaaaaactctgtcacgcttaaaagcgctaatccgcctaccgcggcgcatgattcaactgattttactgatgaggctgtagggccggttatttcccttcccgccgcctcaggcggcggcggcggcggcggcggctcgggcaccttcctgtactcagcggcgcccggcccccaggggtatttcctctgcgcgggcggcggcggcggcggatcgggggggtcctcccttacgccgggcggcgcgggcgggtcggggggatctgtcggccccgggcggcggcggcngcgccccaggggacctgccggaagtcttctaatccgcccccccgattga

SEQ ID NO: 28498 - protein, 284 aa, Unknown
  Obtained from environmental sample
  misc_feature (1)..(284): Xaa is any amino acid
MYLYVFRSAGSDVFYEFSLDAPVFNAAKNGYYSGYKRALWKMVYLHNENQFLFKTFIADNFPHFEKAALSNASYSALTASKTAHYSLSGASNPGAATAVLPPGVYAVRLDGAGGGGGYGAVKGAAVSGSSSGGAGGSVNEIITLNAAAPFTAFTGSGGFAAPAPAPSGNFSVYGTKNSVTLKSANPPTAAHDSTDFTDEAVGPVISLPAASGGGGGGGGSGTFLYSAAPGPQGYFLCAGGGGGGSGGSSLTPGGAGGSGGSVGPGRRRXRPRGPAGSLLIRPPD

SEQ ID NO: 28499 - DNA, 414 bp, Unknown
  Obtained from environmental sample
  misc_feature (1)..(414): n is a, c, g, or t
ttgaaaaagccgccctcagcaacgcttcctacagcgcgctcaccgcttcgaaaaccgcccattactccctttcgggcgcctctaacccgggcgcggcgacagccgtcctcccgccgggggtctatgccgtcaggctggacggcgcgggcggcggcggcgggtacggcgcggttaaaggcgccgccgtttccggttcttcgtcggggggggccggcggctccgttaacgaaattattacgcttaacgccgccgcgccctttaccgccttcacgggttcgggcggcttcgccgcgcccgcgccggccccttccggtaatttctctgtctacggcacaaaaaactctgtcacgcttaaaagcgctaatccgcctaccgcggcgcatgattcaactgattttactgatgaggctgtag

SEQ ID NO: 28500 - protein, 137 aa, Unknown
  Obtained from environmental sample
  misc_feature (1)..(137): Xaa is any amino acid
MKKPPSATLPTARSPLRKPPITPFRAPLTRARRQPSSRRGSMPSGWTARAAAAGTARLKAPPFPVLRRGGPAAPLTKLLRLTPPRPLPPSRVRAASPRPRRPLPVISLSTAQKTLSRLKALIRLPRRMIQLILLMRL

SEQ ID NO: 28501 - DNA, 516 bp, Unknown
  Obtained from environmental sample
  misc_feature (1)..(516): n is a, c, g, or t
ttggggaaaggcggaaaaatgaacttatatcttctttacattgatcccggaacaggaagcgcgttgttctccattttaattggcgctgcggcaacaatctattttttgggccgcgcgttgataattaagttgaaagtagttttatccggtggaaagaccgccaatgccgtttctgtggaatatccttatgtaatttattgcgaggggaaacaatactggaatgtttttaagcctgttcttgatgaatttgaaaaatgtaaaaccggacttctgtacctgacttccgcacaggatgatcctgtttttgacacttcatggaactttgttaaggctgaatatataggcgaaggcaaccgcgcatatgcgcgccttaatttgctccgtgccgggatttgcctgatgactaccccgggtcttgacgtgtaccagcttaaacgttcaaaaatggcaaagcattatgcgcatatacttcacgccccaagcgacgcgaccatgtaccgtctttttggcctttga

SEQ ID NO: 28502 - protein, 171 aa, Unknown
  Obtained from environmental sample
  misc_feature (1)..(171): Xaa is any amino acid
MGKGGKMNLYLLYIDPGTGSALFSILIGAAATIYFLGRALIIKLKVVLSGGKTANAVSVEYPYVIYCEGKQYWNVFKPVLDEFEKCKTGLLYLTSAQDDPVFDTSWNFVKAEYIGEGNRAYARLNLLRAGICLMTTPGLDVYQLKRSKMAKHYAHILHAPSDATMYRLFGL

SEQ ID NO: 28503 - DNA, 492 bp, Unknown
  Obtained from environmental sample
  misc_feature (1)..(492): n is a, c, g, or t
ttgcttgacgcatttttacaatgcaggaaagaaggattaaattatgagcttgttattgttggttcacacaataaatttagatccggagacaggaaaacttcaaaacgccttaatatgcttgaaggacaaggaattactttttccggttatataagcgatgatgagaaatggaaactacttacagaaagcgcacttttagtacagccttcactatatgaaggtttcggttatcctccccttgaagccatgttattaggaactaaagttctaatctcggacataacagtttttaaagacatatattcagattttccggttatattctttaaatcaggcaacagtaaagacctgcatgacaaattgaagggaatcttatcagataaaaatcaacagtctttaaatcttagcgacactcttatactaaaatacacttttgagaaaaccgcttcggttattttaaaagaattaaaatccaacaggaatataccatga

SEQ ID NO: 28504 - protein, 163 aa, Unknown
  Obtained from environmental sample
  DOMAIN (4)...(142): Glycosyl transferases group 1
  misc_feature (1)..(163): Xaa is any amino acid
MLDAFLQCRKEGLNYELVIVGSHNKFRSGDRKTSKRLNMLEGQGITFSGYISDDEKWKLLTESALLVQPSLYEGFGYPPLEAMLLGTKVLISDITVFKDIYSDFPVIFFKSGNSKDLHDKLKGILSDKNQQSLNLSDTLILKYTFEKTASVILKELKSNRNIP

SEQ ID NO: 28505 - DNA, 867 bp, Unknown
  Obtained from environmental sample
  misc_feature (1)..(867): n is a, c, g, or t
atgcttcgctccatatttttgcccgctttcttaattgctctttccttgcaaaatgcttttgcagcagaagcaaaaggggcttttactgcagatcagtacaaaaaggcactttggatggtaactaggttctatggtgctcaaagatctggtctcggtcctaattggcttcttatggatcacacacacaaaaccagttttgtcaaagatgccgatggcagtcgcaatcttgagggtgggtggtttgactgcggcgatcacgtgctgtttggtcatacgttctttttttccgcttatatgcttgccaaggcttacgatgcattccccaaaggttttcacgacctctaccacggagactacagcgattatgcggagtccaaagattggagcataaatggaggcaagccaaatagaattcccgatcttttggaagaacttaaatacgctacagactggataattaaagcaaccccaaatggcaccacattttattctcaaaaagggaacggcgattatgaccaccaaaaatgggttacggctggatttatgtcaactttgtcgataaacgagggtggagaaaaagaaggttctcgtcccataacgaaaaatccagaagacggagttatggcatcttttgcagcggcaactcttgccctaatgtcaaagatataccgtgaatacgatacggcttatgctgatacgtgcattaaacacgcaaaaaatgcttacgattatgcgaaaacgtataaaaataaagccatcggagtcggtttttacggtgcgcacaaagacccggagactgtatttgttttagcggcttcggaaatgtatatggctacaggggacaatatatatcaaagacgactatag

SEQ ID NO: 28506 - protein, 288 aa, Unknown
  Obtained from environmental sample
  SIGNAL (1)...(21)
  misc_feature (1)..(288): Xaa is any amino acid
MLRSIFLPAFLIALSLQNAFAAEAKGAFTADQYKKALWMVTRFYGAQRSGLGPNWLLMDHTHKTSFVKDADGSRNLEGGWFDCGDHVLFGHTFFFSAYMLAKAYDAFPKGFHDLYHGDYSDYAESKDWSINGGKPNRIPDLLEELKYATDWIIKATPNGTTFYSQKGNGDYDHQKWVTAGFMSTLSINEGGEKEGSRPITKNPEDGVMASFAAATLALMSKIYREYDTAYADTCIKHAKNAYDYAKTYKNKAIGVGFYGAHKDPETVFVLAASEMYMATGDNIYQRRL

SEQ ID NO: 28507 - DNA, 675 bp, Unknown
  Obtained from environmental sample
  misc_feature (1)..(675): n is a, c, g, or t
atgaacttcccgctgacaagatacggaatgccgcaggtgttgatatatccgctgattgtattggcggtaatggcggctctgttcatcttcctgcccgggggcgtattgcttgtagcggcggaagcggttttttttctgatccttgtctggatgttgatgttttttcgggatccccgccgtaaaatccgcctggacagccgcgtattgctctctccggcggacggcacgataacggatatttccgaaacagaaattcccgagcttggaggcaaggcgctgaaaatcggaatgttcctcagtattttcaatgtacatataaaccgcgctccatgcgccgcgcgtatagaatcgatcaattacaggaagggaaaattcataaacgccatggacgccgaagcgggacgcgtaaatgaatccaatgacatattgatgaccagactcgacgggccgcaagacaagctgttggtaaggcagataagcggggccgtcgcccgccgcattgtttgtgaggcgaaacccggcaggcagtacgcgcagggggagaccttcggcatgataaaattcggttcccgcacagaactgtaccttccccttaaacctgagagctatgatgtcgcggtaaaaatcggggacaaggtcaacgcgggcttaagcccattggtaatatacaaatga

SEQ ID NO: 28508 - protein, 224 aa, Unknown
  Obtained from environmental sample
  DOMAIN (47)...(221): Phosphatidylserine decarboxylase
  misc_feature (1)..(224): Xaa is any amino acid
MNFPLTRYGMPQVLIYPLIVLAVMAALFIFLPGGVLLVAAEAVFFLILVWMLMFFRDPRRKIRLDSRVLLSPADGTITDISETEIPELGGKALKIGMFLSIFNVHINRAPCAARIESINYRKGKFINAMDAEAGRVNESNDILMTRLDGPQDKLLVRQISGAVARRIVCEAKPGRQYAQGETFGMIKFGSRTELYLPLKPESYDVAVKIGDKVNAGLSPLVIYK

SEQ ID NO: 28509 - DNA, 495 bp, Unknown
  Obtained from environmental sample
  misc_feature (1)..(495): n is a, c, g, or t
gtgacgcctttcgcgctgttcaggatacgcagggacgataccaaaaaagaaaacaatatggagtatatactcgatcttgaccgttcgtttttcagccttgacgctcttgacggcaaagacctggtttttgccgatcccatgaacgccaccggcggcagcctggtgacggttgtaaaataccttattgaaacgggaataaagccgaggtccatacggttttttaacgtcatagccgcgctgaaaggggcgctgcgggtggtcagagcgctggaaaactgcgacgtttttacgctctggatggatccggtgctcaacaaacaggcgtacatcatgcccgggcttggcgacgccggagaccggattaacgggaaagacggggaaaatgattccaggaatatcatacagcttatagccaactacggcggcaatatagcgaggctttaccgttctcagcttcgggagatagaggatacggtactgaacacgggcaaatga

SEQ ID NO: 28510 - protein, 164 aa, Unknown
  Obtained from environmental sample
  misc_feature (1)..(164): Xaa is any amino acid
MTPFALFRIRRDDTKKENNMEYILDLDRSFFSLDALDGKDLVFADPMNATGGSLVTVVKYLIETGIKPRSIRFFNVIAALKGALRVVRALENCDVFTLWMDPVLNKQAYIMPGLGDAGDRINGKDGENDSRNIIQLIANYGGNIARLYRSQLREIEDTVLNTGK

SEQ ID NO: 28511 - DNA, 1374 bp, Unknown
  Obtained from environmental sample
  misc_feature (1)..(1374): n is a, c, g, or t
atgatgcccgatctctactggttggtcccattgctgccgctggccggcgcggcggtgaacgggctgtgcggcaatcgccttggcaaggcgttcaccaccgccgtggcccttggcaccgtgctggggtcccttgccctcaccgtgacggccttcatgctgatgaggtgtgcgcccgaacccagactggtgctggacgccggtgtctggatgagcgcgggctcactcaaagtcccattcgggctggtgttcgaccccctctccacgctgatgagcctggtggtcaccggcatcggtttcctgattcacctgtactccgtgggctacatgggccatgaaaaaggttacgcgcgctatttcagctacctgaacctctttgtcttcttcatgctcacgctggtgcttggctccagcctccccctgatcttcgtcggttgggagggcgtcggcctatgctcctacctgctgatcgggtactactttgacacggactacgcgccggccgccggcctcaaggcgtttctgaccaaccgcgtcggcgaccttgggatgataatcggcatgatgacgctgtttgccatattcggcactttcaccgtcggcgacatactgggttctgccggagggctggagccagaagtcagctttggcgccatcacattcgccactctgatgatttttgttggcgcaaccggcaagagcgcacagataccactctatatatggctgccggacgcaatggcagggcccacccccgtttcggccctgatccacgccgcgactatggtgaccagcggcatcgtgcttctgtgtcggctggctccgctgttccagcttgcccccattaccctgaatgttgtcgcatgggtgggcgcggggacagccctattcgccgcctccatcgggctggtgcagagggacataaaaaaggtgctggcctattctacggtgagccaactgggctatatgttcttggggcttggggcggccgggttcgctgcgggctttttccatgtatttacccacgcatggttcaaggccctgctgttccttggggccggcagcgcgataaccgccatgcaccacgagcaggacttgttcaagatgggcgggctaaaagcaaaaatgcctatcacgttttggacgatgcttgtcgccacgctgtgcatcatcggcttccccgggacatccggctttgccagcaaagacgaaatattgtacttggcctacctaaagtccccgtacctgtgggccatcggagtgcttggggcctgcttcaccgcgttttacatgctcaggctcttgacccttgcctttcttggcgagcccagggatcgccacgcgcatgaacatgcggggaaagcccagcgactatga

SEQ ID NO: 28512 - protein, 457 aa, Unknown
  Obtained from environmental sample
  DOMAIN (63)...(124): NADH-Ubiquinone oxidoreductase (complex I), chain 5 N-terminus
  misc_feature (1)..(457): Xaa is any amino acid
MMPDLYWLVPLLPLAGAAVNGLCGNRLGKAFTTAVALGTVLGSLALTVTAFMLMRCAPEPRLVLDAGVWMSAGSLKVPFGLVFDPLSTLMSLVVTGIGFLIHLYSVGYMGHEKGYARYFSYLNLFVFFMLTLVLGSSLPLIFVGWEGVGLCSYLLIGYYFDTDYAPAAGLKAFLTNRVGDLGMIIGMMTLFAIFGTFTVGDILGSAGGLEPEVSFGAITFATLMIFVGATGKSAQIPLYIWLPDAMAGPTPVSALIHAATMVTSGIVLLCRLAPLFQLAPITLNVVAWVGAGTALFAASIGLVQRDIKKVLAYSTVSQLGYMFLGLGAAGFAAGFFHVFTHAWFKALLFLGAGSAITAMHHEQDLFKMGGLKAKMPITFWTMLVATLCIIGFPGTSGFASKDEILYLAYLKSPYLWAIGVLGACFTAFYMLRLLTLAFLGEPRDRHAHEHAGKAQRL

SEQ ID NO: 28513 - DNA, 1374 bp, Unknown
  Obtained from environmental sample
  misc_feature (1)..(1374): n is a, c, g, or t
atgcaggatgttgaggcgctggcgtatgggaaatcaagcaagagccgcaccatgaaggatattggccgaggagaaacgccggaggatgcccatgtcttgcttttggaaagcggtttctggactgaacagataaatccccatcctggccgtttcggcgtttccctgctgccggtaaagtatattcccgatccgccgcccgatgaagaccgccgcgacctttgctatttggccgcttatgccattgacagtccgtggagccatgaccccgatgacgcggtttcccttgaaaccgaaaacggcaaacaggtactgtatgttcatgtggccgatccggcagcttccgtaacttttgacagcccgcccgaaaaagaagcctgtggacgcggagcaacgctgtacatccccgaaggcagttttcgtatgcttgccgaagaagccctgcccctgtttgccttgggccttgcagaaacatcaccggctcttactttcaaaatgacgcttaacaacagcggcgaaatagtggagacagaaatttttccgtcaaccgtaaaggtatcgcgcctgacctataaagaagcggatgcccttatggcaaatcccggcggcgcggaagccgccatgttaagtgaactttatgcggtagctgaacggaatttaagccgccgcagtgcggcaggcgcaataaacattgatctgccggagactcacatcagtctgaatcaggggcaggtaaacattgagcctatagtgccgtaccgttcggcgcttatggtacgggaatgtatgctgattgccggcgagggatccggcttatgggctatgcagcgcaaagtgccttttccctatattgagcaggaaattgccgaaatacccgatgaaatatttcccggcatagcgggttcttatcagctccgccgttgtatgcggccccggctgctttcggtaaaaccgggtcggcatgggggccttggtctggcagtctatacccaggtgaccagtcctctgcgccgctacaccgaccttgcagcccatattcagattcgccgtgttttgcggggcggcgaacctctttccgctgatgaaatgtcggcgcggattgccgccggagaagcggcggcggcggccgttactcaggctgaacgggcttcccgcaatcactggattatggtgtacctttcggacaagaaagattcggtatgggacgccgttgctctggagaaaaaaggaaaccgttgggcagtgatgatcaccgtccttgctctggaaacacaagttcccctgcggaaagaaattgcgcctaatgagccgctcaagctgattctgaaatcggttaatatccccaaaggggaggcaatctttatcgccgaggagtga

SEQ ID NO: 28514 - protein, 457 aa, Unknown
  Obtained from environmental sample
  DOMAIN (71)...(285): RNB-like protein
  misc_feature (1)..(457): Xaa is any amino acid
MQDVEALAYGKSSKSRTMKDIGRGETPEDAHVLLLESGFWTEQINPHPGRFGVSLLPVKYIPDPPPDEDRRDLCYLAAYAIDSPWSHDPDDAVSLETENGKQVLYVHVADPAASVTFDSPPEKEACGRGATLYIPEGSFRMLAEEALPLFALGLAETSPALTFKMTLNNSGEIVETEIFPSTVKVSRLTYKEADALMANPGGAEAAMLSELYAVAERNLSRRSAAGAINIDLPETHISLNQGQVNIEPIVPYRSALMVRECMLIAGEGSGLWAMQRKVPFPYIEQEIAEIPDEIFPGIAGSYQLRRCMRPRLLSVKPGRHGGLGLAVYTQVTSPLRRYTDLAAHIQIRRVLRGGEPLSADEMSARIAAGEAAAAAVTQAERASRNHWIMVYLSDKKDSVWDAVALEKKGNRWAVMITVLALETQVPLRKEIAPNEPLKLILKSVNIPKGEAIFIAEE

SEQ ID NO: 28515 - DNA, 963 bp, Unknown
  Obtained from environmental sample
  misc_feature (1)..(963): n is a, c, g, or t
atggtagtaatgaaatttggcggaagttccgttgcggatgcccagcggatacgccatgttgttgaaattgtaaaaacacagttggaacgaaagccggttttggtgctttccgcgatgggtgatacaaccgatcatctgcttgaagcgggcaataacgcattgcaaaaaggcgaagtatcggttggacggattgaaaaacatcattttgacactataaaaaaactcaaactgccgagtaaggcccaaaaggaaattgcggcgctgctggaagaactcaaacgactgctttccggcatttctttaatccgggaaatgaccccccgaaccaaagattttctggtatcgtttggcgaacggctttcagtgcggatagccgccgcctgctttaattccctgaaaataccggctgtggcctgcgatgcttgggacatgggttttatttctgattccaattttacatccgccgaactggttaaggaaagctgggagtttattccccaaaagatactccccttgctgcaaaccggcgtattgcccattgtgacgggctttatcgccaaagaccctgacggcaacattaccactttggggcggggcggttccgacctttccgcgacgatgattgccgccgcctgcaaagcggaggaggcgcaggtctggaaggatgttgacggcatcctcaccgccgacccccgcgtagtcacccacgcgcggcccgttgaatgtgttacctatgaagaagcggcggaacttgcctactttggcgcgcaggttttgcacccccgagccatgcagccctgcctcaaaaccggaactccggtactggtaaaaaattcgtataacatcgccgctcccggaacccgaatcgccgccacgcttcagaaaaaaagcgccttggtacgggccattactttccgtcggaatgtaacgttagttgacattgttcaactcgtgccgatctga

SEQ ID NO: 28516 - protein, 320 aa, Unknown
  Obtained from environmental sample
  DOMAIN (1)...(278): Amino acid kinase family
  misc_feature (1)..(320): Xaa is any amino acid
MVVMKFGGSSVADAQRIRHVVEIVKTQLERKPVLVLSAMGDTTDHLLEAGNNALQKGEVSVGRIEKHHFDTIKKLKLPSKAQKEIAALLEELKRLLSGISLIREMTPRTKDFLVSFGERLSVRIAAACFNSLKIPAVACDAWDMGFISDSNFTSAELVKESWEFIPQKILPLLQTGVLPIVTGFIAKDPDGNITTLGRGGSDLSATMIAAACKAEEAQVWKDVDGILTADPRVVTHARPVECVTYEEAAELAYFGAQVLHPRAMQPCLKTGTPVLVKNSYNIAAPGTRIAATLQKKSALVRAITFRRNVTLVDIVQLVPI

SEQ ID NO: 28517 - DNA, 579 bp, Unknown
  Obtained from environmental sample
  misc_feature (1)..(579): n is a, c, g, or t
atggcaaaaataatcaaatccgcgcgaaaccgtttcgtattcgcggctgtattcgcggccattatcgccgtttccaactttttccaaatccctactcccttcggcgtacctgtagtccttaaaaatatgtttgtagtcctttcagggacaattctcggaagtttttacggcggtttcgcgctgttcatcttaatcgcggcggggcttgccggaatacccgtttttgtcattccgggaggcataggggtttttaacactccccttggcggctatataatcggctattttatagcaagcttgttcgcggggcttgtttgcggtcttccgagaataagcgagagaaaaatcaaacctgttccgtttataagggtttgtattgggtcttttttagggtttgccctgattttaacttgcggctccctttacatgatgtttcttaattcaatgacgctcaaagcggcttttcttgcaggtacagcgcctttcattattgccgacacaattaaattcgcgttcagtattccattggctctcgcgctgcggcctatagcggcaaggtatattaacaatgaagagtaa

SEQ ID NO: 28518 - protein, 192 aa, Unknown
  Obtained from environmental sample
  SIGNAL (1)...(29)
  DOMAIN (24)...(184): BioY family
  misc_feature (1)..(192): Xaa is any amino acid
MAKIIKSARNRFVFAAVFAAIIAVSNFFQIPTPFGVPVVLKNMFVVLSGTILGSFYGGFALFILIAAGLAGIPVFVIPGGIGVFNTPLGGYIIGYFIASLFAGLVCGLPRISERKIKPVPFIRVCIGSFLGFALILTCGSLYMMFLNSMTLKAAFLAGTAPFIIADTIKFAFSIPLALALRPIAARYINNEE

SEQ ID NO: 28519 - DNA, 321 bp, Unknown
  Obtained from environmental sample
  misc_feature (1)..(321): n is a, c, g, or t
ttgataataacattaattcctcgccatgaatacttaagagttaccctgcgtcttgcgcttattgttcagatttcggcgctggtattccgcactacaagcgcgcttgaaataagagaagccgtaaaagcggaaataatatctgtttttttatgttttattccggagattttcaagatatggacttccgttaatcttgcgtggaaagcgcgcggaggcaaagacggcattgcaaaaataaaaacagttgtttttgttttaatttcactttgttttgaaaaagcggcgttaaaagcaaaagcgctggaagcaaggagcgtgtaa

SEQ ID NO: 28520 - protein, 106 aa, Unknown
  Obtained from environmental sample
  misc_feature (1)..(106): Xaa is any amino acid
MIITLIPRHEYLRVTLRLALIVQISALVFRTTSALEIREAVKAEIISVFLCFIPEIFKIWTSVNLAWKARGGKDGIAKIKTVVFVLISLCFEKAALKAKALEARSV

SEQ ID NO: 28521 - DNA, 1287 bp, Unknown
  Obtained from environmental sample
  misc_feature (1)..(1287): n is a, c, g, or t
gtgtatttcttcaagctgatgcttgtggggtaccttgagaacatctgctctgaccgtaaaatcatagagcagagctctctgcgtctggatatactttactttcttggctatgacatagacgagcctctcncctggcacagcacattaagccgcacacgcaaactgctaggcgaggaagtgtttttaagtttttttcgcgacatattgaaaaggtgcgtggagaaaggcatggttgatggcaggacacaggcggttgacagcgcgttcatcaaggcaaacgcctcaatgagcagcctagaggaaaaagaactggcgaagaagagcaagagttattttgacgagataacggctggcgaatcctcctccgaagatagcaccctggaaaaatccgacgatggcaaaaaaccgccttccaactacaatgaacgctatacaagccggaccgatcccgatgcccgcgcctctcagaagaagggcaagccgctcgccctgaaccatcgcggcgtgatcagcgttgatgccaggagccatgtaatctgcggcgcgaccgttgactacgcggacaagagggattccgacaccattgagaacataaccggccagaccatagcgaatttgcacgggaacgggctatccgttgaggaagtgcttgccgacacgaattacagcagcggcgaggcatataaatatttggaaggaaaaggcataaccgcattcatcccgacttgcggtagctacaaagcgcacagggatggtttttcatacgatagcgaggcggattgctacatatgcgacaggggcgtgaagcttgcgttcaagggcatcacgaggcttgaaggccgcaagaccacgggaagggcttactgttcatccgccaaagactgccggaactgtccttcaagggagcagtgctgcaaaaacaagaattacaaacgcatagaccattcatcggacaagccgtattacgacgaggcatatgataggattcacacggctctgggcaggcgcaagatgcgtctgcgctcggctacggttgagcccgttctggggacgctgctgaatttcaggcgcatgaggaaagtgtacactagggggcaggagcttgcccgcaagcagtttctgatggctgcagccgcatacaatctgaaaaagctgatgggcgcaatgggtttaaggagggttgctgccgctgtcaatgcggcaaaagaggctatacggaaaaattgggctatgatgcgattcattttcggttggcataaactctcgttgggatgtgatatctgttga

SEQ ID NO: 28522 - protein, 428 aa, Unknown
  Obtained from environmental sample
  misc_feature (1)..(428): Xaa is any amino acid
MYFFKLMLVGYLENICSDRKIIEQSSLRLDILYFLGYDIDEPLXWHSTLSRTRKLLGEEVFLSFFRDILKRCVEKGMVDGRTQAVDSAFIKANASMSSLEEKELAKKSKSYFDEITAGESSSEDSTLEKSDDGKKPPSNYNERYTSRTDPDARASQKKGKPLALNHRGVISVDARSHVICGATVDYADKRDSDTIENITGQTIANLHGNGLSVEEVLADTNYSSGEAYKYLEGKGITAFIPTCGSYKAHRDGFSYDSEADCYICDRGVKLAFKGITRLEGRKTTGRAYCSSAKDCRNCPSREQCCKNKNYKRIDHSSDKPYYDEAYDRIHTALGRRKMRLRSATVEPVLGTLLNFRRMRKVYTRGQELARKQFLMAAAAYNLKKLMGAMGLRRVAAAVNAAKEAIRKNWAMMRFIFGWHKLSLGCDIC

SEQ ID NO: 28523 - DNA, 1533 bp, Unknown
  Obtained from environmental sample
  misc_feature (1)..(1533): n is a, c, g, or t
atgatcagatcggccgaggtgacggaacgggctcaggcgacagcggcctgtgtagagctgggttggtcgtttagtgaaacgccgcaaggattcgcgaacctcattggcaaggcgcgagaggaaatcgaggggatggaagacagaaacaatgccacccgaggcgagcaactgttactggaacgcaagaaaaaggaagtcgaggacgcttttgccattgccaaaaaagaagtcctggcgcttcaaagccagccttcaaatatccctgctgatatgctggatttgcgaaataaaatcgcttcggcaatcggagtttcggttacagctttgccgtttgccggagagcttatcgaagttaagccggagcagtctatatggcagggtgccattgagcgggttttgcgcggcttcgcgttatcacttttggttgacgaacgccattattcatcgcttgcaagctatataaacaacacatatcttgggcaacgtcttttttattatcgcacaggacatgtagagtcctggcaggagaaacccgcttcagccgattcaatggtgtttaagctcaacatcaaagaagggagttacgccgaatggttgagggccgaattacgccaacggttcaattatatatgtgtagaatcggttcaggcttttaagacagcggatcgtgcgataacgctccaggggcaggtaaaacacagcaaaacccgccatgaaaaagacgacaggcgcgctgtagacgataggaggaactgggttctgggttttgataatcgcgaaaagctgtccctgtttcaacagcatgcccaggagttggcggagaaaatttcagtcctgacagctaagagtaattcattatccgaaaaggagaaattgaacgcgaaacgggcccttaaatgccaaatactcgtcaacatacagtggcaggaaatcgatgtgctcccgataatagagcgtgtctacgcaattgagaagcaaattaaccaaatgcgtgatggaaataaagaattgagagaaatttcagaacgaattaacaggcagaagcccatcgttaaacgggctgaagatgacctgcgcgaagcaaagctcgaacatgataagacgtttgataagctcaaggattcaaaagaccaactcaataaattacagaatgacccttcgatcgttgctccaacccctttccagaaagaagggcttgatgagcgttttgcgcgtattacagacaatgtccggcttgaaaacatcggagatattaccacatctgtagtgcaagttctgggcgaagagagcagaaaggtcagtcacaacattgacgtatgcgtaaaacagatagaaagtattttcactgaattcaagcgaagctggcctcaggatgccagcgatttggattcaaccctttccagtgctcaagattttttctccaagctgaccaggctggaaaaagacggcctgcctgcccacgaacagcgtttcttcgatctgttgcaaaaccaaagccnnatcaaaacctggcggctttgtacactcatttga

SEQ ID NO: 28524 - protein, 510 aa, Unknown
  Obtained from environmental sample
  misc_feature (1)..(510): Xaa is any amino acid
MIRSAEVTERAQATAACVELGWSFSETPQGFANLIGKAREEIEGMEDRNNATRGEQLLLERKKKEVEDAFAIAKKEVLALQSQPSNIPADMLDLRNKIASAIGVSVTALPFAGELIEVKPEQSIWQGAIERVLRGFALSLLVDERHYSSLASYINNTYLGQRLFYYRTGHVESWQEKPASADSMVFKLNIKEGSYAEWLRAELRQRFNYICVESVQAFKTADRAITLQGQVKHSKTRHEKDDRRAVDDRRNWVLGFDNREKLSLFQQHAQELAEKISVLTAKSNSLSEKEKLNAKRALKCQILVNIQWQEIDVLPIIERVYAIEKQINQMRDGNKELREISERINRQKPIVKRAEDDLREAKLEHDKTFDKLKDSKDQLNKLQNDPSIVAPTPFQKEGLDERFARITDNVRLENIGDITTSVVQVLGEESRKVSHNIDVCVKQIESIFTEFKRSWPQDASDLDSTLSSAQDFFSKLTRLEKDGLPAHEQRFFDLLQNQSXIKTWRLCTLI

SEQ ID NO: 28525 - DNA, 1620 bp, Unknown
  Obtained from environmental sample
  misc_feature (1)..(1620): n is a, c, g, or t
atgatcgcagacaagacgcataccatggtcgagggcggggcaaaagaagtcagcgaggatctgatgatacaagccctggacaaggcccataacatgatcgtggaattatgcgcttttcaggaaaagctgcgggaacttgccggcaagccgaaactcccgctggctgtccccacccatgtccttgaaaacagcgacgctatccgcgccgccgcttacccgaaacttgagaagtgttgtttcctcgcgaccaaacaggaacgccacgagggcattaaggcgatacaaacggaatttgcggcgcagtatgcggcccagcttgaggacgaaaaacagaaaaaactctttaacgccctgttcgaggacatgcagtacaacatcctccgttcatcgattcttaataacggccgtcgtgttgacgggcggggtaccgaagacatacgcaatatcacctgtgaggtggaaatactcgccagaacccacggctcggcgctctttacccgcggcgaaactcaggcccttgtggtaacaacccttggcacggtgtttgacgagcaggtgtttgacgacatcgaaggcgacaagcgggagcattttatgctccattacaacttccctccatattcagtgggcgaaaccggcagactgggaacaggccgcagagagataggccacggtaacctggcccgccgctcgctggaagctatggttccctccaaagaggaattcccatacacggtgcgggtggtctcggagataatggaatcgaacggctcctcgtcaatggcgtcggtttgcggcgggacgctttcaatgctccacgccggagtgcctttgaaaaagcccgtggcaggtatcgcgatggggcttatcaccgaaggcgcgggcaaagccggcgatcngtacgcgggtgtatccgacatacttggcgaggaagatcatctgggcgacatggactttaaggttgcgggtaccaaggacggaataacaggtttccagatggacataaaaatttcaggtgtcagcacagagattatgcgtaaagcccttgatcaggcaaaacatggaaggatgcatattctttcggttatgaaccaatgtattgataaacccgccgtacaaatcagtgaatatgcaccaaaaattgttaccctgcgaatagatgttgataaaataggcgctctcataggccccggcgggaagaacataaaagcgttatgtgaacaatattcagtcaagattaatacggaagatgacgggactgtaacaattttcggcaaaaatacaaaggacgctgaaaacgctaaaattgcggttatggggattgcttctgatccggaagttggcagggtgtatgacggtgttgtgaaacggataatggatttcggagcgtttgttgaaatacttcccggtaaggaagggctggtacatatcagcaaactttcaagacagcgcattgcacaggttacagacgtgataaaggaaggccagcagattcccgttaaactccttgagattgataaaatgggaaggcttaacctttcgtatattgacgcgattgatcccaacggatctgatgacaaggaaacgagaaaagataatcgtccgaataacaggaaataa

SEQ ID NO: 28526 - protein, 539 aa, Unknown
  Obtained from environmental sample
  DOMAIN (64)...(142): Polyribonucleotide nucleotidyltransferase, RNA binding domain
  misc_feature (1)..(539): Xaa is any amino acid
MIADKTHTMVEGGAKEVSEDLMIQALDKAHNMIVELCAFQEKLRELAGKPKLPLAVPTHVLENSDAIRAAAYPKLEKCCFLATKQERHEGIKAIQTEFAAQYAAQLEDEKQKKLFNALFEDMQYNILRSSILNNGRRVDGRGTEDIRNITCEVEILARTHGSALFTRGETQALVVTTLGTVFDEQVFDDIEGDKREHFMLHYNFPPYSVGETGRLGTGRREIGHGNLARRSLEAMVPSKEEFPYTVRVVSEIMESNGSSSMASVCGGTLSMLHAGVPLKKPVAGIAMGLITEGAGKAGDXYAGVSDILGEEDHLGDMDFKVAGTKDGITGFQMDIKISGVSTEIMRKALDQAKHGRMHILSVMNQCIDKPAVQISEYAPKIVTLRIDVDKIGALIGPGGKNIKALCEQYSVKINTEDDGTVTIFGKNTKDAENAKIAVMGIASDPEVGRVYDGVVKRIMDFGAFVEILPGKEGLVHISKLSRQRIAQVTDVIKEGQQIPVKLLEIDKMGRLNLSYIDAIDPNGSDDKETRKDNRPNNRK

SEQ ID NO: 28527 - DNA, 318 bp, Unknown
  Obtained from environmental sample
  misc_feature (1)..(318): n is a, c, g, or t
atgtcggatacacccgcgtacngatcgccggctttgcccgcgccttcggtgataagccccatcgcgatacctgccacgggctttttcaaaggcactccggcgtggagcattgaaagcgtcccgccgcaaaccgacgccattgacgaggagccgttcgattccattatctccgagaccacccgcaccgtgtatgggaattcctctttggagggaaccatagcttccagcgagcggcgggccaggttaccgtggcctatctctctgcggcctgttcccagtctgccggtttcgcccactgaatatggagggaagttgtaa

SEQ ID NO: 28528 - protein, 105 aa, Unknown
  Obtained from environmental sample
  misc_feature (1)..(105): Xaa is any amino acid
MSDTPAYXSPALPAPSVISPIAIPATGFFKGTPAWSIESVPPQTDAIDEEPFDSIISETTRTVYGNSSLEGTIASSERRARLPWPISLRPVPSLPVSPTEYGGKL

SEQ ID NO: 28529 - DNA, 1305 bp, Unknown
  Obtained from environmental sample
  misc_feature (1)..(1305): n is a, c, g, or t
gtggtaatgggcatgaagcgtttttcaagtcgtgaaggtgaaagtccacgctccatgtcccctaccatttataggtatatcctcactgaaaccttcttttctttctttattgcattcctgtttttcttttttattttttttgttaaccagctcctgttaatggcccaggacattctggcaaaacaggttccgtttgggcaggtcgcccttctggtgctgttctccctgccttccgttatagcgttgtccgcccctttcgcgtcccttgtcggcactttgatgaccgtagggcgactttcaagcgataatgaaattctggtgtttctgtcatccgggctttccttcaggaacgtgtttgtgcccgcgataaccgtaggcattgtcatctccattctttcttttatcgccaatgacatactgcttcccggagggtatgtgaaatttgcccaattgtacaggcgcatacttctttccaccccggcgctggaactggaggcaaactcggtaaaaagattcaaaaacacggtgatagtcaccggtaacgtgacaggcaacgctatcgacaacgtgttgatactggacaaaaccagcgacggcgaacgccgtgttatcatggccgccaatgccgaattaaaagacgcgggcaaagatggtttgagcattgatcttgacaaggcttttgtacagtcctcaaaggaaatagcccgcgaggattatgactacgcgtccgcaggttatcttcgctactgggtgcctcaggaggatcttatccaggccatgtcctcggtaagcccccgtgagatgagttccattgatgtgtacaaagaaataaaaagaagaactcttgatctaaacaaccgcatgaatgagaaacgaaacaaggtttcttcccttgccctcacccttgagaacaccctgcgcgccggaccaaattcccaggattggaaccgcagaacaaatcaaattgccgctttccagcgggaagtacaggcgcttcagaatatgggtaaagacaggggtctttcgctgtattggctggaattctacaagaaattctccatgccgttcggggctttctcttttatcttcctctcggtcgcgctgggactgatggcaaaaagaagcgggcaggccgtcggctttatgattggactcatcatttcggtaatctactgggcgctgcttctgggcgggcagaccatgggaataaggctaagtacccctccgttttggtcaatgtggctgccaaatattctcgcgctgtcgttcgggcttgttctgaccgttatcaggatatcgaaatga

SEQ ID NO: 28530 - protein, 434 aa, Unknown
  Obtained from environmental sample
  DOMAIN (25)...(430): Predicted permease YjgP/YjgQ family
  misc_feature (1)..(434): Xaa is any amino acid
MVMGMKRFSSREGESPRSMSPTIYRYILTETFFSFFIAFLFFFFIFFVNQLLLMAQDILAKQVPFGQVALLVLFSLPSVIALSAPFASLVGTLMTVGRLSSDNEILVFLSSGLSFRNVFVPAITVGIVISILSFIANDILLPGGYVKFAQLYRRILLSTPALELEANSVKRFKNTVIVTGNVTGNAIDNVLILDKTSDGERRVIMAANAELKDAGKDGLSIDLDKAFVQSSKEIAREDYDYASAGYLRYWVPQEDLIQAMSSVSPREMSSIDVYKEIKRRTLDLNNRMNEKRNKVSSLALTLENTLRAGPNSQDWNRRTNQIAAFQREVQALQNMGKDRGLSLYWLEFYKKFSMPFGAFSFIFLSVALGLMAKRSGQAVGFMIGLIISVIYWALLLGGQTMGIRLSTPPFWSMWLPNILALSFGLVLTVIRISK

SEQ ID NO: 28531 - DNA, 735 bp, Unknown
  Obtained from environmental sample
  misc_feature (1)..(735): n is a, c, g, or t
gtgaataaaataaaaataaaatcaggcactcaaattggttggcttgagggagcaacaagaaatgattttcaacataacaatataatttttattatcaataataaagaacaaatggcaatttctcgaggaatggggatttttccaaaaaatttaatagagtgttgtatatgtttttcagtgcgtaaagttattgttgccgattggctaaatgaccgcgatttatttctatatccaaacgataattggaaaaatgatacagattttcaaaatgattgtttaacgtttacagtatttaatacaaatattcaatcaaaatatggcacgaatcactggataccttttactgaagaagaagtaaacgcgaagaataattttgaaagccattttatgattgactttataaaggacaaaacaatacacgatgagagcatggaactgtttgaagaattaacggaaaaacataaaccgttaaaattttcaggcgaagcaaaagcggtttttaaggctggaaaaaagttatggcaatactatcactctcaacctaccgctaatgtaaacgcttctttatacgacatccgtgaattctttcaaggcaggaatgataacgataaaatgaacaatacaagcgacgatgatacatacaataaattgattgctgatttacgctccgccttaaaaacattagcattgaaaatacaaccgaaagtatatgagtacgggtttttgctggaataa

SEQ ID NO: 28532 - protein, 244 aa, Unknown
  Obtained from environmental sample
  misc_feature (1)..(244): Xaa is any amino acid
MNKIKIKSGTQIGWLEGATRNDFQHNNIIFIINNKEQMAISRGMGIFPKNLIECCICFSVRKVIVADWLNDRDLFLYPNDNWKNDTDFQNDCLTFTVFNTNIQSKYGTNHWIPFTEEEVNAKNNFESHFMIDFIKDKTIHDESMELFEELTEKHKPLKFSGEAKAVFKAGKKLWQYYHSQPTANVNASLYDIREFFQGRNDNDKMNNTSDDDTYNKLIADLRSALKTLALKIQPKVYEYGFLLE

SEQ ID NO: 28533 - DNA, 480 bp, Unknown
  Obtained from environmental sample
  misc_feature (1)..(480): n is a, c, g, or t
atgaatcaaatacatattgacatattgagggaaaatattaatatacttaatttaagcgccgattgggtacgacattcctatgaacaaaccaatacaatagagctaaaaactgaatatgcaacagacgaatttgataagcttgaaaatttgacatctcgatacgcaaggacaaccgacatgctgataaacaaagtatacgaagcattgatactgttgaatcagaggataattgatatgaataacctacggaaattttctgaggataaacggattataggtacaccccggtatgcttattttcagcggatgtgttcagaagctggtctctttgctgttaaagaagcaaaggataaggggcttcccattacctatgttgaaaaagaagagatcgttaaggaatacgcagatggaagaaaagaaatacttggcagaatagaaccaaatgtaaaagtaaaaaaacgagtttataaaataccatga

SEQ ID NO: 28534 - protein, 159 aa, Unknown
  Obtained from environmental sample
  misc_feature (1)..(159): Xaa is any amino acid
MNQIHIDILRENINILNLSADWVRHSYEQTNTIELKTEYATDEFDKLENLTSRYARTTDMLINKVYEALILLNQRIIDMNNLRKFSEDKRIIGTPRYAYFQRMCSEAGLFAVKEAKDKGLPITYVEKEEIVKEYADGRKEILGRIEPNVKVKKRVYKIP

SEQ ID NO: 28535 - DNA, 1293 bp, Unknown
  Obtained from environmental sample
  misc_feature (1)..(1293): n is a, c, g, or t
ttgttaggccgtggggctgatatttttgccgccaacgccaaaggcgaaagcccgctttacctgacctttccatccccggaaagaagaaattcgacacttaggcagtggatgcttaatccggagacactcagcgcccgtgacggccttggcaatacagccctccactacattgcccactggcgtcttgatgactggattccagacctcgttaaaatgggagcgaaaatagaagcggcaaacgctacaggtgaaactcccctgtttgcagctgtcaagcaggactcgccttctacgatcaaagcgctcattgataacggggcatcgctttttgcaagagacagtctgggcaattcacttcttcacgcggctgtacgctggcatgccatttccggagcgaaaatgcttttggatcagggactggacatcaactgccatgctttaaacggaaaaacccctctgcacgactccatccgctggtcgatatccgatatggaggatcttcttttaatgcgcggggctgatattgagatacgggatgctgaaggcaacacgccttttatggaagccgtcatcgcgggtaattcgtccagcatggaacggcttgccaaaaggggagccgatataaaaaccagaaaattcaatggcgacactgccctgcacatcacagcaagtatggacagattagatctttcaacgcaactattgacatggggagtttccattcacgcaagaaacgcccaggacataacccccctacaaaatgccatcaacgcctccccaaggcttgtcagaattttccttaccatggacaggctgaattcccccgatgactttggctccactcccttgcacattgcggttcaggaaaaagcttcgctgtctacaatcagaaccatccttgatctgggcgcgagtcaatccatggttaacgccgacggcaaaaccgccttacgccttgccgtggatcttgatcagtttgaaacggcgcgaatgcttgccaattccagcagtgatgtgtttgtcgccgcccgcgacggaaaaacaccggcagaagccgccctctcaaaaggcgcagacgcagtaaaattcctcttttcgggaaccgcgattaactccagggattcattgggaaacacgattcttcattacgccgcaaagcagggggatacgtcgcttgtttctcttttaatctcaatgggcgcagataaggcaatcaaaaacattgcctccgaaagcccggcggacatcgctctgcgatggaaaaacaacgatgccgcagcattgctgaattag

SEQ ID NO: 28536 - protein, 430 aa, Unknown
  Obtained from environmental sample
  DOMAIN (278)...(311): Ankyrin repeat
  misc_feature (1)..(430): Xaa is any amino acid
MLGRGADIFAANAKGESPLYLTFPSPERRNSTLRQWMLNPETLSARDGLGNTALHYIAHWRLDDWIPDLVKMGAKIEAANATGETPLFAAVKQDSPSTIKALIDNGASLFARDSLGNSLLHAAVRWHAISGAKMLLDQGLDINCHALNGKTPLHDSIRWSISDMEDLLLMRGADIEIRDAEGNTPFMEAVIAGNSSSMERLAKRGADIKTRKFNGDTALHITASMDRLDLSTQLLTWGVSIHARNAQDITPLQNAINASPRLVRIFLTMDRLNSPDDFGSTPLHIAVQEKASLSTIRTILDLGASQSMVNADGKTALRLAVDLDQFETARMLANSSSDVFVAARDGKTPAEAALSKGADAVKFLFSGTAINSRDSLGNTILHYAAKQGDTSLVSLLISMGADKAIKNIASESPADIALRWKNNDAAALLN

SEQ ID NO: 28537 - DNA, 570 bp, Unknown
  Obtained from environmental sample
  misc_feature (1)..(570): n is a, c, g, or t
atggaaaacgctttgatagtttcgaactctgagaaaagcgttgcgttttttaccgaaatgcttaacgcgggctcttgcggggcggtcaccgttttgaagaccggcgcggaggcgcggcgcgttttatccgaacgcgaattcgatattgtgataatctacgttcccctacccgacgaatcgggcgagagtctctcccggcatatcgccttaaaagaaacatcgcaggtcattcttgtggtaaaaagcgaatactttgacgatatgtgcgcggccaccgaaaacgccggcgttctcgtggtcgcccggccagttgacagggcaatcttccggtcgtcgctgcggctcgccaagtccgctcacggcaggctgaaaaaattacgcttagagaatatcgagctcaagcggaaaatagaggatatcaagataatagaccgcgccaagtacatcctaatctcttatctgaagatgagcgagggggaggcgcatcggtttatagaaaaacaggccatggatatgcgggcgacgcgcaggtctgtcgcggaaggggtgctgcggacgtatgagagctga

SEQ ID NO: 28538 - protein, 189 aa, Unknown
  Obtained from environmental sample
  DOMAIN (2)...(114): Response regulator receiver domain
  misc_feature (1)..(189): Xaa is any amino acid
MENALIVSNSEKSVAFFTEMLNAGSCGAVTVLKTGAEARRVLSEREFDIVIIYVPLPDESGESLSRHIALKETSQVILVVKSEYFDDMCAATENAGVLVVARPVDRAIFRSSLRLAKSAHGRLKKLRLENIELKRKIEDIKIIDRAKYILISYLKMSEGEAHRFIEKQAMDMRATRRSVAEGVLRTYES

SEQ ID NO: 28539 - DNA, 351 bp, Unknown
  Obtained from environmental sample
  misc_feature (1)..(351): n is a, c, g, or t
atgagagctgacggaaaactcaatgaggagtgcgcgatcttcggcgtcagcctgaccagcgacgtcgcggcggggctgacgtacaacggtctgctggcgctgcagcaccgcgggcaggagggggcgggcatagcggtggccaacaaccacaacctcgtatgcctgaaagacgtggggcttgtaggcgaagtattttccggtgaaaagatcgagcatatacccaaggggcgcgtcgccgtggggcacgcgcgctactctacgaccggacgcaactcaaaggaaaacgtggggccgttcgtcacggagtacctgaccggcaggatcgcgacctcgtgccatctgatcatgtaa

SEQ ID NO: 28540 - protein, 116 aa, Unknown
  Obtained from environmental sample
  misc_feature (1)..(116): Xaa is any amino acid
MRADGKLNEECAIFGVSLTSDVAAGLTYNGLLALQHRGQEGAGIAVANNHNLVCLKDVGLVGEVFSGEKIEHIPKGRVAVGHARYSTTGRNSKENVGPFVTEYLTGRIATSCHLIM

SEQ ID NO: 28541 - DNA, 456 bp, Unknown
  Obtained from environmental sample
  misc_feature (1)..(456): n is a, c, g, or t
atggaactgctggcggtattggttccggggatttatttctgcgcctttgcccaggaaaagaaaatgtccgtgggactcggggcggaatggaacatggcttcacggcatgactttgccggcggggccgttttgaacttcctctacaacctgccgggggcatccgcggtgggcctttcttttacgggaagcatgaactttaacaatatttatgttctggaacccggttttcatgtacgcaagtatttttcgcaggatatatattcgggcttttttatccagtttaacacgggggcgttcatcgcctttgaagaaaaaggcataacccccatgattatgaccgggcttgccgccggctgccgtatcccgttggggtcttctttttatattgagccttacggccgcgcggggtatccgttcgcctttggcctgggcgccatggcgggaatttgtttttag

SEQ ID NO: 28542 - protein, 151 aa, Unknown
  Obtained from environmental sample
  SIGNAL (1)...(17)
  misc_feature (1)..(151): Xaa is any amino acid
MELLAVLVPGIYFCAFAQEKKMSVGLGAEWNMASRHDFAGGAVLNFLYNLPGASAVGLSFTGSMNFNNIYVLEPGFHVRKYFSQDIYSGFFIQFNTGAFIAFEEKGITPMIMTGLAAGCRIPLGSSFYIEPYGRAGYPFAFGLGAMAGICF

SEQ ID NO: 28543 - DNA, 1068 bp, Unknown
  Obtained from environmental sample
  misc_feature (1)..(1068): n is a, c, g, or t
ttggcgaatacccggtatgttgtttctttggttcttaacgccaaccttccttttgtcagggaatataccgattcggcgcgcccgtccgacctctttgaagacgaggcggacgtaaagtccgtggaaagacctgaatatacttacgaaactgaacaggagcaggaagttcttgtcccgtgttcagttgaggaaagctggtttttcgaggctgtttcggaaacgtacttgcccctgcttggagtatttgaccggcttgagggatcccatattccgtttcgtttgggtatttccctttcgccggttttggggcacatgttttgcgatgattatctgattaaaaaatacattgcccatctggaacgccagattgagtttggcaggcatgaagttgaacggcttgagggccgggacgaatgcgctcttgcgcagcattattttgatcaggcggttgaacgacacgcggcttttacaatccgttatgaccgcgatatcctcaagtcccttgactattaccagaagaaaggaagaatcgaactgattgccgctcccgctacaaacgcctttctccctttcctctgccggtttcccgaagcggtgcgggcgcagatggaaacggcgctcacgttttaccattatgccctggggatttctcccaggggtttctggcccggcgaactgggatggacaaaggatctgtcctcttacctttattcttacgggctaaactataccattgtcaacagccacggcctgctttttggaaagccgcccccctcgcgcgggacattttaccctgtcaagaccgaggaggggctttttgttctgagttgtgattacaatacttccgccccttgtgccgggatgcaaaaagaagggccgtaccgtgacaataaccgcgatgtggtcgatgagtctgacggagatataaaccctttttatcgcgaaaaaacggcgagaaataccattccggctacaaatactggcagaagagaagcgataaactgtatgatcccgcgcaggccaaatcctttatacggnaacaggcgcgggaacttctggagagcttaa

SEQ ID NO: 28544 - protein, 355 aa, Unknown
  Obtained from environmental sample
  DOMAIN (56)...(355): Glycosyl hydrolase family 57
  misc_feature (1)..(355): Xaa is any amino acid
MANTRYVVSLVLNANLPFVREYTDSARPSDLFEDEADVKSVERPEYTYETEQEQEVLVPCSVEESWFFEAVSETYLPLLGVFDRLEGSHIPFRLGISLSPVLGHMFCDDYLIKKYIAHLERQIEFGRHEVERLEGRDECALAQHYFDQAVERHAAFTIRYDRDILKSLDYYQKKGRIELIAAPATNAFLPFLCRFPEAVRAQMETALTFYHYALGISPRGFWPGELGWTKDLSSYLYSYGLNYTIVNSHGLLFGKPPPSRGTFYPVKTEEGLFVLSCDYNTSAPCAGMQKEGPYRDNNRDVVDESDGDINPFYREKTARNTIPATNTGRREAINCMIPRRPNPLYGNRRGNFWRA

SEQ ID NO: 28545 - DNA, 576 bp, Unknown
  Obtained from environmental sample
  misc_feature (1)..(576): n is a, c, g, or t
atgaaggaaacgccgattagcctttgcgcgttcaacgcggacagctttggccgtcaatggcacgggggcgaccacttcattgaaagcctgttcagactggcggccgactacaaggaactgcagtttatgactccttcagagtacctgttccagcagcccatctccgctcttgaagtatcccatcctgagttctcttcatggggcgataacggctatgccgaacaatggctggattcttccaatgactggatttaccgccatatcaaccattccatcgagcggatggtggagcttgccgacagattcaccgaagattcaagcttgaaagagcgggcattgaatcaggcggcaagggagattctccttgcgcagacctcggactggccggccttgatctaccgtgaggaaagcgccgaatacgcgaaaaagcaaattgaaagcgcgctgcagaattttactataatttatgaatctttgggcagaagccacatcagcgccgaatggctgaccagccttgaacgccggcataatgtcttccccaatatcaactaccgggttttcaggagcaggcggtag

SEQ ID NO: 28546 - protein, 191 aa, Unknown
  Obtained from environmental sample
  misc_feature (1)..(191): Xaa is any amino acid
MKETPISLCAFNADSFGRQWHGGDHFIESLFRLAADYKELQFMTPSEYLFQQPISALEVSHPEFSSWGDNGYAEQWLDSSNDWIYRHINHSIERMVELADRFTEDSSLKERALNQAAREILLAQTSDWPALIYREESAEYAKKQIESALQNFTIIYESLGRSHISAEWLTSLERRHNVFPNINYRVFRSRR

SEQ ID NO: 28547 - DNA, 1305 bp, Unknown
  Obtained from environmental sample
  misc_feature (1)..(1305): n is a, c, g, or t
ttgtgggggataataagcgtggaacagaattccaggccccgcaggtggacagataatgaaaagagatttgtcgccttgacggcaagtaccatcgcgggcgtaattatgcgtgatatttatacgataaaactcaaagaagcgctgcaaaaggcaaccgtggcaagcaaggctaaaggagaattcctttccaacatcagccacgaaatgcgaacgcctttgaacgcgataatcggtatgaccgagataggcaagaactcaggcgatctggaaaaaaaagaccacgcgtttaacaggattgatgaggcttcgacgcatcttttgggcattataaacgatgtgcttgatatgtcaaaaattgaggcgaacaagctggaattgtcctttgttgattttaatttcgagaaaatgctccggcgggtagtgaatgttgtcagctttcgtgtagacgcgaagaagcaaaatctgtcgatgaacatgagcagcgatgttcctaaaaccttgattggggacgaccagcggcttgcgcaggtaatcgcgaatctccttgggaacgcggtcaagttcacgccggagaacggttccattagccttgacgcgcgtttggaaaaagaagaaggcggcttgtgtaccataaaaatttctgtaagtgacacaggtatcggcctgagcaccgagcagcaggcaaaattgttccagtcctttcagcaggcagagagcagtacggcgcgcaaatacgggggtaccgggctgggccttgcgatttccaaaaacattgtggagatgatgggcggcaggatatgggtgcaatccgagccggggaaaggcgccgtgtttacttttacggttaagttaaaacgcggtaaggatgaataccccggcgcggaagagcaggaagaggcgaaagtacaccgctttgacggagcgtataagggccgcaggttattactggcggaagatgtggaaataaaccgcgaaatagtactgacgctgcttgaacctacgcttttggaaattgagtgcgcggaaaacggaacacaggccgttagtatgtttgccgaagcgccggaaaagtacgatataattttaatggatatacaaatgcccgaaatggacggttatgaagcgacacggcgtatcagggcgctggatattccggcggcaaaaaaaataccgattgtagccatgactgccaatgtattccgtgaagatattgaaaaatgccttgaagccggaatgaatgatcatctggggaaaccattggatataaatgcggttatggaaaagctccacacttacataacttaa

SEQ ID NO: 28548 - protein, 434 aa, Unknown
  Obtained from environmental sample
  DOMAIN (57)...(122): His Kinase A (phosphoacceptor) domain
  misc_feature (1)..(434): Xaa is any amino acid
MWGIISVEQNSRPRRWTDNEKRFVALTASTIAGVIMRDIYTIKLKEALQKATVASKAKGEFLSNISHEMRTPLNAIIGMTEIGKNSGDLEKKDHAFNRIDEASTHLLGIINDVLDMSKIEANKLELSFVDFNFEKMLRRVVNVVSFRVDAKKQNLSMNMSSDVPKTLIGDDQRLAQVIANLLGNAVKFTPENGSISLDARLEKEEGGLCTIKISVSDTGIGLSTEQQAKLFQSFQQAESSTARKYGGTGLGLAISKNIVEMMGGRIWVQSEPGKGAVFTFTVKLKRGKDEYPGAEEQEEAKVHRFDGAYKGRRLLLAEDVEINREIVLTLLEPTLLEIECAENGTQAVSMFAEAPEKYDIILMDIQMPEMDGYEATRRIRALDIPAAKKIPIVAMTANVFREDIEKCLEAGMNDHLGKPLDINAVMEKLHTYIT

SEQ ID NO: 28549 - DNA, 1446 bp, Unknown
  Obtained from environmental sample
  misc_feature (1)..(1446): n is a, c, g, or t
ttggccgatatcgggcttatcgggcttgcggttatgggcgaaaaccttgttctgaatcttgaaagcaaggggtttcatattgcggtttataaccgtacaacatccaaggtagacgcttttcttgacgggcgcggcataggaaaaaaaataacaggctgtaagactttggcggatatggcggcagttttaagcaagccgcgcaaagccatgatcatggtaaaggcgggacaggcggtggacattaccatcgaacagcttttggatgtttttgaaaaaggcgacattattatcgacgggggcaactccaattaccaggacacaatgcgccgaactgaatatgtcgaatcaaaagggcttttgtacatcggaacgggcgtttcaggcggcgaagaaggcgcgcttacgggccccagcatcatgccgggcggctcttcttcggcgtggccggaagttaaacccattcttcaggcaataagcgccaaagtcgaaggcggcattccctgctgtgactgggtaggcgaaaacggcgcgggacactttgtaaaaatggtgcacaacggaattgaatacggcgatatgcagttaatctgcgaaacatacgatttattgaaaaacgtcctcggtttaagttacgaagaaatgagcgatgtttttaacgaatggaacaagggacatcttggaagttaccttatcgaaattacccgcgatattctgcgtttcaaagacgatgacgganaaccccttgtagaaaaaatactcgataccgcggggcagaaaggaacgggcaaatggacgggaatcgccgcgcttgagttcggcgtaccgcttaccttaatcggcgaggctgtctttggccgctgtctttccgccgcgaaggacgagcgcgtaaaagcagcgaaagtttttcccgccccaaaaataacttctcccgctgataaggcggcgtttatcaaggatttggaaaaggcgctttacgcctctaaaattgtttcctacgctcaaggttaccttttaatgagggaagccgcgaaagaatacaaatggaaccttaactacggcggtatcgcccttatgtggcgcggcggctgtattatccgctctgttttcctcggaaaaataaaagaagcttttgacaaaaatccgaaccttgaaaaccttttgttggatccattcttctcaaaaactattgaggaagcaggtgaatcatggcggcgcgttgtttcaaacgcggtcctaaacgggattcccgcccctgccctttcaagcgccctctcttactttgacggttaccgcagcgaacgcctgccggcaaacctgcttcaggcgcagagggattatttcggcgcgcatacttatgagcggctggacaaatctcgcggcgaattcttccatacaaactggacaggacacggcggcgcgaccagcgcttctacatattcagtttaa

SEQ ID NO: 28550 - protein, 481 aa, Unknown
  Obtained from environmental sample
  DOMAIN (1)...(174): NAD binding domain of 6-phosphogluconate dehydrogenase
  misc_feature (1)..(481): Xaa is any amino acid
MADIGLIGLAVMGENLVLNLESKGFHIAVYNRTTSKVDAFLDGRGIGKKITGCKTLADMAAVLSKPRKAMIMVKAGQAVDITIEQLLDVFEKGDIIIDGGNSNYQDTMRRTEYVESKGLLYIGTGVSGGEEGALTGPSIMPGGSSSAWPEVKPILQAISAKVEGGIPCCDWVGENGAGHFVKMVHNGIEYGDMQLICETYDLLKNVLGLSYEEMSDVFNEWNKGHLGSYLIEITRDILRFKDDDGXPLVEKILDTAGQKGTGKWTGIAALEFGVPLTLIGEAVFGRCLSAAKDERVKAAKVFPAPKITSPADKAAFIKDLEKALYASKIVSYAQGYLLMREAAKEYKWNLNYGGIALMWRGGCIIRSVFLGKIKEAFDKNPNLENLLLDPFFSKTIEEAGESWRRVVSNAVLNGIPAPALSSALSYFDGYRSERLPANLLQAQRDYFGAHTYERLDKSRGEFFHTNWTGHGGATSASTYSV

SEQ ID NO: 28551 - DNA, 501 bp, Unknown
  Obtained from environmental sample
  misc_feature (1)..(501): n is a, c, g, or t
atgatgaatgaagaatattctcccaatataaactttcgagggattttggcagaagtttacggtattggaatccttatctttggtgatactaaagttgaaaaaagtatgatttctttggaacttattcatagaggccatagccttgtaactgataaacttgtgaatatttattgtaaagatgaagatactcttattggcacaagggctaataattcagatctgtgtatggaaataaaacatcttggtataattaatgtgaatcaactgtttggagatcaacaagttctagaagaaaaaaatatacaactcttagtcaaacttgaagaaaataactcaaaaagaacctcagaaaattatgcccttaatgaaaagtacatggaattgggaggtattaaaattccatttttgcgtattgttattgaatcagagcaagatataccaggcgtcattgaaagcgcaattttaaattttaaagataagaacaatgaggaatcaggatga

SEQ ID NO: 28552 - protein, 166 aa, Unknown
  Obtained from environmental sample
  DOMAIN (4)...(164): HPr Serine kinase C-terminus
  misc_feature (1)..(166): Xaa is any amino acid
MMNEEYSPNINFRGILAEVYGIGILIFGDTKVEKSMISLELIHRGHSLVTDKLVNIYCKDEDTLIGTRANNSDLCMEIKHLGIINVNQLFGDQQVLEEKNIQLLVKLEENNSKRTSENYALNEKYMELGGIKIPFLRIVIESEQDIPGVIESAILNFKDKNNEESG

SEQ ID NO: 28553 - DNA, 645 bp, Unknown
  Obtained from environmental sample
  misc_feature (1)..(645): n is a, c, g, or t
atgcgcgacctgaacattgacgtcgccggagagtacctgaacatggcggccacgctggtcaggctgaaggcgcgcgagctgctgcccgactcgccgcccgaagacttgacgggcgaagaggacgggataaacgaccgcgagcagctgatcgccgcgctgcttgagtaccgtaagttcaaggaggccgccggcgcgcttaaaggcatagaggccaagaatttcggggcctacaagcggggaagggcggaggacgtggacagcatagcggcggacagcggcgaaagcagcgccgccatagaaaatgtgtcgatattcgacctaatcaccgcgtttaagagtatattagatagggcggcctcggcgacggacgccaaccacgtggtggagatagacgattgcaaggttgacgacaggatagagcgcatattcacagtgctgagcgacgcggcgcgcgggggcgaggtgcggttcgaggatctgtttgcggacgacaggcgcaggattgtgctcgtcgtaacgtttatggcgatactggaactggtgaagatgcggcagatacggtttaggcaggaagaggcgttcggggggatatttgtttcacgtgttgataacaaagtcgataataatcaggagagtttgaattga

SEQ ID NO: 28554 - protein, 214 aa, Unknown
  Obtained from environmental sample
  DOMAIN (1)...(202): ScpA/B protein
  misc_feature (1)..(214): Xaa is any amino acid
MRDLNIDVAGEYLNMAATLVRLKARELLPDSPPEDLTGEEDGINDREQLIAALLEYRKFKEAAGALKGIEAKNFGAYKRGRAEDVDSIAADSGESSAAIENVSIFDLITAFKSILDRAASATDANHVVEIDDCKVDDRIERIFTVLSDAARGGEVRFEDLFADDRRRIVLVVTFMAILELVKMRQIRFRQEEAFGGIFVSRVDNKVDNNQESLN

SEQ ID NO: 28555 - DNA, 780 bp, Unknown
  Obtained from environmental sample
  misc_feature (1)..(780): n is a, c, g, or t
gtgcgcattatgaccattatagcgggcgctaacggaaggaacataccgcaaatagcgcccttcaccgtctccggcatagtctcttccggctatcacgaactggacgccctctggtgcataatcaccgacggcggaggccggcggatactccggccggagacatcttcaacaagccttattgtcaaggttgacaatccgtataacagggttgacatgatggcctggccgctgtacgcggctctggacgcgggattcagcgtgtatacatggaaagacctgatgcgttcccagtacagttcctacgaatcaacgcgccagctgctgctgttgataatggcgttaattgtaattgtcgccgcggtaaacgtatcatccgccacttcaatgctggtgttggaaaggcagcgggacattgccgtgctaaaggtgacaggcgcgggcgcaaaagacataactgatgtttttctctggggtagttttcttaccggcctgtgcggggcgctcatcggcattgccgccggtcttttgcttggcaattttatcaatcccattatccgctcgctggaaaaatgcttaagttttttcagcagactggcgggcggctccgaggtaaaaattctggatcccgatttctaccttgaaaccatccccattattattgactggcgggctgtgttcctgattggctgttttacggtactatgctccgtcattgcctcatggctccccgccgcccgcgccggaaaactgaagccgatggagttgctgaggaagacttaa

SEQ ID NO: 28556 - protein, 259 aa, Unknown
  Obtained from environmental sample
  DOMAIN (56)...(252): Predicted permease
  misc_feature (1)..(259): Xaa is any amino acid
MRIMTIIAGANGRNIPQIAPFTVSGIVSSGYHELDALWCIITDGGGRRILRPETSSTSLIVKVDNPYNRVDMMAWPLYAALDAGFSVYTWKDLMRSQYSSYESTRQLLLLIMALIVIVAAVNVSSATSMLVLERQRDIAVLKVTGAGAKDITDVFLWGSFLTGLCGALIGIAAGLLLGNFINPIIRSLEKCLSFFSRLAGGSEVKILDPDFYLETIPIIIDWRAVFLIGCFTVLCSVIASWLPAARAGKLKPMELLRKT

SEQ ID NO: 28557 - DNA, 414 bp, Unknown
  Obtained from environmental sample
  misc_feature (1)..(414): n is a, c, g, or t
atgggaattttaagttcgattaaagaaaaaattttggggaaagctccggagccggcgaaacccgcggcaacgacatctgctccggcgggcgcgaccgcggcggcgatagcggcggcggcgggtaaagcggcattggcgaaagaagcggcaaagccggtagatgtggaggcggttcttgaggccgccgtaaaagccaaaggcgtaaaactcaactggcgcgaatctatcgtcgatttaatgaaagcgctcgacctcgacagcagtcttgccgcgcgcaaggaactggccgccgatttgaaatactcaggtccgcatgccgacggctccgccgaaaaaaatatctggctgcacaaacaattaatgaagacgctcgccgaaaacggcggcaaaataccgaaagaacttctcagttaa

SEQ ID NO: 28558 - protein, 137 aa, Unknown
  Obtained from environmental sample
  misc_feature (1)..(137): Xaa is any amino acid
MGILSSIKEKILGKAPEPAKPAATTSAPAGATAAAIAAAAGKAALAKEAAKPVDVEAVLEAAVKAKGVKLNWRESIVDLMKALDLDSSLAARKELAADLKYSGPHADGSAEKNIWLHKQLMKTLAENGGKIPKELLS

SEQ ID NO: 28559 - DNA, 1284 bp, Unknown
  Obtained from environmental sample
  misc_feature (1)..(1284): n is a, c, g, or t
atgcgtatttcttccattgtttttccttttattaccttttcgtttattatggcagtggctgttttttgggctgtatacgcaatatccagttctctttcaacttcaatcggcagactggtagatattacgcaggcgggcgctttgttattgtcaggtcccgaagcgggagaaccggtctcgccggaattcatgagtttggagaaagcaataagggcaatgacatttgagcttcatttacgtcttgaacaggcaaaagcggaaggcgcgcggctggaagcgatacttaacggaatgtcagaggcggtttttgcgatggattcctcacttaaacttcatctggtaaatccgtgcgctatggagctttttaatattagaggcagaaacataaataaattgtccttgcttgaggcaactcattctgcggaactggaagacgccgcaaaaaaagcgctttcgactaacagtactttggaaatggaacttaccctgcgcagtggcgcggaacaacagtttcaagtttatgtttcccctctttccggcgttaaaagcggcgtaatcatcgttttgcaggaagttacgcgccttgtaaaactggaaagggtgcgcaaggattttgtcgccaatgtgtcgcatgaactgcgtactccgattcagattatcaaagatttttgggaagcatgctttgattcggtatcagataaaaagaacagtcacttnatagagataatccataaaaacgcgggaactatggaaaacctaaccaatgatcttttaatactcgcggacttggaagacaacaccgtaaataaccgcgacccggaagaactaaaaatcgctcctttgattaaagaggctgttttttctttggaaacgcaggctgataaaaaacaaatagaaattattgtcgattgcaaggaaaatttaagcgcaaagttatacggctcatttattattcaggcgttaattaatttgatagaaaacggaataaagtattcgccctcaaaatccaaaatttgggtaagcgcgtttacggaaaatgacgagctgttgtttgaagtgcgcgataaaggaatggggattccctctgagcaccatgaacgaatatttgaaagattttacagagtagataaagcgagatctcgtttagcgggaggaaccggactcgggctttccattgttcggcatattgctctgcttcacaaaggaaaagctgaaatggaaagccgcgtcggtgaaggatcaatctttaggattaggatccctatctatcggaattctcaataa

SEQ ID NO: 28560 - protein, 427 aa, Unknown
  Obtained from environmental sample
  SIGNAL (1)...(27)
  DOMAIN (95)...(197): PAS fold
  misc_feature (1)..(427): Xaa is any amino acid
MRISSIVFPFITFSFIMAVAVFWAVYAISSSLSTSIGRLVDITQAGALLLSGPEAGEPVSPEFMSLEKAIRAMTFELHLRLEQAKAEGARLEAILNGMSEAVFAMDSSLKLHLVNPCAMELFNIRGRNINKLSLLEATHSAELEDAAKKALSTNSTLEMELTLRSGAEQQFQVYVSPLSGVKSGVIIVLQEVTRLVKLERVRKDFVANVSHELRTPIQIIKDFWEACFDSVSDKKNSHXIEIIHKNAGTMENLTNDLLILADLEDNTVNNRDPEELKIAPLIKEAVFSLETQADKKQIEIIVDCKENLSAKLYGSFIIQALINLIENGIKYSPSKSKIWVSAFTENDELLFEVRDKGMGIPSEHHERIFERFYRVDKARSRLAGGTGLGLSIVRHIALLHKGKAEMESRVGEGSIFRIRIPIYRNSQ

SEQ ID NO: 28561 - DNA, 621 bp, Unknown
  Obtained from environmental sample
  misc_feature (1)..(621): n is a, c, g, or t
atgagtagcggaaccttaacaatgtcgggcggaaccataaagaactgcagtgtatggcttggtggcggcaccttcacaatgtccggcggaattatagagaacggcgatgtaggtaccaatgtaaacggagtttccatcaccatgacgggtggaaccatcagcggcgacggacacggaattggtctttggggtgatagcgaaaacataaccattagcggcggaacaatcagcggtaatagtggtactggtgtggttttaaacggtaaaaacgataaactcaccatgacgggcggaacaatcagcggtaatgctggtattggtgtggttttagttggcagcggaaatacatttataatgtccggcggaaccatcgaaaaaaatgttggttatgggctgcgcttagacggccccaacgtgggatttgaaaaaaagaagggtggggtcatttacggtgattcaggcgtcaataagaatggcgatggggctatacgtgtcaaatgccagaaaaacgattcgaacagtttgcagctgaaagttgacgcgggaaaagacgaagtctacgcggcaaagatcaacacgggacagactgaaataaccggcaaacaaggacctaattggtaa

SEQ ID NO: 28562 - protein, 206 aa, Unknown
  Obtained from environmental sample
  misc_feature (1)..(206): Xaa is any amino acid
MSSGTLTMSGGTIKNCSVWLGGGTFTMSGGIIENGDVGTNVNGVSITMTGGTISGDGHGIGLWGDSENITISGGTISGNSGTGVVLNGKNDKLTMTGGTISGNAGIGVVLVGSGNTFIMSGGTIEKNVGYGLRLDGPNVGFEKKKGGVIYGDSGVNKNGDGAIRVKCQKNDSNSLQLKVDAGKDEVYAAKINTGQTEITGKQGPNW

SEQ ID NO: 28563 - DNA, 447 bp, Unknown
  Obtained from environmental sample
  misc_feature (1)..(447): n is a, c, g, or t
atggttccgccggacattataaatgtatttccgctgccaactaaaaccacaccaataccagcattaccgctgattgttccgcccgtcatggtgagtttatcgtttttaccgtttaaaaccacaccagtaccactattaccgctgattgttccgccgctaatggttatgttttcgctatcaccccaaagaccaattccgtgtccgtcgccgctgatggttccacccgtcatggtgatggaaactccgtttacattggtacctacatcgccgttctctataattccgccggacattgtgaaggtgccgccaccaagccatacactgcagttctttatggttccgcccgacattgttaaggttccgctactcattacgcctacattaatgtttgtgctcagaactactccgttcttaatttcatggttccgcctttttcagccacaataa

SEQ ID NO: 28564 - protein, 148 aa, Unknown
  Obtained from environmental sample
  misc_feature (1)..(148): Xaa is any amino acid
MVPPDIINVFPLPTKTTPIPALPLIVPPVMVSLSFLPFKTTPVPLLPLIVPPLMVMFSLSPQRPIPCPSPLMVPPVMVMETPFTLVPTSPFSIIPPDIVKVPPPSHTLQFFMVPPDIVKVPLLITPTLMFVLRTTPFLISWFRLFQPQ

SEQ ID NO: 28565 - DNA, 840 bp, Unknown
  Obtained from environmental sample
  misc_feature (1)..(840): n is a, c, g, or t
atggataccgtggcacagactgacctgaatcccccgttatgggacagggactctgattttatttatgaaagcgcgatggccgcccaaagggcggaaaattgggaacgtgccatagagctttttaatgcgggggtaaaattttatcctgacgatttccgtttcccctggtcattggggaacctctactattaccgcagtttttacaacctggcctgggatgagtaccgcagggccgaaaaaattatcccttgggaaacggatttacttttaaagcttgcaaataccgcaggctaccttaacagaaacgaagtttccgcttcttattatgaacgccttctggcttttgatcctgacaacagggaagccgtgagcagtcttgcgtggatgtactttaagctccaccgccttcaggagggtgagcagcttttgctggacgcaatggattacttaggcgaagatatggatttcgccatgactttgggaaccatttattcaggaatgttccgttatgcggaatccaaggacgcataccagaaagccatccagggcgctgacgccatcggggacaggctttatgcggccttatcctattacaatctctctattctggagactagattttaccagttcgcactggccttcgattgcaccaacgcttcccttgcagctatggatcgcgcttcaggcaggcttgccaggggcgagctgtaccttgcgcggctggaattatccagcgcccttgccgattaccaggaagcttaccaaacggacagttcccctctttcaaaactgaaccttgcccaagtgttccagatgggggacgttgctcggccattctga

SEQ ID NO: 28566 - protein, 279 aa, Unknown
  Obtained from environmental sample
  misc_feature (1)..(279): Xaa is any amino acid
MDTVAQTDLNPPLWDRDSDFIYESAMAAQRAENWERAIELFNAGVKFYPDDFRFPWSLGNLYYYRSFYNLAWDEYRRAEKIIPWETDLLLKLANTAGYLNRNEVSASYYERLLAFDPDNREAVSSLAWMYFKLHRLQEGEQLLLDAMDYLGEDMDFAMTLGTIYSGMFRYAESKDAYQKAIQGADAIGDRLYAALSYYNLSILETRFYQFALAFDCTNASLAAMDRASGRLARGELYLARLELSSALADYQEAYQTDSSPLSKLNLAQVFQMGDVARPF

SEQ ID NO: 28567 - DNA, 510 bp, Unknown
  Obtained from environmental sample
  misc_feature (1)..(510): n is a, c, g, or t
atgatgatacattcgtatggattttcggtcatcggttcttcgcatgaaaaactagggacaaaatgccaagatgctaataaaatacgcaaattggctaatggcacatttatagcggcagttgccgatggcgtaggcagttgcaaatattctgaccttgcctctcaaattgccgtagatgtgtcaacggcttactgtgaaaccaacttgaacagttatgactttacggatttgattgaagcggcatttgtccaagccgagttagaaattgaaaaacaatctatgcaagataaccagcctcttcccgaatatgacactacccttgatttggttatttacgatggaaagcgagtgacgtatggtcattgcggtgatggtggcataatcggtttaacaaataagggtgattatataaaaattaccactcctcaaaaaaaagatgggatgtttgttattcctttgagaaatggctcaaaagataaaaataacactggattttctcggccgatctga

SEQ ID NO: 28568 - protein, 169 aa, Unknown
  Obtained from environmental sample
  misc_feature (1)..(169): Xaa is any amino acid
MMIHSYGFSVIGSSHEKLGTKCQDANKIRKLANGTFIAAVADGVGSCKYSDLASQIAVDVSTAYCETNLNSYDFTDLIEAAFVQAELEIEKQSMQDNQPLPEYDTTLDLVIYDGKRVTYGHCGDGGIIGLTNKGDYIKITTPQKKDGMFVIPLRNGSKDKNNTGFSRPI

SEQ ID NO: 28569 - DNA, 387 bp, Unknown
  Obtained from environmental sample
  misc_feature (1)..(387): n is a, c, g, or t
ttggtaaaagaacgaaacagtttttattctcaaaatggaactccctgttttaaaccttggatttttatgattaccgatggtgccccgaccgatgccgatgtcttagaaagtgctagacgaagaatacaagaggaagaaagcaagggtacgcacggaaaattgaaattttttgctcttggggtttcaggctacgataaaaatactcttttttctcttaccaatagagttatggagttaaaagataccaatttctctggcatattcaattggatgagtgagagtatggttgctatttctgttagccgagttggagccgaggctccattgtctcaattaccagaaaatgccagaaaagccgaccctaatagggatgttagtaattggtga

SEQ ID NO: 28570 - protein, 128 aa, Unknown
  Obtained from environmental sample
  misc_feature (1)..(128): Xaa is any amino acid
MVKERNSFYSQNGTPCFKPWIFMITDGAPTDADVLESARRRIQEEESKGTHGKLKFFALGVSGYDKNTLFSLTNRVMELKDTNFSGIFNWMSESMVAISVSRVGAEAPLSQLPENARKADPNRDVSNW

SEQ ID NO: 28571 - DNA, 708 bp, Unknown
  Obtained from environmental sample
  misc_feature (1)..(708): n is a, c, g, or t
ttgggctttctaattatgaattacaaattagtgccttttattgtccttacgttcatttttgtaatagcattgttttttcttcagcaaacactacagattgattttgaattaattatgttaacccaaattgcgccgacattagcatatgtcgttacaataatattgttcaaagatttatatttgtcaataaagataaatcttaataaaactattatgttaaaaacattattttcattgattattccattctttctaatttcaataacatattttattagtaaaataatgaaactgaatataaaaataactcccagcattccgccattattttataaattaggaataggcattattataggcgcagtcggagaggaaattggctggagaagtttcttacagccaacattggaaaaatttttttctgtatttatttcttcaataataacaggtttaatttggggactatggcatatccagcattatatgcaaggaccgatttttgtttttgtgtatttgttataccttataacggtttcaataataattgcatttttatcaaaagatacccaatacaatatttttatatcatcaagttttcatgcttcaatgaatattacatttaacatttattttagttttataagctcagacagaaaaatattattaacaatatttactattaatagtctaggagtctgtcggacttag

SEQ ID NO: 28572 - protein, 235 aa, Unknown
  Obtained from environmental sample
  SIGNAL (1)...(28)
  DOMAIN (115)...(211): CAAX amino terminal protease family
  misc_feature (1)..(235): Xaa is any amino acid
MGFLIMNYKLVPFIVLTFIFVIALFFLQQTLQIDFELIMLTQIAPTLAYVVTIILFKDLYLSIKINLNKTIMLKTLFSLIIPFFLISITYFISKIMKLNIKITPSIPPLFYKLGIGIIIGAVGEEIGWRSFLQPTLEKFFSVFISSIITGLIWGLWHIQHYMQGPIFVFVYLLYLITVSIIIAFLSKDTQYNIFISSSFHASMNITFNIYFSFISSDRKILLTIFTINSLGVCRT

SEQ ID NO: 28573 - DNA, 588 bp, Unknown
  Obtained from environmental sample
  misc_feature (1)..(588): n is a, c, g, or t
atggttcattatgtcgataagatggattcggcagatctaacggtggatgagattatgcacccttccggctggatattgctcggctttatcgccgatccccgcacagggctgggaaggattcggaattttaccataagcaatctggaattgatgaagaaacttgcgcgagctgcttttactaagcccattgaagaaatccttgctttaagtgatgttaaagaacgcattgatgtctacttcgaacaacaggctaaatttattgatatggtgagaaagtacgcaaaagttgaaggccaggccatatacgttgatttaagggatgtcgagataatacatgtcggaaaccgtttcctgctttataccatatttcccgaacagaatatttccgtgtgggtggtagacggcaaaaagaaggtgaataccgtgatcactgtagggtacagcacaataaacaagagcgccacagccgatgtaggcagccttatgctgaaatacggcggcggcggacataagacagtgggtacctgtcaggtggcttttgaggacgctgataaaataattggggaaattattgccacagtgaaatga

SEQ ID NO: 28574 - protein, 195 aa, Unknown
  Obtained from environmental sample
  misc_feature (1)..(195): Xaa is any amino acid
MVHYVDKMDSADLTVDEIMHPSGWILLGFIADPRTGLGRIRNFTISNLELMKKLARAAFTKPIEEILALSDVKERIDVYFEQQAKFIDMVRKYAKVEGQAIYVDLRDVEIIHVGNRFLLYTIFPEQNISVWVVDGKKKVNTVITVGYSTINKSATADVGSLMLKYGGGGHKTVGTCQVAFEDADKIIGEIIATVK

SEQ ID NO: 28575 - DNA, 888 bp, Unknown
  Obtained from environmental sample
  misc_feature (1)..(888): n is a, c, g, or t
atggtcagattggccgaggactctcggtcttacccgttttatataccgaatccaaaaaatactttttacgcaagggatgcgtcgtttataaaatcgtgggatctttttcaggaagttatgagcgcatattcgggtaaactggaaaccctgcttgccatcggcggcggcgacgacggtgaggataattcgcaaaaagagacacagcggtttaaacccgtagtgcgtttctttggaccttttgaaattggcaagaacggacaaaaaactgaaacatttgatctgcccccgtatattggcgcggtgcgaataatggttctcgccgcttccgccacaagcgaaccccaaaccggcagactgttacgcggttacggaaccacgcaagcaacagtaaaggtaacttccgatctcatggttttcgcgtctttaccgcgcatactttcacccggtgatgaatttgaagtacctgtctatgtaaattctcaaaagggcggaaaaaggaacgttaaagtaaatctcaccgtgccgggcgcggcaattcaaggcccatcaacgcaggacgtatcttttgacaagatcgaagaaaaattaatccgctttaaagtaaaatcccccgataacccgggaagcttaaagttcaccgtaacggctgaatcatcgggattaaaaacagcccagcatgttgtagatatcgaagttcgttccacggcaattcccgtaacaaagactgtgcaaagtttgctcaccgccggtgagacatggaagggtacccttgattatcccggcagagacggaacaaataccctcgtcgcagtttctcaagactgcccccgctcaaccttgaaaaagcggttggattatttaaatcagtatccccacgggttgcgctga

SEQ ID NO: 28576 - protein, 295 aa, Unknown
  Obtained from environmental sample
  misc_feature (1)..(295): Xaa is any amino acid
MVRLAEDSRSYPFYIPNPKNTFYARDASFIKSWDLFQEVMSAYSGKLETLLAIGGGDDGEDNSQKETQRFKPVVRFFGPFEIGKNGQKTETFDLPPYIGAVRIMVLAASATSEPQTGRLLRGYGTTQATVKVTSDLMVFASLPRILSPGDEFEVPVYVNSQKGGKRNVKVNLTVPGAAIQGPSTQDVSFDKIEEKLIRFKVKSPDNPGSLKFTVTAESSGLKTAQHVVDIEVRSTAIPVTKTVQSLLTAGETWKGTLDYPGRDGTNTLVAVSQDCPRSTLKKRLDYLNQYPHGLR

SEQ ID NO: 28577 - DNA, 1023 bp, Unknown
  Obtained from environmental sample
  misc_feature (1)..(1023): n is a, c, g, or t
atggaaacaacttacattcaaatgttttccgcggacaacttacagcaaatgccgggggttttcctgtggggaattgaggtaatcaaggtaattcaaaggataaaaagccctgccctgacggcgatactaagatttgttacagatcttggaaccgataaattttatcttccggtaattttatttattttctggtggattgatgaaaaaaaggggttccgccttggaattcttatgctcttatccgcgtggataaatgctttattaaaagccgccttcaaacagccccggccttttaattttgatccgtctttgggtctggcttacgaagcgacttacggcgctccgtcaggacacgcccagtattcgcttactttttgggttccgatggccgcgtggcttgccggggtaaaacccggccgtaagcgtgccgttgtctgggccgtagcaatatttttcgttctattgattggctttacacggctttatctgggcgtacacttcccaaccgatcttttagccggctggggcatgggcgccataatacttcttttgatgtacgttctaagcccgctttttattaaacacctggccggccaaacgcgcttgcaaaacattttggcggctcttgcagcgctcatcatgatcagcgtttacccgaacgacagatctcttcccgccgtttttttgggcttttgccttggctacaacataatgataaaaaaattcccctttagcccgcaaagcgagataaaagaaaaaaaactttcggttatgctgttacggtgtattacaggctttgcgggccttgttgtcatttactttgtactgaggctgttgtttcctggcgagggtagccttttcagctacatccacttttggggccaggcttccccattttacgagctggggcgctttattcgctacggtatggtcgggctttgggcgtctgccggagccccgatgatttttcagcggttggggctttctttctcggcgagtaacagtgaagaactcaaaaaatga

SEQ ID NO: 28578 - protein, 340 aa, Unknown
  Obtained from environmental sample
  DOMAIN (70)...(194): PAP2 superfamily
  misc_feature (1)..(340): Xaa is any amino acid
METTYIQMFSADNLQQMPGVFLWGIEVIKVIQRIKSPALTAILRFVTDLGTDKFYLPVILFIFWWIDEKKGFRLGILMLLSAWINALLKAAFKQPRPFNFDPSLGLAYEATYGAPSGHAQYSLTFWVPMAAWLAGVKPGRKRAVVWAVAIFFVLLIGFTRLYLGVHFPTDLLAGWGMGAIILLLMYVLSPLFIKHLAGQTRLQNILAALAALIMISVYPNDRSLPAVFLGFCLGYNIMIKKFPFSPQSEIKEKKLSVMLLRCITGFAGLVVIYFVLRLLFPGEGSLFSYIHFWGQASPFYELGRFIRYGMVGLWASAGAPMIFQRLGLSFSASNSEELKK

SEQ ID NO: 28579 - DNA, 348 bp, Unknown
  Obtained from environmental sample
  misc_feature (1)..(348): n is a, c, g, or t
ttgagtactggatcaagggtaattgaaatgctggcaaagcgcataattccatgtttggatgttgacgacggaagggtagtgaagggcgttaaatttgaaggcataagggacgtgggcgatccggtggaactggcccgccgctataacgacgaaggcgccgacgagcttactttccttgacataggcgcttcttacaagagccgcgcgactctgcttgaggttgtacataaaatcgccaatgaggtttttattcccctctgcgtgggtggcggcatacgccgccttgacgatatgcgcgacgcaatgaacgccggggcggacaagtttccgtctgcacatcggccctga

SEQ ID NO: 28580 - protein, 115 aa, Unknown
  Obtained from environmental sample
  DOMAIN (14)...(114): Histidine biosynthesis protein
  misc_feature (1)..(115): Xaa is any amino acid
MSTGSRVIEMLAKRIIPCLDVDDGRVVKGVKFEGIRDVGDPVELARRYNDEGADELTFLDIGASYKSRATLLEVVHKIANEVFIPLCVGGGIRRLDDMRDAMNAGADKFPSAHRP

SEQ ID NO: 28581 - DNA, 492 bp, Unknown
  Obtained from environmental sample
  misc_feature (1)..(492): n is a, c, g, or t
atggccggtgcttacggcagccaatgtgtggtactgtcgattgacgcaaaacgtgtcaatagcggcagcccgcatggcggcctgcgctggaatgccttttcccacggcggcagaaccgataccggcattgacgcgattgaatgggctgtgcgggcagttgaacttggcgcgggagaaattctcctcaattctattgatgcagacggcaccggcggcggctacgatcttgaactgacccgccgcatccttaacgccgtgccggttccggtaatcgcttccggcggcgcggggacactcgatcaaatagcggaagttttgctcagtaccgcttcgatagaagcgccttcagcggaaatgccgcagaacattgcactcaacgaagcgccaggagcggatgcggctttggtggcatcgttgttgcatttcgggaaaacgacgattagggaaataaaagaatgtgctgaggcaaagggtgtttgcatcaggtggtga

SEQ ID NO: 28582 - protein, 163 aa, Unknown
  Obtained from environmental sample
  DOMAIN (1)...(146): Histidine biosynthesis protein
  misc_feature (1)..(163): Xaa is any amino acid
MAGAYGSQCVVLSIDAKRVNSGSPHGGLRWNAFSHGGRTDTGIDAIEWAVRAVELGAGEILLNSIDADGTGGGYDLELTRRILNAVPVPVIASGGAGTLDQIAEVLLSTASIEAPSAEMPQNIALNEAPGADAALVASLLHFGKTTIREIKECAEAKGVCIRW

SEQ ID NO: 28583 - DNA, 924 bp, Unknown
  Obtained from environmental sample
  misc_feature (1)..(924): n is a, c, g, or t
ttgttggacagggaggggcaaaacaccaccttcccccagaccattggtttagcggcgagttgggatagggaacttttgcgaagagtcggggaaattngcgcaatcgaggcccgcgttttctacaaaacccacgagcgtaagggggggcttgcaatctgggcgcccactattgacatggaacgggatccccgctggggccgtaccgaggaaggatacggggaagatccttttttgacttccgagctttcatcttcctacattcggggagcgcagggggacgatcccttttatctgcgggtaagctgcgggcccaaacacttttttgcgaataacaacgaaaaggatcgggactcctgttcctgttcgattcctccccgctgtctgcatgaatactaccttgtgccttttaaagcggcgatacaaaaggcaaaagcggtttccctgatgacttcctataacgaggtaaacggcatccccatgatgcttcatcccatgttaggcgatattgtaaaaaaccagtgggggcttgaaggccatatcgttaccgacggcggcgattttcttcaaacagttagtacccatcactattttgacactcatgccgaaactctcgccgccgcgttaaaaaacggcgcggacaccatgaccgataagccttccgaaataatttccgcggtcatggaagcgctaaaaagaaatcttattgacgaagatgaattgaataaacatctggaacgaattttagctatccgctttcgtctcggcttgtttgatcctccgggcctgtgcccttacgacactatcagcgaagcggattttatgaaagacgagtaccgcggcgtgtcgcgtgaggcggtaaggaaatcggcggtgctgttaaaaaatgacgggaaccttctccccctgcgacccggcgcgggttga

SEQ ID NO: 28584 - protein, 307 aa, Unknown
  Obtained from environmental sample
  DOMAIN (2)...(216): Glycosyl hydrolase family 3 N terminal domain
  misc_feature (1)..(307): Xaa is any amino acid
MLDREGQNTTFPQTIGLAASWDRELLRRVGEIXAIEARVFYKTHERKGGLAIWAPTIDMERDPRWGRTEEGYGEDPFLTSELSSSYIRGAQGDDPFYLRVSCGPKHFFANNNEKDRDSCSCSIPPRCLHEYYLVPFKAAIQKAKAVSLMTSYNEVNGIPMMLHPMLGDIVKNQWGLEGHIVTDGGDFLQTVSTHHYFDTHAETLAAALKNGADTMTDKPSEIISAVMEALKRNLIDEDELNKHLERILAIRFRLGLFDPPGLCPYDTISEADFMKDEYRGVSREAVRKSAVLLKNDGNLLPLRPGAG

SEQ ID NO: 28585 - DNA, 957 bp, Unknown
  Obtained from environmental sample
  misc_feature (1)..(957): n is a, c, g, or t
atgaatattaaaacaaaactaagcattatgatgattgccattgtattggcagtaacgggcggcgcagctgtaattatattacaaagatcaagcagtataatcatatctcttgcggagcagaaaacaatgtatctgtcacgccaatacgccaactactttgacggccgcatgaataactatataagcgttctgtatacattatcgaatataatgggttcttatgaaaatctgccggtagagggaaggcgccggacgtatgaagaaaccatggaatctgtttttgaagatatgcccgaatttatccggatgtttgtcgtctggaaacctaacgccattgacggtatggacgcgcgtaacattggcagggtaggctcaacctccaccggacaatttgcttttgccttgacaagggaaaccggattgatacagcccatgatctcacagatcgttaatgagacaatggaatggataaacggtcccaacggcaaagttttctcgataagcgatccctccgtaattaagaatcagggaagagatacttttagtgtcagaatatcagtccccattattaacaaacgtctgaatgaaacagtcggagctataggctgtcagttggatattgatatgttacagcctgttttattgcggattattaatacaaacgatgaaatttccggcgcggcaatttattcagacaacggatttattcttgcaagttaccggccggagtttataggaaaacaaattgattctgaaacacaatacggcaagtacctggacgatgtcaaaaaggctgttaagaatgcgcatgaatggggtggagaagcttacagcccggaactgaaaacaaatatggtaatgtctattgcaagtattcctatagggacttccccggcaacatggtcaataatgcttggttcatcagaagactacatattaaaagatgtaaacgcataa

SEQ ID NO: 28586 - protein, 318 aa, Unknown
  Obtained from environmental sample
  SIGNAL (1)...(22)
  misc_feature (1)..(318): Xaa is any amino acid
MNIKTKLSIMMIAIVLAVTGGAAVIILQRSSSIIISLAEQKTMYLSRQYANYFDGRMNNYISVLYTLSNIMGSYENLPVEGRRRTYEETMESVFEDMPEFIRMFVVWKPNAIDGMDARNIGRVGSTSTGQFAFALTRETGLIQPMISQIVNETMEWINGPNGKVFSISDPSVIKNQGRDTFSVRISVPIINKRLNETVGAIGCQLDIDMLQPVLLRIINTNDEISGAAIYSDNGFILASYRPEFIGKQIDSETQYGKYLDDVKKAVKNAHEWGGEAYSPELKTNMVMSIASIPIGTSPATWSIMLGSSEDYILKDVNA

SEQ ID NO: 28587 - DNA, 660 bp, Unknown
  Obtained from environmental sample
  misc_feature (1)..(660): n is a, c, g, or t
atggatggtttatcgggatggggaaaagatgttataaggaaaaataataatacaagaatcattgaaatgtcaaataaactgtttaatgaattagctgataaaatggatccttcagaaatgttgataacagcaaagataaaaaaaaatgaactcagtgatataaattctaaaaatccatttatagtagtatttgacagaccaagtgattatggaaatttaggttctattattcgttcagcaaatgcttttaatgtggatggaattttcataatagggcatggaatagatatatacgaatcaaaagttattagatcaagtttaggaagtatattttttacaaaaattgtgacaataaaatcaatggaagtactattagattatataaaggctcaaaaagaaaagaacaatatggaaataatagggacagattcaaatggaaacgtatcaataggggactgtaaaataaataaaccaataatgctaattttagggaatgaagcgaagggtatgagtataggacttaaggaaatttgtgacaaaataataagaataccaatggaaggaaatataaattcattgaatgtatcatgtgcggcatcaataataatgtgggaaatatataaaaggcaacgcggactgcctgacaccagtttagcgtag

SEQ ID NO: 28588 - protein, 219 aa, Unknown
  Obtained from environmental sample
  DOMAIN (59)...(204): SpoU rRNA Methylase family
  misc_feature (1)..(219): Xaa is any amino acid
MDGLSGWGKDVIRKNNNTRIIEMSNKLFNELADKMDPSEMLITAKIKKNELSDINSKNPFIVVFDRPSDYGNLGSIIRSANAFNVDGIFIIGHGIDIYESKVIRSSLGSIFFTKIVTIKSMEVLLDYIKAQKEKNNMEIIGTDSNGNVSIGDCKINKPIMLILGNEAKGMSIGLKEICDKIIRIPMEGNINSLNVSCAASIIMWEIYKRQRGLPDTSLA

SEQ ID NO: 28589 - DNA, 795 bp, Unknown
  Obtained from environmental sample
  misc_feature (1)..(795): n is a, c, g, or t
gtggcggcattgtcggcggcgcgtatggattacgcgtcggacgagctgcccgcggacataggcggcgttatcgccgcaaggcttaaggccctgcgcgatgaaatagcaaaggccctttcgtccaaggcgtataagatcgaaaggggattcaatattgttatatccggcggcgttaatgtgggaaaatcgtccttgttcaatcggcttttgggcgaaagccgggcgatagtgtcggacattcccggaaccacccgcgatgttgtatcggccgagttggatatagacggcttttacgcgcgcctgttggacacggcggggcttcgcgatagcgcggacgaaatagaaaaagccggaatcgacaaggcgttggagcaggcggagaatgcggatctggtattaaaggttatggaaccgacggatggcgtccgcaaggctgcgccgggcgagataatcgtcgttaataagtccgatttaatcaaaggcggcgggtcaaagataaaggatgcggtttatgtttcggcaaaaaccggacagggcgtaagcgaattgctggaccgcataaggcgggaattagaggagcaggccggagaggacgatctaatagtgaaccaaagggtaaggggccaccttgtgaaagcggcggaaaatctatcgttggctttggcggaaggactggccgaaacagagtcggaacatataacgctcgcagccgatgaaatcggtctgatccttggtttcataggatcagacgagatttacgattcggtgttcgggcaattatgtcttgggaaatag

SEQ ID NO: 28590 - protein, 264 aa, Unknown
  Obtained from environmental sample
  DOMAIN (51)...(193): Ras family
  misc_feature (1)..(264): Xaa is any amino acid
MAALSAARMDYASDELPADIGGVIAARLKALRDEIAKALSSKAYKIERGFNIVISGGVNVGKSSLFNRLLGESRAIVSDIPGTTRDVVSAELDIDGFYARLLDTAGLRDSADEIEKAGIDKALEQAENADLVLKVMEPTDGVRKAAPGEIIVVNKSDLIKGGGSKIKDAVYVSAKTGQGVSELLDRIRRELEEQAGEDDLIVNQRVRGHLVKAAENLSLALAEGLAETESEHITLAADEIGLILGFIGSDEIYDSVFGQLCLGK

SEQ ID NO: 28591 - DNA, 558 bp, Unknown
  Obtained from environmental sample
  misc_feature (1)..(558): n is a, c, g, or t
atgctgacccgctccgccaaagtcatggcttcggggctgcccggcggcgtttcctttatggaagattacacctaccattttgagcccggtaaagaagcagctttgggcgcccacatgcttgaggtatgcccttccatcgcggacggcaaagcgcgtatcgaagttcatccgctgggaatcggcggcaaggcggatccggcccgtatggtgtttgacgccgcccccggccccgcggtactggcgacgcttattgatcttggcagccgtttcagaatgattgttaatgaaattgaaactatcaagatcgataacgcaatgccgaaattgccggtcgcccgcgccctctggaagccgtatcccagcctgggcggcgccgccgaagcctggataatatcaggcggcacgcaccattcggtatacagcgccgcgcttaccgcggagtatttccgcgattgggctgagatgagcggcattgagtttgtgctaatcgaccgtgatacaaaaccggcgcgtttgcaggatgagctgcgccgaaacgacgcctggtggtcgcgttaa

SEQ ID NO: 28592 - protein, 185 aa, Unknown
  Obtained from environmental sample
  SIGNAL (1)...(20)
  DOMAIN (1)...(185): L-arabinose isomerase
  misc_feature (1)..(185): Xaa is any amino acid
MLTRSAKVMASGLPGGVSFMEDYTYHFEPGKEAALGAHMLEVCPSIADGKARIEVHPLGIGGKADPARMVFDAAPGPAVLATLIDLGSRFRMIVNEIETIKIDNAMPKLPVARALWKPYPSLGGAAEAWIISGGTHHSVYSAALTAEYFRDWAEMSGIEFVLIDRDTKPARLQDELRRNDAWWSR

SEQ ID NO: 28593 - DNA, 894 bp, Unknown
  Obtained from environmental sample
  misc_feature (1)..(894): n is a, c, g, or t
ttgctttcaggcacggttgtattgaaacctacggcaataacgccgcaggcgatacgaggtctttttgaggaagcgaacgcctcaaacaactgcgccggtatcataacatggatgcatacattctcgccttcaaaaatgtggatacaggggcttgcgatcaaccgcaaaccgcttctgcatctccacacccaatttaatcgggatattccgtggtcttcaatcgacatggattttatgaacttaaaccaatcggcgcacggtgaccgcgagcacggttatatccacacgagaatgaggcttccccgcaaagtagttgccggtttctggcaggacaaggaattgcgccgccgtatggacgtgtggatgagagccgccgccgcgagaaaagacggaatggattctaccgttatgcggcttggagacaatatgcgtgaagtggcggtaaccgaaggcgacaaagttgaagctcaaatcaagtttggctggcaggtgaacacatggggcatcggcgaccttgccgcccgttacgcgaaaatcagcggcgcgcaggcggaaaaactggcggaagaatacgccgctttatacaatcttgcgcctgaacttaaacaagcgggcaaggcgagagacgcaatgcttgaacaggcaaaaattgaaatcgctcttaaaaaaatgcttgaaagcgaacacgcaggggcttttaccactaccttccaagaccttcacggtctgccgcaattacccggtcttgcctgtcagcggcttatggaacaggggtacggcttcggcgcggaagggggactgaaaacagtccatgctgacccgctccgccaaagtcatggcttcggggctgcccggcggcgtttcctttatggaagattacacctaccattttga

SEQ ID NO: 28594 - protein, 297 aa, Unknown
  Obtained from environmental sample
  DOMAIN (1)...(294): L-arabinose isomerase
  misc_feature (1)..(297): Xaa is any amino acid
MLSGTVVLKPTAITPQAIRGLFEEANASNNCAGIITWMHTFSPSKMWIQGLAINRKPLLHLHTQFNRDIPWSSIDMDFMNLNQSAHGDREHGYIHTRMRLPRKVVAGFWQDKELRRRMDVWMRAAAARKDGMDSTVMRLGDNMREVAVTEGDKVEAQIKFGWQVNTWGIGDLAARYAKISGAQAEKLAEEYAALYNLAPELKQAGKARDAMLEQAKIEIALKKMLESEHAGAFTTTFQDLHGLPQLPGLACQRLMEQGYGFGAEGGLKTVHADPLRQSHGFGAARRRFLYGRLHLPF

SEQ ID NO: 28595 - DNA, 1407 bp, Unknown
  Obtained from environmental sample
  misc_feature (1)..(1407): n is a, c, g, or t
gtgttaaacgatgttgtcactctggttattacccgtcttggggaaaaaccggtaatattcaatcttaatatccccgacgaattacccgccaaactgttaggcgatgatctgcgggttaaacaggtattaaccaacctgctcagcaattccatcaaatacacacacaggggaagcattgaattaaaagtaaactgtacgcgagaaggcaatgttgtatggatgtatattacggtcaccgacacaggcataggcataaaagaggacgacgttaaaaaactgttccttgattatttccaggccgacgccaaagctaaccgcaatattgagggtacggggcttggactgcctattaccaaaagacttgtggagatgatggaaggggaaatcaccgcggaaagcgaatacggcaaaggcactgcgttccgcctgcgtatcaagcagggctttgttgaggatacgccccttggagcggagaccgcggaaaaactgcgcagtttccgttacatcgacgacaagcgttccgccgccaaaaggctggtgcggctaaatttaagctatgccaaagtactggtggtagacgatatgcagaccaatctggacgtggcggcggggcttttgcgcatttataacatgcatgtcgattgcttaagcagcggggaagaaactgtaaacaggatatacagcgaaaatcccgtttacgacgctatattcatggatcacatgatgccgggaatggacggcatagagacgacgctgaagctgcgcgagatggggtacaaaggcgtgatagtggcgctgaccgccaacgccataatcggcaacgacgagatgttcatgcaaaacggtttcgacggattcatctccaagcccatcgacgtccgccagcttaacgagatattgagcaggtttatacgagacaagcacccggaagaggcgaaaaggtgcgccgcggagacgccggcgcgggaagagcgccctcaaaacggcgcgggtctgcgccaagagacagatcaacacgtagaagccggttctaaacccgcattgtccgttgagacaagccgccgcggaggcgcgggcaagagtcagcaagcgcgaagtgtttctaaatcgcgtaaacccgtcaatatcgcgaacgattccaaattgctcaaattcttctgccaagacgcggaagacgcggtcgtcaagctgcgggaaacggtaaaaaacggcgacgcgaaactcttcaccatcaccgtccacgccatgaaatcggcgttggcgaatatcggcgaggacgaggcgtccaaagtagccgccgccctggaaaacgtcgggcgaagcggggatatgggatatatctcggagaatatagacgagtttatagatacgctggaatcgctggtcgagagattcagcggcgagtaa

SEQ ID NO: 28596 - protein, 468 aa, Unknown
  Obtained from environmental sample
  DOMAIN (381)...(464): Hpt domain
  misc_feature (1)..(468): Xaa is any amino acid
MLNDVVTLVITRLGEKPVIFNLNIPDELPAKLLGDDLRVKQVLTNLLSNSIKYTHRGSIELKVNCTREGNVVWMYITVTDTGIGIKEDDVKKLFLDYFQADAKANRNIEGTGLGLPITKRLVEMMEGEITAESEYGKGTAFRLRIKQGFVEDTPLGAETAEKLRSFRYIDDKRSAAKRLVRLNLSYAKVLVVDDMQTNLDVAAGLLRIYNMHVDCLSSGEETVNRIYSENPVYDAIFMDHMMPGMDGIETTLKLREMGYKGVIVALTANAIIGNDEMFMQNGFDGFISKPIDVRQLNEILSRFIRDKHPEEAKRCAAETPAREERPQNGAGLRQETDQHVEAGSKPALSVETSRRGGAGKSQQARSVSKSRKPVNIANDSKLLKFFCQDAEDAVVKLRETVKNGDAKLFTITVHAMKSALANIGEDEASKVAAALENVGRSGDMGYISENIDEFIDTLESLVERFSGE

SEQ ID NO: 28597 - DNA, 351 bp, Unknown
  Obtained from environmental sample
  misc_feature (1)..(351): n is a, c, g, or t
atgtcaaaaggagcaaattgctcggaacaaacaaggaaagaaggtttacagcttatagccgcctcggataatggcgatattgaagccgtaaaatcaatactcaagaaagatgtttatatccatgcgcaggacatggaaggcagatgcgcccttgtagccgccgcttacaaaaaccatcttgaaattgtcgatttgcttatcgccgcaggagcggatgtcaacatgaaagataatactctgcaaagcgcatatttaatctcacctccgatggatttacagaactgcttaagaaaactctcaaagccggcgcggatgtccgctgtactgacagttataatggaacaggactga

SEQ ID NO: 28598 - protein, 116 aa, Unknown
  Obtained from environmental sample
  DOMAIN (46)...(78): Ankyrin repeat
  misc_feature (1)..(116): Xaa is any amino acid
MSKGANCSEQTRKEGLQLIAASDNGDIEAVKSILKKDVYIHAQDMEGRCALVAAAYKNHLEIVDLLIAAGADVNMKDNTLQSAYLISPPMDLQNCLRKLSKPARMSAVLTVIMEQD

SEQ ID NO: 28599 - DNA, 366 bp, Unknown
  Obtained from environmental sample
  misc_feature (1)..(366): n is a, c, g, or t
atggaaagcattaaaagaagcgatgtaaatgaggaatgggcgcattccggtattgttgaagccggagatttcgcttttataagttattgtgtcggcaatataggtcaacctattgaaaaccaaataaatggggcaattgaccatttgaaaaaaaggcttgaatcaataggcttaacattggagtcagttgtaaaactggattgtttgtttagggacgtatggaatataccaataatggaaaagatatttaaggaaaggtttaatgggaagtatcccgcaaggaagtcaatacagacagaatttgcccatattggcggacaagaaggacttttgtttncacttgactcaatagcttataaaaagtaa

SEQ ID NO: 28600 - protein, 121 aa, Unknown
  Obtained from environmental sample
  misc_feature (1)..(121): Xaa is any amino acid
MESIKRSDVNEEWAHSGIVEAGDFAFISYCVGNIGQPIENQINGAIDHLKKRLESIGLTLESVVKLDCLFRDVWNIPIMEKIFKERFNGKYPARKSIQTEFAHIGGQEGLLFXLDSIAYKK

SEQ ID NO: 28601 - DNA, 630 bp, Unknown
  Obtained from environmental sample
  misc_feature (1)..(630): n is a, c, g, or t
atgatggccgagagcgaccgcccaattcctcgccgaggtagacaaggaacacgtcaaacaacgcagcggcgacgtggacgacaaccagatcagcgccctcggcaaacaattcggcgtcaacttcgtctgcgtcgcggccatcaccccgacgctaggctcctaccaagtatccgcccgcataataaacgtggaaaccgccgaagtcacccacatcggcgagtccaccagcccgctcaagacgatagacgacctgaccgcggtgtcaagcgaggtagtgagcaacatgttcggcagacagctttctatccaacagaaacgccccaagagcaagtacagcataggcgtgggcgccctctatgtcggcagcttcgacggcggcataacgtggagcgacggccaagtgaccatgccgtactcaggcggcggcgtctacctgttcttctgccacacctacgcctacgcccacataacctacctctccggcggcggacgcttcgagagcgacaacaagtacggcggcaggtacgaactgccggacatgcggcgcgtagacctgaacgtcggagtattcgggaagtatcccatatccctttgggaaaacataagcgtcttccccgcagccggccttga

SEQ ID NO: 28602 - protein, 209 aa, Unknown
  Obtained from environmental sample
  misc_feature (1)..(209): Xaa is any amino acid
MMAESDRPIPRRGRQGTRQTTQRRRGRQPDQRPRQTIRRQLRLRRGHHPDARLLPSIRPHNKRGNRRSHPHRRVHQPAQDDRRPDRGVKRGSEQHVRQTAFYPTETPQEQVQHRRGRPLCRQLRRRHNVERRPSDHAVLRRRRLPVLLPHLRLRPHNLPLRRRTLRERQQVRRQVRTAGHAARRPERRSIREVSHIPLGKHKRLPRSRP

SEQ ID NO: 28603 - DNA, 420 bp, Unknown
  Obtained from environmental sample
  misc_feature (1)..(420): n is a, c, g, or t
atgtcgaaagaaataacgctgcgtaaaataattgtccgcgatcctgaaacaaagaagcggcttgtgtttttaacgaacaaccttaagtggtctgccgagacagtagccggagtatataaggatcggtggcagatagaattatttttcaaagcggtaaaacaaaacctaaggataaagcggttttatggcaattcaaagaatgcggtaatgacgcagatatggatagcattaatagcgtaccttatgttctatttgctgaaagtgaaatcgaaaggtttgtatttgtcgtttaccaattttatttctgtgataaagacaatgctgtttcagcgggtctcccttgatgattttttatccggcacaagtccgccgcctaaacctaaaaagttaaatgaatgtcagccggagtttgtatggtag

SEQ ID NO: 28604 - protein, 139 aa, Unknown
  Obtained from environmental sample
  misc_feature (1)..(139): Xaa is any amino acid
MSKEITLRKIIVRDPETKKRLVFLTNNLKWSAETVAGVYKDRWQIELFFKAVKQNLRIKRFYGNSKNAVMTQIWIALIAYLMFYLLKVKSKGLYLSFTNFISVIKTMLFQRVSLDDFLSGTSPPPKPKKLNECQPEFVW

SEQ ID NO: 28605 - DNA, 429 bp, Unknown
  Obtained from environmental sample
  misc_feature (1)..(429): n is a, c, g, or t
gtgtttttaggcctgctatcccaggcgcaggcgcaattggggagccataggtttagatttaagaacccgctttacagcatcgattcgacgacaatagacctgtgcttaaaattattcccctgggccgatttccggaaaggcaaagcggggataaagctgacggtaaagctggaccaccaggggaagatcccctgttttgtagtcgagtcaaacgcgcgcgaacacgatgcgaagaaggcacgggaagtgccgtatgaagcgggggacgtgctggtttttgaccggggatatgccgattatgggtattttgcttcgatttgcgaaaagaaagcgtattttgtgacccgtttaaagaaaaatgcggtatataggcgggtcaaaaagaacccgttaaggaaggcgggaatgtcatatccgactatgaaataa

SEQ ID NO: 28606 - protein, 142 aa, Unknown
  Obtained from environmental sample
  DOMAIN (24)...(138): Transposase DDE domain
  misc_feature (1)..(142): Xaa is any amino acid
MFLGLLSQAQAQLGSHRFRFKNPLYSIDSTTIDLCLKLFPWADFRKGKAGIKLTVKLDHQGKIPCFVVESNAREHDAKKAREVPYEAGDVLVFDRGYADYGYFASICEKKAYFVTRLKKNAVYRRVKKNPLRKAGMSYPTMK

SEQ ID NO: 28607 - DNA, 651 bp, Unknown
  Obtained from environmental sample
  misc_feature (1)..(651): n is a, c, g, or t
atgnagcatcagtctacaataaacgagaacttgccgtaccgcctgcttgaatacgtaacacagatttataagaaaatagttgataaagaaaagaaatatcaaaagcaactaatgaaaatcccaaaacctgattttatagtcttgtacaatgggacagatgattatcccgattatacggaattaaagctttccgatgcttttatggacactgaagggttaaaatcaaaaggcattaataaaaaactcctggagttaattgtgcctgtatacaatataaaccacggacgcaatcctgaaatattgaaaaaatgcgatagcctgtacggctacagtttttttataaataagattagggaatatcaggcgcagggattaacgcttgaagattcgataaatcctgtgatagaatattgtataaagaataacatactgaaagaatacttggaggctcacgcttcggaggtaataaatatgatttttggtgaatatgaccgtgaaatggatatcgctgtaaatcgcagagaggctcgggaagaaggtcttaaagaaggcaagctaatcatcgcgaaaaatttactctcaaaaggttcaaccccagaatttgtacatgaaatcacctctctctccctggaagaaatcagcaagttgtaa

SEQ ID NO: 28608 - protein, 216 aa, Unknown
  Obtained from environmental sample
  misc_feature (1)..(216): Xaa is any amino acid
MXHQSTINENLPYRLLEYVTQIYKKIVDKEKKYQKQLMKIPKPDFIVLYNGTDDYPDYTELKLSDAFMDTEGLKSKGINKKLLELIVPVYNINHGRNPEILKKCDSLYGYSFFINKIREYQAQGLTLEDSINPVIEYCIKNNILKEYLEAHASEVINMIFGEYDREMDIAVNRREAREEGLKEGKLIIAKNLLSKGSTPEFVHEITSLSLEEISKL

SEQ ID NO: 28609 - DNA, 1248 bp, Unknown
  Obtained from environmental sample
  misc_feature (1)..(1248): n is a, c, g, or t
atgcacaacgaatttacattgtatttcaggaaggttccatcggggaaaaggctgttttattactacgcctacgacggcgaggggaataggctggggccgtgggctacagggcagtctaccaaaacaggggcaaggaattactgcataagccttataaggctggggaaactattgccgggagaaaaggaaatgccgaccttctcggaatttgcgtccagcttttgggattgggaaaaaagcgaatacataaaagagcggataaagcggcgcaagctgacgcaagcctacgcagacaaaaacaaaaaagttgcccagcacacgcttgtcccctatttcggaaatatgaaactggacaaaatttcgggggaggaaattgacaaatggcttgaccacatgattgcggaaaagtacgagaattcaaccaccaacggctatttcggcactttgcagacgatgctgaaatgggcggcaaagaaaaggattatcggcagagaccctttcctcgatgttaaaagactgcttaacgaanagacggacaagaaaataatcacccctgacgaattcaaggcattgtttgtagacgactggaaaacagtatggggcaacgatctgcttagatgtacggcgaataaattggcggctttgactggcatgaggtgctgcgaggtgctggggctgaggggcgaatttgtctatgacgaccatatctatttatgcgggcaatatgacgaatacggctaccgtgaaactaagaccaagataaagcaccatattccccttaccgccgaattggtaaaggatttgagaaagctgatgaaggcaaacgggcagggttatatcttctctcttgacggcggggctacccctgttacccgtatgcacatattcaaaggcttaaaaaaagcgcttaacaatatcggtataaccaacgaggagataggggaacgtgggcttaatatccatgcgtggaggcatttctgcaacacggaactgcaaaaggcgggattgacgatccagaaagtgcaggccgttacagggcataagtcagagaaaatgacggaacggtacacgcattttgacccgcttgatttcggggaagtgcctaaaatacaggcagcattgctgaaaaagaagcataaaaagccggaagccggcattggcgaagcggcggggaatgaacgcccagcccttacccttgttaaaatgccggaaggtggcaaggccggaagtaaaagaaaagcgtcttag

SEQ ID NO: 28610 - protein, 415 aa, Unknown
  Obtained from environmental sample
  DOMAIN (199)...(366): Phage integrase family
  misc_feature (1)..(415): Xaa is any amino acid
MHNEFTLYFRKVPSGKRLFYYYAYDGEGNRLGPWATGQSTKTGARNYCISLIRLGKLLPGEKEMPTFSEFASSFWDWEKSEYIKERIKRRKLTQAYADKNKKVAQHTLVPYFGNMKLDKISGEEIDKWLDHMIAEKYENSTTNGYFGTLQTMLKWAAKKRIIGRDPFLDVKRLLNEXTDKKIITPDEFKALFVDDWKTVWGNDLLRCTANKLAALTGMRCCEVLGLRGEFVYDDHIYLCGQYDEYGYRETKTKIKHHIPLTAELVKDLRKLMKANGQGYIFSLDGGATPVTRMHIFKGLKKALNNIGITNEEIGERGLNIHAWRHFCNTELQKAGLTIQKVQAVTGHKSEKMTERYTHFDPLDFGEVPKIQAALLKKKHKKPEAGIGEAAGNERPALTLVKMPEGGKAGSKRKAS

SEQ ID NO: 28611 - DNA, 921 bp, Unknown
  Obtained from environmental sample
  misc_feature (1)..(921): n is a, c, g, or t
atgcttgagagcggaagctggaagggcaagacattcaggtcgtacaacgtgaaaactccgcctgtccgcctgaaccccggcaggagcaacccctacgccaagtttcttgaaaatgtaaaagacaaacttgcctccctgggctttgaggaatttgacgggcccctggtcgagaccgagttctggaattcggacgccctatttatgcctcaatttcactcggcgcgggatattcatgacgcgtacagtatagccgacccgtcctccaaagacggaatcgcgcacgcgaaggctattgacgagccgtggctttccaacgtcgccgacgcgcatgagaacggcgggaagacgggcagccgcggctggagttacagctttgaccgcgattttacgcggcggttgatccttcgctctcagggaaccgtgctttccgcgaaaagccttcccaccgcgaaagtgcccggtaaatacttcggcatagtccgctgtttccgctacgaccgcgtagacgcaacccaccttccggacttttaccagaccgagggaatcgtgctgggcgagaatgtcaaccttcgcaccctcttgggtatgctggaaatgttcgcccgcgaagttgccggagcgaaagaagtaaaatatgttcccggctatttcccgtttaccgagccttcggtagaagtgcatataaaacatccggtgcttggctggtttgaactgggaggttccggcattttccgtcccgaggtaacgcaaagcctcggggtggatgttcaggtagcggcctggggcatcggcattgaccgcatggcgctgatggctctcggccttaacgatctgcgggatctgttcagcggcaatattgaagacgtacggctgcgccggcttcatgaaactaacaaactcaaggaaaatacaaatgcctaa

SEQ ID NO: 28612 - protein, 306 aa, Unknown
  Obtained from environmental sample
  DOMAIN (14)...(292): tRNA synthetases class II core domain (F)
  misc_feature (1)..(306): Xaa is any amino acid
MLESGSWKGKTFRSYNVKTPPVRLNPGRSNPYAKFLENVKDKLASLGFEEFDGPLVETEFWNSDALFMPQFHSARDIHDAYSIADPSSKDGIAHAKAIDEPWLSNVADAHENGGKTGSRGWSYSFDRDFTRRLILRSQGTVLSAKSLPTAKVPGKYFGIVRCFRYDRVDATHLPDFYQTEGIVLGENVNLRTLLGMLEMFAREVAGAKEVKYVPGYFPFTEPSVEVHIKHPVLGWFELGGSGIFRPEVTQSLGVDVQVAAWGIGIDRMALMALGLNDLRDLFSGNIEDVRLRRLHETNKLKENTNA

SEQ ID NO: 28613 - DNA, 564 bp, Unknown
  Obtained from environmental sample
  misc_feature (1)..(564): n is a, c, g, or t
ttgaagacgtacggctgcgccggcttcatgaaactaacaaactcaaggaaaatacaaatgcctaaaatagaagtaaacgaagaagttttttacacgctcaccggcaagcgctggtccaatcgagatgaatttgaggaggccctgacctgcgccaaggcggaattggacgaggacagcgacaaaagcctgcctgcccatgaacgggttcttaaaatcgaacttaatgacacaaaccgccccgatctgtggggaaccgcaggctgcgcccgccagcttaaggtataccatgacggcaaaatacccgaatatccctttttctcgcggtcgggcggcgtaataaaatgcgcgcataaggtaaaggtggaaaaaagcgttcaaaaagtacggccttttcttacgggttttattgccacgggaaaaacgatttccgatcccgcgttacgcgacatgatacagacccaggaaaaactcgcctggaatttcgggcgcaagcggcgttccatttcaatgggcgtgtaccgtatcgcgaggatcaactggcccatcatttacaaaggcngttga

SEQ ID NO: 28614 - protein, 187 aa, Unknown
  Obtained from environmental sample
  misc_feature (1)..(187): Xaa is any amino acid
MKTYGCAGFMKLTNSRKIQMPKIEVNEEVFYTLTGKRWSNRDEFEEALTCAKAELDEDSDKSLPAHERVLKIELNDTNRPDLWGTAGCARQLKVYHDGKIPEYPFFSRSGGVIKCAHKVKVEKSVQKVRPFLTGFIATGKTISDPALRDMIQTQEKLAWNFGRKRRSISMGVYRIARINWPIIYKGX

SEQ ID NO: 28615 - DNA, 777 bp, Unknown
  Obtained from environmental sample
  misc_feature (1)..(777): n is a, c, g, or t
gtgaatccccttgaagcgcggaacctttgtttctcctatggatcacacgccattttaaaaaacatcagtttttccctggaacggggagaattgttagggctcctggggccgaacggatcggggaagaccactcttttccgttgtatactgggtctggacaacagttacaagggcgaagtatttctggaaggcgaaaacatacggaacaaaaatccgcctgcaatggcccgtcttgtagcttatgtcccccaggcgcatcatccttcgtttaattacacggtaatggacatggttcttatgggcgcgtcatcgggaaaaagggaatgggctttaccgggtccccgtcaaaaagcagatgccgaggaggcgctcgcaaaaatcaacttccttggcttccggaaccggaatttccgtgaactttcaggcggagagcagcagatggtacttatagcccgcgcgcttgcgcagcagactcatgtactggttatggatgaacctacagcaaaccttgattacggcaaccagctccgtcttcttatgaacatatccggtttaagcaggcagggctacagcatactcttttccacccataatccggatcacgcctttctgtttgcccgcagggttctcgcgctccacaacaatgaaattgcggtgatggggcctcccgccgatgttcttagcgctgaattaattcacaccctatatggtgtaaaagtacgcttgcgtaaggatgaacagggaataataagcagcgtccccatattggaaaagtag

SEQ ID NO: 28616 - protein, 258 aa, Unknown
  Obtained from environmental sample
  DOMAIN (29)...(215): ABC transporter
  misc_feature (1)..(258): Xaa is any amino acid
MNPLEARNLCFSYGSHAILKNISFSLERGELLGLLGPNGSGKTTLFRCILGLDNSYKGEVFLEGENIRNKNPPAMARLVAYVPQAHHPSFNYTVMDMVLMGASSGKREWALPGPRQKADAEEALAKINFLGFRNRNFRELSGGEQQMVLIARALAQQTHVLVMDEPTANLDYGNQLRLLMNISGLSRQGYSILFSTHNPDHAFLFARRVLALHNNEIAVMGPPADVLSAELIHTLYGVKVRLRKDEQGIISSVPILEK

SEQ ID NO: 28617 - DNA, 315 bp, Unknown
  Obtained from environmental sample
  misc_feature (1)..(315): n is a, c, g, or t
atgggggtgaatgtccgccgtacccgctggttgattatttgctgttctaccctgattaccgcttcggcggtttcggtcagcggcgttatcggctgggccgggctgattgttccccacatttcaaggcgttttgtagggaacaactaccgggacctgatgcctgtttcgatgcttttcggcgccctcttcctgctggtgatcgataacatttcacgcaatctttttgcaaccgaagtccctttggggatatttaccgctctcataggggcgccctttttcctctggctcattacccggaaaggagatctctggtga

SEQ ID NO: 28618 - protein, 104 aa, Unknown
  Obtained from environmental sample
  SIGNAL (1)...(25)
  DOMAIN (1)...(99): FecCD transport family
  misc_feature (1)..(104): Xaa is any amino acid
MGVNVRRTRWLIICCSTLITASAVSVSGVIGWAGLIVPHISRRFVGNNYRDLMPVSMLFGALFLLVIDNISRNLFATEVPLGIFTALIGAPFFLWLITRKGDLW

SEQ ID NO: 28619 - DNA, 336 bp, Unknown
  Obtained from environmental sample
  misc_feature (1)..(336): n is a, c, g, or t
atgcacatattcgtaggtttaggaaatccggggcagaagtatgcaaacactaggcataatcttggctttatggcaatagaccgcttggcgggcgatagttctaattggaaagagcagtgcaaagcgttgacgcaaaaaatttctatagctggcaaaactgttttgctcgcgaaaccccaaacatttatgaacttaagcggagagagcgttttggctttgctctcgtggcacaaggtttctccggaaaatctactggtattttccgatgatgtaaatttgaagtgcggaattttgcgtgtaaggccaaacgggagcgcgggggctcggccgatctga

SEQ ID NO: 28620 - protein, 111 aa, Unknown
  Obtained from environmental sample
  DOMAIN (3)...(111): Peptidyl-tRNA hydrolase
  misc_feature (1)..(111): Xaa is any amino acid
MHIFVGLGNPGQKYANTRHNLGFMAIDRLAGDSSNWKEQCKALTQKISIAGKTVLLAKPQTFMNLSGESVLALLSWHKVSPENLLVFSDDVNLKCGILRVRPNGSAGARPI

SEQ ID NO: 28621 - DNA, 315 bp, Unknown
  Obtained from environmental sample
  misc_feature (1)..(315): n is a, c, g, or t
atgcccggtatcattcatgtgggatgtttcgcccatgcgagacggaagttttttgaagcggagaaagaaaataagaattccaaatcagcgcaggaagggataaagcatattcacaaactctacgatattgagaatgaattacgggataagattgcggataacaatgacatgttcctgtcagaacgaaaagtctgcgccgggcctgtactggaaaagttcaaggcgtggcttgagaaacgaaaagaagaagtacctccaagcctgctcttagggaaaacaatatactacacagccttatccagtgggacaagatga

SEQ ID NO: 28622 - protein, 104 aa, Unknown
  Obtained from environmental sample
  misc_feature (1)..(104): Xaa is any amino acid
MPGIIHVGCFAHARRKFFEAEKENKNSKSAQEGIKHIHKLYDIENELRDKIADNNDMFLSERKVCAGPVLEKFKAWLEKRKEEVPPSLLLGKTIYYTALSSGTR

SEQ ID NO: 28623 - DNA, 498 bp, Unknown
  Obtained from environmental sample
  misc_feature (1)..(498): n is a, c, g, or t
atgaaattatcaggcattacgcaggagagccttgttgacggtccgggattacggtacgttatttttactcaaggctgccggcatcagtgtccgcattgtcataatcctgaaacctgggacatggacgcgggtaaagaatatcccgtgcggcaggttatccgtcttttaaaacaacaaaagaaaatgaaacagggcgttactttctccggcggcgagccgtttctacaagccgccgagttagctgaagttgcgcttgcggctcgtcaaataggctgggatgtcgtaacctatacaggatttacctacgaacaattaatcgaggacaacaacaacggcgtaaaagcgttgttatccgcaacagatatattgattgacggaaaatatatacatgagcttcgctccatagaattaccgtttcgaggttcatcgaatcagcgtcttattgacttagccaaaacgcgggaaaaagggcagattgtgttatgggaacaagggtaa

SEQ ID NO: 28624 - protein, 165 aa, Unknown
  Obtained from environmental sample
  DOMAIN (20)...(154): Radical SAM superfamily
  misc_feature (1)..(165): Xaa is any amino acid
MKLSGITQESLVDGPGLRYVIFTQGCRHQCPHCHNPETWDMDAGKEYPVRQVIRLLKQQKKMKQGVTFSGGEPFLQAAELAEVALAARQIGWDVVTYTGFTYEQLIEDNNNGVKALLSATDILIDGKYIHELRSIELPFRGSSNQRLIDLAKTREKGQIVLWEQG

SEQ ID NO: 28625 - DNA, 513 bp, Unknown
  Obtained from environmental sample
  misc_feature (1)..(513): n is a, c, g, or t
atgctctccgcggctctcgccgtttacggctttggaacaaaagcgaaagatattcacgactcattagcgtcattctccggcatagaacaccgccttgaattgttccacacagcaaacggtgcgcgctattacaacgacagcgccgccacaatccccgaggccgccgccgcctgcgtcgaagccctaagcgcggaaggccccctcgtccttgtaaccggcggcacggacaaaaaccttgatttctccccgcttgttaatgtttgcggaaaagccgcttccataattttactagcaggcagcggcagcgagaaactttcgcgcctgttaggtgaagccggtatcaattactccgggccttttgataacctcgaaaacgccgtccgctgcgccattgaaaaagccgcgaagggaagcgttgtagcgctctcccccggctgcgccagcttcgggatgttcctcaacgaattcgaccgcgggcgtaaatggaaagaagctgtaattaaaatgacttga

SEQ ID NO: 28626 - protein, 170 aa, Unknown
  Obtained from environmental sample
  DOMAIN (28)...(108): Mur ligase family, glutamate ligase domain
  misc_feature (1)..(170): Xaa is any amino acid
MLSAALAVYGFGTKAKDIHDSLASFSGIEHRLELFHTANGARYYNDSAATIPEAAAACVEALSAEGPLVLVTGGTDKNLDFSPLVNVCGKAASIILLAGSGSEKLSRLLGEAGINYSGPFDNLENAVRCAIEKAAKGSVVALSPGCASFGMFLNEFDRGRKWKEAVIKMT

SEQ ID NO: 28627 - DNA, 600 bp, Unknown
  Obtained from environmental sample
  misc_feature (1)..(600): n is a, c, g, or t
ttgatcagatcggcacgagaatgtgttttggtgtgtacggatgaaattccccggcaacttattggcgaatccaggcctcctattccagccgagccaggtaaatctgaacgatacgatacagaatacgttcgcaatgggacatgcgttatattcatgtttgtagccccgtttgaaaaatggaggagggctgaggtaacagagaggcggacaaaaatcgattgggcgcgtcagataaaaaagctggcaacatttgattttcctgatgctgaaaaaattgttcttgtaatggataatcttgacatacacactatgggttcgctgtataaggcgtttccccctgaagaagcaaaacgaataagaggcaaacttgaagtgcattacacaccgaagcatgggagctgggtcaatatggcggaaatagaaaacaatgtacttataaaccatggcctttcaaaacgggttccaacaattgagcagatgaaaaaagaagtggcggcatgggttgatgctcggaaccaaagtgcatgcacaatcaattggaggtttaccacagatgacgcacgggttaaacttaaacgtctttatccacaattacaatag

SEQ ID NO: 28628 - protein, 199 aa, Unknown
  Obtained from environmental sample
  misc_feature (1)..(199): Xaa is any amino acid
MIRSARECVLVCTDEIPRQLIGESRPPIPAEPGKSERYDTEYVRNGTCVIFMFVAPFEKWRRAEVTERRTKIDWARQIKKLATFDFPDAEKIVLVMDNLDIHTMGSLYKAFPPEEAKRIRGKLEVHYTPKHGSWVNMAEIENNVLINHGLSKRVPTIEQMKKEVAAWVDARNQSACTINWRFTTDDARVKLKRLYPQLQ

SEQ ID NO: 28629 - DNA, 1035 bp, Unknown
  Obtained from environmental sample
  misc_feature (1)..(1035): n is a, c, g, or t
gtggaaaacgcttcgatggaatttgacagccgcactttgtcgccgacttataaaatcgtgatggggattccgggcgaaagccgcgctgtagacatcgctgccagaaacggcttccctccggcattggtgaagcaggccaggagttacctggacgaagagcgctcggacgtttcgacgctgattgcggggctcaaggaaaagcacagggagctggaagcggcggcgaacgctggcaaaaaggaagagatgcggctacttgaagaacgccgcctgacagacctgaaagagctgcgcctgaaacagaaagaataccagcttcgttctgaaggtgtcggaagcctcgggagcctgttaggcgaaagccgcaagaccctggaaaaccttgtccgcgaactcaaggaaggggagcttgataaggacaagacccgcagagtaaaggaattcctttccggcctggaagctaattttaaagccgagtccgccaagctcgaaagtgaaaaccttgcgcttgtctccgaacgccgccgcctggaggaaacggttccagccgaggaggaacagggctataccgcgggaatggaagttctggcaggcgaaggccgccgccgcggaaggatagtccggctggataaaaaaggctcaggcgaagaagcatcttcgtggatcgtcgaaatcggttcccttaaaatgagcttttcggaaaatgaccttgttccagtttccacagaaacccacggcgccgccaggcggaaaagcacctcctgggcggttgatctcgcgcccacgacggcggtacaagcggagctgcgtcttcgcggcatgaggttcagcgacgccatggaagcgctgggcaagcagcttgacgccgccgttctggggggtctgcgccaattcgccgtgattcacggaaagggtgaagggatactcggaaaaggggttcacgactttcttaaaaacgatcccagggtagcggattacttttttgcccggcccgaagcagggggatttggcaggactgaggttatattaaagtga

SEQ ID NO: 28630 - protein, 344 aa, Unknown
  Obtained from environmental sample
  DOMAIN (269)...(344): Smr domain
  misc_feature (1)..(344): Xaa is any amino acid
MENASMEFDSRTLSPTYKIVMGIPGESRAVDIAARNGFPPALVKQARSYLDEERSDVSTLIAGLKEKHRELEAAANAGKKEEMRLLEERRLTDLKELRLKQKEYQLRSEGVGSLGSLLGESRKTLENLVRELKEGELDKDKTRRVKEFLSGLEANFKAESAKLESENLALVSERRRLEETVPAEEEQGYTAGMEVLAGEGRRRGRIVRLDKKGSGEEASSWIVEIGSLKMSFSENDLVPVSTETHGAARRKSTSWAVDLAPTTAVQAELRLRGMRFSDAMEALGKQLDAAVLGGLRQFAVIHGKGEGILGKGVHDFLKNDPRVADYFFARPEAGGFGRTEVILK

SEQ ID NO: 28631 - DNA, 1029 bp, Unknown
  Obtained from environmental sample
  misc_feature (1)..(1029): n is a, c, g, or t
atgcccgtcaaaacgaccgtaaaaaagaccgtcaaaaagaagcgtaccgcgaccgccgccaaagccgtcgcgaagaccaccgccaagaagcccgccgagcgcgagttggtctcgtttgacttcgccgtcaaatacctgttgcgcggcaagcgcgactacgttgtcctcaacggctttctctccgaacttctcggcaaaaaggtcgaggtcaagtctatcgacgaccccgaaaacattaagacctacaaagacgacaaggtgaaccgcgtagacattaaagcgcggattaacggcggtgaactcgccattttcgagatacaatttcttcaagagtttgacttcttcgcgagggtgcttttcggcgtctgtagcgcggtggttgaccaagttgaggcgggtgatttctacaacataaagaaagtctactcgataaacatagcttattttaacctaaacgccaagcgcgaatacttattttccggcgatataaacacgtttaaaggcgtccactacaaagacgaacaaatcctgtttgagcgggctgtatctcctaagtcaaagaaaatggttgacattcatcctgaatattaccttatcttgccgagaatgttcgacgaaaagatgcgtagcaggttcgacgagtgggtatacgtcctgaagaaatccgccgttcgcgacgacttcaaggccgccggaataaaggaggcgaaggcgaagttagactatatccgaatgacgccggagcaaagaaaggtatactttaggtacatggacaaccgcagaggcgcggacagcgcgatccagacggcggagggcaaaggcgaacgcagaggcgagcgcagaggcttacggaaaggcctagagaaaggcctagagaaaggcctacaggaaggtctacagaaaggcctacagaaaggtcaggaattggaacgcgccaaactcataaaaagcctgtacgaaaacggcgtaaccgttgcaaaaatcgtaaaaagtacaaaactctccgaaaccgccgtcaagcggatttag

SEQ ID NO: 28632 - protein, 342 aa, Unknown
  Obtained from environmental sample
  misc_feature (1)..(342): Xaa is any amino acid
MPVKTTVKKTVKKKRTATAAKAVAKTTAKKPAERELVSFDFAVKYLLRGKRDYVVLNGFLSELLGKKVEVKSIDDPENIKTYKDDKVNRVDIKARINGGELAIFEIQFLQEFDFFARVLFGVCSAVVDQVEAGDFYNIKKVYSINIAYFNLNAKREYLFSGDINTFKGVHYKDEQILFERAVSPKSKKMVDIHPEYYLILPRMFDEKMRSRFDEWVYVLKKSAVRDDFKAAGIKEAKAKLDYIRMTPEQRKVYFRYMDNRRGADSAIQTAEGKGERRGERRGLRKGLEKGLEKGLQEGLQKGLQKGQELERAKLIKSLYENGVTVAKIVKSTKLSETAVKRI

SEQ ID NO: 28633 - DNA, 612 bp, Unknown
  Obtained from environmental sample
  misc_feature (1)..(612): n is a, c, g, or t
atgatcagatggccgagagagatctgttttccggcagttaacggctttcaaggcgtccactacaaggacgaagtgatccctttcgctcaatcccgttcccaaaagtcaaaaaaacagttcgagattcatcctgagtattacctgattttaccgagaatgtttgacgaaaaactgcgcggacgtttcgacgaatgggtctacatcctgaaaaactcgaaagcccgcgccgactttaaggccgccggaatcaaagaggccaagaccaagttagactacctgcgcatgacgcccgaaaagaaaaaagagtacgcaagatttttagaacaccgccgaagcgccaaaagcgcgttagaaacggcggtaggccaaggcgaacttagaggcgagcgcaaaggcctacggaaaggcatcgagaaaggtctacagcaaggcctacagaaaggcagacaggaaggcctacagaaaggcagacaggaaggcttacagaaaggtcaggaattggaacgcgccaaactcgtcaaaagtctgtacgaaacgggcttaaccatcgcaaaaattgtaaaaggcacaaaactctccgaaaccgccgtcaagcagattttgggcttgtag

SEQ ID NO: 28634 - protein, 203 aa, Unknown
  Obtained from environmental sample
  misc_feature (1)..(203): Xaa is any amino acid
MIRWPREICFPAVNGFQGVHYKDEVIPFAQSRSQKSKKQFEIHPEYYLILPRMFDEKLRGRFDEWVYILKNSKARADFKAAGIKEAKTKLDYLRMTPEKKKEYARFLEHRRSAKSALETAVGQGELRGERKGLRKGIEKGLQQGLQKGRQEGLQKGRQEGLQKGQELERAKLVKSLYETGLTIAKIVKGTKLSETAVKQILGL

SEQ ID NO: 28635 - DNA, 339 bp, Unknown
  Obtained from environmental sample
  misc_feature (1)..(339): n is a, c, g, or t
atgtccgtaagggaactcagttacatgaccggcaagctaagtggagtggtattgaccgggacaaggtccgaatccgtatccagccttacccgcggaacagtactgtcggcaggtccctacagaggtttcggaaaagttgtaattattcaggtagatgggggttatttatatgtttacggcggcctggaaagtttatcgctaaaggagggcgacagggtaggtccgggttccgagattggaaaactgggtattgacgcgatgtcaaataaaccgcagttgttttttatggtttacttgagcaattctcctgtggatccggctaaagctcccagggcctga

SEQ ID NO: 28636 - protein, 112 aa, Unknown
  Obtained from environmental sample
  DOMAIN (11)...(106): Peptidase family M23
  misc_feature (1)..(112): Xaa is any amino acid
MSVRELSYMTGKLSGVVLTGTRSESVSSLTRGTVLSAGPYRGFGKVVIIQVDGGYLYVYGGLESLSLKEGDRVGPGSEIGKLGIDAMSNKPQLFFMVYLSNSPVDPAKAPRA

SEQ ID NO: 28637 - DNA, 528 bp, Unknown
  Obtained from environmental sample
  misc_feature (1)..(528): n is a, c, g, or t
atggcgggatcagagaggtttcggcaaggttacacacccgatcaaaaagtttttatcccaaaaaatctttggctattcgccacaatgaacacctccgaccaaaacgtcttcaccctcgacaccgcgttccagcgcagatgggagatggagcttatacccaacgaatttgaaaaagtaccagagttctttatcggagacacgggtgttacttggagaacgtttgccgaaaaggtaaatgacatcttggaaaaaggtaacgaaatgatgagcggcgataaacggctcggcgcttggtttattcaatccgacgatgaccctataagcgggaacaaggccgtatccaaagaccgctttgccaacaaggtgctcaaatacctttgggacgacgcttttaagtttaacagaaaagatttcttcaagatggacaaagacaatcctttgacattagagtctgtaatcaaaatatttaaggatgataagcaaagtttcaataagttgttcacaatctcattcgattcggaaaaataa

SEQ ID NO: 28638 - protein, 175 aa, Unknown
  Obtained from environmental sample
  misc_feature (1)..(175): Xaa is any amino acid
MAGSERFRQGYTPDQKVFIPKNLWLFATMNTSDQNVFTLDTAFQRRWEMELIPNEFEKVPEFFIGDTGVTWRTFAEKVNDILEKGNEMMSGDKRLGAWFIQSDDDPISGNKAVSKDRFANKVLKYLWDDAFKFNRKDFFKMDKDNPLTLESVIKIFKDDKQSFNKLFTISFDSEK

SEQ ID NO: 28639 - DNA, 633 bp, Unknown
  Obtained from environmental sample
  misc_feature (1)..(633): n is a, c, g, or t
ttgggtgggagggaaggaggagtctttttcggaacgacgcacttccatacggtctgggagggtctcattgacacaatttacggaataccggaaacggaaaagagggattttttcccggaagcgaagtggtggtttgcttttaacggtaagaccgttcccgtgagtagcatacgaccggacactattatgcgcccggacggcagagatggcgcggtgttcgttttagacgcaaagtattattcgtttataaagagtacgggaaatgttccattcgcttcggatataaataagcaagtggcctacggcgcgtacgcggcggagaaagagaaagagagagggaaagagaacgtatcggtttacaacgcgttcttaataccatacgactttgtgaacgacccgcgcggattaaagacgaacgatctatggtcaaagggcgaaaggtactattctatcggttattcttttttgggtacggacgattcaaaagaaccgtataagcgggtgcttggaatcctaatagatacaaagtggctgatgcaagaagcgggaaggaccgataataaaagagagttgggcaagtttattagcgataccggcataaagtataatgaaaggataataaataatggctga

SEQ ID NO: 28640 - protein, 210 aa, Unknown
  Obtained from environmental sample
  misc_feature (1)..(210): Xaa is any amino acid
MGGREGGVFFGTTHFHTVWEGLIDTIYGIPETEKRDFFPEAKWWFAFNGKTVPVSSIRPDTIMRPDGRDGAVFVLDAKYYSFIKSTGNVPFASDINKQVAYGAYAAEKEKERGKENVSVYNAFLIPYDFVNDPRGLKTNDLWSKGERYYSIGYSFLGTDDSKEPYKRVLGILIDTKWLMQEAGRTDNKRELGKFISDTGIKYNERIINNG

SEQ ID NO: 28641 - DNA, 897 bp, Unknown
  Obtained from environmental sample
  misc_feature (1)..(897): n is a, c, g, or t
gtgtaccccgcctgcaacatagacgacattatgtccgaacgaatcttcgacgtcaccctaaagctctgcgtttcgctcgatatcaaggggattttgaacatccaatatgttttgtatgaaaacgatgtgtatgtcattgaggtgaacccccgcgcttcacgcaccgtaccctacatcagcaaaatcacgggggtacccatgtgcgagatagcgaccaaaatcagtatgggcgagaccctcgcaaaccttgggtacaagtctggttacgcaaatatgccgccctatacggcggttaaggttcctgtcttttcctttgaaaagttggcgggcgtggacactcatttgggaccggaaatgaaatcgacgggggaagtcttgggcatcggcaaaaaccttcaggaagccctttataaagggcttattgccgcaggttacaaaatgcgtaagggcggcggggcgcttttcaccgtccgtgacggcgacaagcgcgaaattgcgggcgtggcggaaaaatttgccttgtgcggtttcacactgtatgcgacgcgcggaaccgcgaggtttctcgccgaaaagggtttaaaggttataatagtggagaaaatccatgtttcccgcgacaataatatagcaacgctgatagacagcaaaaaggtcagctatattgtctccacatccgaaaaggggaggaatcccgcgtcggacggcgtaaagatacgaaggaaagcctgcctgttgggtatcccctgcctgacatcggtagacaccgcgaacgcggttgcggacagcctgctttcagggtacagcgaaattaacacgggacttattgatataaacccgattaaggagcgagcgcatgagactcacattcaccaaaatgcatggaagcggcaatga

SEQ ID NO: 28642 - protein, 298 aa, Unknown
  Obtained from environmental sample
  DOMAIN (164)...(252): MGS-like domain
  misc_feature (1)..(298): Xaa is any amino acid
MYPACNIDDIMSERIFDVTLKLCVSLDIKGILNIQYVLYENDVYVIEVNPRASRTVPYISKITGVPMCEIATKISMGETLANLGYKSGYANMPPYTAVKVPVFSFEKLAGVDTHLGPEMKSTGEVLGIGKNLQEALYKGLIAAGYKMRKGGGALFTVRDGDKREIAGVAEKFALCGFTLYATRGTARFLAEKGLKVIIVEKIHVSRDNNIATLIDSKKVSYIVSTSEKGRNPASDGVKIRRKACLLGIPCLTSVDTANAVADSLLSGYSEINTGLIDINPIKERAHETHIHQNAWKRQ

SEQ ID NO: 28643 - DNA, 843 bp, Unknown
  Obtained from environmental sample
  misc_feature (1)..(843): n is a, c, g, or t
atgagactcacattcaccaaaatgcatggaagcggcaatgattatatctattttcactgcttcgatatggaagaaatcaattcgccggaatcgctgtccgtgtttctgtccgacaggcatttcggcgtgggcggggacggtgttgtgctgatactgcgatccgatatcgccgacgcgaaaatgcggatgttcaaccttgacggcagcgaaggcagcatgagcggaaacgccatccgttgcgtggcaaaatacctgtatgacaacggtattgttacaaaacgcgatatacggatagagacgaaaagcggcgtaaaaaaactgtatctctccacgcggaacggacaggtatcatccgtcaaggttgatatgggccgcgccgaactgcgccccgaacagatccccgtgaatctgggaggggaaagcgtgattaaaagcaaagtggctatagggggcgctgattacgagcttacctgtgtttccatgggcaacccccacgccgtggtattcagcaaccgtctggacgatcttgatttgaatgaaataggccccttgtttgaaaacgatccgctgtttccggacagggttaacgcggaatttgtcaatgttattgccagaaatcatctggaaatccgcgtatgggagcgcggcagcggcgaaacgcaggccagcggaaccagcgcctgcgcctccgccgtggccgccgttctgaacgggcactgcgacaaggacacggacataagggtgcggctgcccggcggtgagctcattgtcaattacaccgacgaggtggtatggctgaccggcgactgcgtaaaagtgttcgacggaacggtggagatttaa

SEQ ID NO: 28644 - protein, 280 aa, Unknown
  Obtained from environmental sample
  DOMAIN (5)...(129): Diaminopimelate epimerase
  misc_feature (1)..(280): Xaa is any amino acid
MRLTFTKMHGSGNDYIYFHCFDMEEINSPESLSVFLSDRHFGVGGDGVVLILRSDIADAKMRMFNLDGSEGSMSGNAIRCVAKYLYDNGIVTKRDIRIETKSGVKKLYLSTRNGQVSSVKVDMGRAELRPEQIPVNLGGESVIKSKVAIGGADYELTCVSMGNPHAVVFSNRLDDLDLNEIGPLFENDPLFPDRVNAEFVNVIARNHLEIRVWERGSGETQASGTSACASAVAAVLNGHCDKDTDIRVRLPGGELIVNYTDEVVWLTGDCVKVFDGTVEI

SEQ ID NO: 28645 - DNA, 414 bp, Unknown
  Obtained from environmental sample
  misc_feature (1)..(414): n is a, c, g, or t
gtggatataaaccgcggacaggaatacgccgcgtatatttttaacgcggtgtttggggacaagagtatgttcaaatttaacgggaatgtacttaatcacggtcttattgacaatcttccgcagggctcatgcgtggaagtgccggtacttgcctcttctcatggactcgaggcaatcaaaataggtaaactcccgaatcagatcgcggcccttgtgcatacaagcgctatttgtgaggaaatggctgtggaaggttcgctgacaggagacccccgcaaggtatatcaggcgatagcctttgatccgcttacttcagcggtgcttggcattcaggaaataaaagaaatgaccgcgaaaatgttcgctcagaacaaaagccatcttccgcagttttcaaattttgacttgaagtaa

SEQ ID NO: 28646 - protein, 137 aa, Unknown
  Obtained from environmental sample
  misc_feature (1)..(137): Xaa is any amino acid
MDINRGQEYAAYIFNAVFGDKSMFKFNGNVLNHGLIDNLPQGSCVEVPVLASSHGLEAIKIGKLPNQIAALVHTSAICEEMAVEGSLTGDPRKVYQAIAFDPLTSAVLGIQEIKEMTAKMFAQNKSHLPQFSNFDLK

SEQ ID NO: 28647 - DNA, 633 bp, Unknown
  Obtained from environmental sample
  misc_feature (1)..(633): n is a, c, g, or t
ttgaatttattcgattcaccgcttacagggaagaagctgttcctgctggcttgcaatgacatgcgcgatatgtcggagtttttgctgaaccggccggggagaatccattaccattttaagtaccgcggccttactgtcgaagaaatatcagggtactgcgcggacaatctcgttaaagaaaagcgcggccttatccccgaaatatgcgcgtccggagcgcgtatctctaacttctcctacgatatgctcaggtcgattgtattcgagctaaacaattatgattccagtcttgccgaagcgcagaacgccttaaatttaagcgcaagggagaaatcagcgtttaattacctaatttacctcaaatccggcgagaccgtaaaagatgacggttatttagatttttcgatgccgtatctttatcttggatggagtaagaaccccggcggcaaacagtattcttcaattgtgaatacgacgggggcgcaatggacagggaacgacgacggttcgctggctgtggacggggaattcatattaaagccggaagataaagacgaagacggcggcgaaattgaaaagattgtttttaccccgattaaagaagatttcagggccagaagatacggttattga

SEQ ID NO: 28648 - protein, 210 aa, Unknown
  Obtained from environmental sample
  misc_feature (1)..(210): Xaa is any amino acid
MNLFDSPLTGKKLFLLACNDMRDMSEFLLNRPGRIHYHFKYRGLTVEEISGYCADNLVKEKRGLIPEICASGARISNFSYDMLRSIVFELNNYDSSLAEAQNALNLSAREKSAFNYLIYLKSGETVKDDGYLDFSMPYLYLGWSKNPGGKQYSSIVNTTGAQWTGNDDGSLAVDGEFILKPEDKDEDGGEIEKIVFTPIKEDFRARRYGY

SEQ ID NO: 28649 - DNA, 918 bp, Unknown
  Obtained from environmental sample
  misc_feature (1)..(918): n is a, c, g, or t
gtgataaaaataaatatgaagtattcatacctttttcgttttataatttttgggctttcaaccattatttttaagcgtaaaaaaccgattttaggcacaataattgtaaccgataaatgtaatttaacctgtaaacattgcgcggttaacaatattaatggaatagtgtatccctaccggcaaattaaacaggaaatgaatattctctatcaacagggcgtccgtattttgtttttttgcggaggagaaacatttttatggaatgaccggggcaaaaccatacgggacctggttgtcgaggcaaaacaaatcggcttttttatcgttaacgtagtaacaaacggcacatttacgcttgatcttcctgaagctgatttaattctgctcagtcttgacggtaatcgcgataatcacaatttaattcgaggggagacttttgatattattttgaataacatcaggacggcggcatcgtccaatatatgcctttatatggctattaacacaataaaccggcccgacattcaggcggtttgtgagatcgccaaacaggaaaataatatccgcgccgtttcatttaatttccacacgccttattcgggaacagaacacctgtcactgacaaaagaacaaaaggaagagtgcctggagaaaattgcggaactgataaaacaaaaatatcccatttttaatttaccttccgctttctcagcaatcgcagctaacacatttgaaacgccgtgctttcaatgtgtggttatggaaaacggcaaacagacaatctgcggcaggtgcgtcgaggttgacaacctgtgcgggaaatgcggttatttttttgcggctgaatattctttgctttttcatggaaatatcaaagtgggttttgatatgatttcgacatacttaaaatatttataa

SEQ ID NO: 28650 - protein, 305 aa, Unknown
  Obtained from environmental sample
  DOMAIN (34)...(182): Radical SAM superfamily
  misc_feature (1)..(305): Xaa is any amino acid
MIKINMKYSYLFRFIIFGLSTIIFKRKKPILGTIIVTDKCNLTCKHCAVNNINGIVYPYRQIKQEMNILYQQGVRILFFCGGETFLWNDRGKTIRDLVVEAKQIGFFIVNVVTNGTFTLDLPEADLILLSLDGNRDNHNLIRGETFDIILNNIRTAASSNICLYMAINTINRPDIQAVCEIAKQENNIRAVSFNFHTPYSGTEHLSLTKEQKEECLEKIAELIKQKYPIFNLPSAFSAIAANTFETPCFQCVVMENGKQTICGRCVEVDNLCGKCGYFFAAEYSLLFHGNIKVGFDMISTYLKYL

SEQ ID NO: 28651 - DNA, 507 bp, Unknown
  Obtained from environmental sample
  misc_feature (1)..(507): n is a, c, g, or t
atggtagccaatatcggttcggtaaccaatacgctggtcaataacgcgggtaatgtaaagaccctgagggaagcgtccgaagttggccgaagcggactgcaagacgttgcaacggacattcaggagattgcccgcgaatcggaaggcttgctggaaataaacgcggtcatggaaaacatagccagccagaccaacctgctttcgatgaacgcggcaatagaagcggctcatgccggagaagcgggcaaaggctttgccgtagtagcggacgagatccgcaagctggcggaaagttccggcgagcagtccaaaacgattggtacggtactgaaaaaaataacggaatcaatcaaaaaattacaagttccaccgcgaacgtgcttgctcgattcgaggcgattgactcaggattcaagaccgtttcggatcaggaagataacatccgcaactcgatggaggagcaagggcaggggagcaaacaggtacttcaaagcgtgggcgatttga

SEQ ID NO: 28652 - protein, 168 aa, Unknown
  Obtained from environmental sample
  DOMAIN (2)...(166): Methyl-accepting chemotaxis protein (MCP) signaling domain
  misc_feature (1)..(168): Xaa is any amino acid
MVANIGSVTNTLVNNAGNVKTLREASEVGRSGLQDVATDIQEIARESEGLLEINAVMENIASQTNLLSMNAAIEAAHAGEAGKGFAVVADEIRKLAESSGEQSKTIGTVLKKITESIKKLQVPPRTCLLDSRRLTQDSRPFRIRKITSATRWRSKGRGANRYFKAWAI

SEQ ID NO: 28653 - DNA, 372 bp, Unknown
  Obtained from environmental sample
  misc_feature (1)..(372): n is a, c, g, or t
gtgcttgctcgattcgaggcgattgactcaggattcaagaccgtttcggatcaggaagataacatccgcaactcgatggaggagcaagggcaggggagcaaacaggtacttcaaagcgtgggcgatttgagcgagataagccaacaagtaaaaagcgggtccaatgaaatgctgataggtgcaaaggaagtgattcaggagagcaacaatttagaggaggcaacccaggaaataaccggcggcatgaacgagatggcaagcggggcggatcaggtgaacgtcgcagtacaccatgtcaatgagataagcggcaagaaccgtgaagccattgacgctttgttgaaagaggtttcgcgcttcaaggtagagtaa

SEQ ID NO: 28654 - protein, 123 aa, Unknown
  Obtained from environmental sample
  misc_feature (1)..(123): Xaa is any amino acid
MLARFEAIDSGFKTVSDQEDNIRNSMEEQGQGSKQVLQSVGDLSEISQQVKSGSNEMLIGAKEVIQESNNLEEATQEITGGMNEMASGADQVNVAVHHVNEISGKNREAIDALLKEVSRFKVE

SEQ ID NO: 28655 - DNA, 372 bp, Unknown
  Obtained from environmental sample
  misc_feature (1)..(372): n is a, c, g, or t
atgtatgatgagaatagtttttattctattgaccgccttgttgaatttggaatgggtatagcggttgcccaacaaatggttaaatcaatgaaccatactatgcaaaatatgcatatccccggtgcgtcaaatccgatgtgttgtaattctttgtccgtatcgccggaacgtgtatattacgctgttttggaaaacaaacaggccgggccattttccgaaactgaacttgtgcgtcttatcaacgataaaaaggtatcaaaggaaacctatgtttggcatgttggactgagtgaatggaaaactgttgaaaatgtaccggaaatattacgtctagtcgccctcgcgccgccgcttattggagaaactatatga

SEQ ID NO: 28656 - protein, 123 aa, Unknown
  Obtained from environmental sample
  misc_feature (1)..(123): Xaa is any amino acid
MYDENSFYSIDRLVEFGMGIAVAQQMVKSMNHTMQNMHIPGASNPMCCNSLSVSPERVYYAVLENKQAGPFSETELVRLINDKKVSKETYVWHVGLSEWKTVENVPEILRLVALAPPLIGETI

SEQ ID NO: 28657 - DNA, 516 bp, Unknown
  Obtained from environmental sample
  misc_feature (1)..(516): n is a, c, g, or t
atggaagcgactttagcaattcagcgggaagaaatgcaacacgcccaacgtatgcaaaccgatgccgctaattttgccgtccaccagttaaaccagcagacagatgttgccaaagccggagccgaagcattgggacaaatgggtgcgggtggagctataaatatgggtgctggcggtggcatgaaccctgccgccatgatgactggtatggcaatgggcggggctatgggtcagcaaatggcgaacatgatgggcaacatgacacagggaataaatcaaccgcctgccggagtaatgccgcccccgccgccaatcgtgcaatataatatagcggtaaatggtcaaagcacagggccttatacatttgaccagttaaaacaaatggcggcacagggacaatttacaccgcaatcattaatatggaaacagggaatgtccggctggtctaccgccggaactgtggctgaacttttaccgatatttgcacaaacaacgcccccgcctgtcccgcaataa

SEQ ID NO: 28658 - protein, 171 aa, Unknown
  Obtained from environmental sample
  misc_feature (1)..(171): Xaa is any amino acid
MEATLAIQREEMQHAQRMQTDAANFAVHQLNQQTDVAKAGAEALGQMGAGGAINMGAGGGMNPAAMMTGMAMGGAMGQQMANMMGNMTQGINQPPAGVMPPPPPIVQYNIAVNGQSTGPYTFDQLKQMAAQGQFTPQSLIWKQGMSGWSTAGTVAELLPIFAQTTPPPVPQ

SEQ ID NO: 28659 - DNA, 822 bp, Unknown
  Obtained from environmental sample
  misc_feature (1)..(822): n is a, c, g, or t
atgattaacgtaaaaggacaggaaatattccttaatggcaagaaaatctttttaagcggcgtatgcgttcacgaagatcattttgcgacaggaaaaacaaccagcgaagaaataatacgcgcgacaatccgggacttaaaggatatgaacggtatatatttcaggcttgcccattatccgcatgacgcgcgttttgcgcgcattgccgatgaggaaggggtgctgttatgggaagaaatcccggtttactgggcaatagcttttgacaatccggaaacttacaacgacgctgaaaaccagcttgccgagctaattcttcgggatcgcaaccgtgcgagcgttatcatctggtcaataggaaacgaaaacgcagatactgatccgcgccttgaatttatgtcccgccttgcgaaaaaggcaaaaatgcttgatagctcaagattggtatcggccgcctgccttatcaagcatgaaaagttaaaaatagaagaccggcttgccgattatcttgatattatcggcatcaatgaatattatggctggtacgatcccgattttgaaaaactgccaaaaatactaacaaactcaaatcccggcaagcctgtgcttatttgtgagttcggcggtgatgcgcggctgggacagaggggaacaacggacgagctatggacggaggataagcaaaaaagaatttatgagcaacaggtggaaacttttaaaaaatgcccgtatatcgcgggaataactccctggatactttacgacttccgctgcccgcgccgtcttaacaggtatcaggaaggcttaacaggaaagggttga

SEQ ID NO: 28660 - protein, 273 aa, Unknown
  Obtained from environmental sample
  DOMAIN (2)...(271): Glycosyl hydrolases family 2, TIM barrel domain
  misc_feature (1)..(273): Xaa is any amino acid
MINVKGQEIFLNGKKIFLSGVCVHEDHFATGKTTSEEIIRATIRDLKDMNGIYFRLAHYPHDARFARIADEEGVLLWEEIPVYWAIAFDNPETYNDAENQLAELILRDRNRASVIIWSIGNENADTDPRLEFMSRLAKKAKMLDSSRLVSAACLIKHEKLKIEDRLADYLDIIGINEYYGWYDPDFEKLPKILTNSNPGKPVLICEFGGDARLGQRGTTDELWTEDKQKRIYEQQVETFKKCPYIAGITPWILYDFRCPRRLNRYQEGLTGKG

SEQ ID NO: 28661 - DNA, 615 bp, Unknown
  Obtained from environmental sample
  misc_feature (1)..(615): n is a, c, g, or t
ttgtgcttttcattctttttgagaaaacggctggagagcatactgccaagcgttaaagccacaaaggacgaaattataacggagccgcctatcacaatggaaaattctctgaaaagccgcccagtgaatccctgcataaaaaacagcggcaaaaacaccgcacataaaacaagggttgtagctatgaccgctgagaaaatttcattaacgcctttaaccgccgcctccttgggcgaaagcccttcctccacctttgcgaatatattttccaaaacaacaatggcatcgtccacaacaaggcttatagccagaacaactcccaaaagcgttagaatgttgatggaaaaattcaaaacccaaattaagaaaaatacgcctatcaaggaaatgggaacggtaaacaccggaatcaatgttgttttaacatctctcaaaaacataaaaataatagccacaactagcaaaaaagctatgacgatggtttccctaacctccgagagtgcggctcgcacaaatttggtattgtcaaaagagagctggataactatggactccggcaggtctttgcgaatgttctccaacctgctcaaaacctcgtccgcatctcggccataa

SEQ ID NO: 28662 - protein, 204 aa, Unknown
  Obtained from environmental sample
  misc_feature (1)..(204): Xaa is any amino acid
MCFSFFLRKRLESILPSVKATKDEIITEPPITMENSLKSRPVNPCIKNSGKNTAHKTRVVAMTAEKISLTPLTAASLGESPSSTFANIFSKTTMASSTTRLIARTTPKSVRMLMEKFKTQIKKNTPIKEMGTVNTGINVVLTSLKNIKIIATTSKKAMTMVSLTSESAARTNLVLSKESWITMDSGRSLRMFSNLLKTSSASRP

SEQ ID NO: 28663 - DNA, 921 bp, Unknown
  Obtained from environmental sample
  misc_feature (1)..(921): n is a, c, g, or t
gtgcaggagatcgtgtctgcggtgattgccgaaaacaacctggaagtcctctacacggtggtagacgaagacggggcttcggtgtactcggctagcgacatcgctagggaagagttccccgagcttgacctgacgattcgcggggcaatttccatcggccgccggctgcaggatccacttgcggaactggtgaaaatcgatcccaagtccattggagtcggcctttaccagcatgatgtaaaccaaaagaagctttctgaaaccctggacgaggtggtttcctccgtggtgaacaacgttggggtgaacctcaacaccgcaagtacttcgcttttaaggtacgtttctggaattaacagttccctggcaaaaaaaatcgtacagtaccgcgaaggaaagggaaaaatcggaagcagggaggaacttctttccgtcccgggcatgggtccaaaaagttatgagcaagcggcgggcttcctgaaaattccggaaagcggcgaggccctggacaacacctgggtgcaccccgaaaattacaggctggccagggacatacagacaattacggttaccggtagccttaacgccgaagcagcggacagaattaagaagcagtaccagatcggggacacaaccatcaatgatattattgaagagctaaaaaagcccaaccgcgaccccagggacggttacccaaaacccataatgcaaaaggaagccatcaccttcgaagacctgaaagaagggatggctgttacgggcaagataaaaaacgtggtcgatttcggcgccttcgttgaccttggaataaaagaaagcgctctggttcacatatcagagttaagcgatcaatatgtaaaaaatcccatggacttaatcaaagtgggagatgtcctggagtttcgcatcatcggcccttga

SEQ ID NO: 28664 - protein, 306 aa, Unknown
  Obtained from environmental sample
  DOMAIN (245)...(305): S1 RNA binding domain
  misc_feature (1)..(306): Xaa is any amino acid
MQEIVSAVIAENNLEVLYTVVDEDGASVYSASDIAREEFPELDLTIRGAISIGRRLQDPLAELVKIDPKSIGVGLYQHDVNQKKLSETLDEVVSSVVNNVGVNLNTASTSLLRYVSGINSSLAKKIVQYREGKGKIGSREELLSVPGMGPKSYEQAAGFLKIPESGEALDNTWVHPENYRLARDIQTITVTGSLNAEAADRIKKQYQIGDTTINDIIEELKKPNRDPRDGYPKPIMQKEAITFEDLKEGMAVTGKIKNVVDFGAFVDLGIKESALVHISELSDQYVKNPMDLIKVGDVLEFRIIGP

SEQ ID NO: 28665 - DNA, 990 bp, Unknown
  Obtained from environmental sample
  misc_feature (1)..(990): n is a, c, g, or t
ttgagtcgaaaactggcggggacgcttaacattcttaaaatagccgagcggctctgtattcatggcgacgcggcggttattcccaccgagtttgacggcttgctcaaacagattaaaaacgccaacccggacaggcgcaatgtaatcgacttcgcggggcagaccatacaaaacaagggcgagggtttctttgctgaaatgacccgtatgatttacgagcagggcgggaacgcaaataagatattcttccccactattttctcggaagatatacaggaattgtgcagggatcgcatcaggtttggaacgggcgataaaaacatgacggcggtgtttgataactaccccaccccgcttggcactttgacattcggcgctgacgccgggccggacaaattgttccgccccaaagggattatcgtttcaaaaggcgatgccaacagcaaacccaacgcgccgcagtcggttacggttgcggccgctgcggggagcggatctagattcgccgcgaaagacgctggcaattatacctatcaggtatttgcaattaacaaaacgggcatttccgcagggacaagcgccaatgccgttgtgcctgtcgcgtcaggcgatgttgttgatattgagataaccccagacgcttccaagcccggaaccgggtttattgtttgccgttctgcccctaacgggtcggtcgtaatggagatggcacgcatacccagggacagaaacaacgcgaccacggtgtacaccgacaaaaacgaggatctgccgggaaccagcgagataatctttatcaccgagaagaaattacaacaggtcgccgagtttgcccaactgctgccgttgcgcctgtaccgcatgaaccccgtcaacaggctggtaacgccgtttattcttgcgctttggggttacatcgatctcaaagtccccgaacagtgcggcttggcaaagaacatccagtacaaggggggcctctataatggctaa

SEQ ID NO: 28666 - protein, 329 aa, Unknown
  Obtained from environmental sample
  misc_feature (1)..(329): Xaa is any amino acid
MSRKLAGTLNILKIAERLCIHGDAAVIPTEFDGLLKQIKNANPDRRNVIDFAGQTIQNKGEGFFAEMTRMIYEQGGNANKIFFPTIFSEDIQELCRDRIRFGTGDKNMTAVFDNYPTPLGTLTFGADAGPDKLFRPKGIIVSKGDANSKPNAPQSVTVAAAAGSGSRFAAKDAGNYTYQVFAINKTGISAGTSANAVVPVASGDVVDIEITPDASKPGTGFIVCRSAPNGSVVMEMARIPRDRNNATTVYTDKNEDLPGTSEIIFITEKKLQQVAEFAQLLPLRLYRMNPVNRLVTPFILALWGYIDLKVPEQCGLAKNIQYKGGLYNG

SEQ ID NO: 28667 - DNA, 684 bp, Unknown
  Obtained from environmental sample
  misc_feature (1)..(684): n is a, c, g, or t
atgagcaaatccaaaccaaagtgggatgaaattttttccgctcttgaaaaatggcgcgaggaaattattaccgaaaaaggagcggaagacccttccgtaaccactgtagcgcagcagtatcgccgcaatccatgggctgtgctggtttctacaattttaagtttgcgtacaaaagatgaagttacaattgttgcgtcaaagcggcttttggaaaaagcaggcagtcccgaagaattaaaattattaaagcaggaaaaaatagaaaaattaatttatcctgtcggtttttaccggaacaaagcggcttcgttaaaaaaaatcgcttctattctgcttgaacaatacaacggcaaagtgcccgcttcaatggatgcgctgcttgcgcttccgggcgtcggcaggaaaacggcgaaccttgtgcttaccgaagcctttgatcttgacggtttatgtgttgatatacatgttcaccgcatttccaaccgctgcggttggttaagttcaaagaatcctgaagatacggaaatgatattaagagaaatactgccgcgtaattattggaaacgcattaattatttacttgttctttacggacagaaactatgccgtcccataagtccgttttgctctcaatgcgtaataaagaagcattgttcacataacggcatagttaagtccagatag

SEQ ID NO: 28668 - protein, 227 aa, Unknown
  Obtained from environmental sample
  DOMAIN (114)...(143): Helix-hairpin-helix motif
  misc_feature (1)..(227): Xaa is any amino acid
MSKSKPKWDEIFSALEKWREEIITEKGAEDPSVTTVAQQYRRNPWAVLVSTILSLRTKDEVTIVASKRLLEKAGSPEELKLLKQEKIEKLIYPVGFYRNKAASLKKIASILLEQYNGKVPASMDALLALPGVGRKTANLVLTEAFDLDGLCVDIHVHRISNRCGWLSSKNPEDTEMILREILPRNYWKRINYLLVLYGQKLCRPISPFCSQCVIKKHCSHNGIVKSR

SEQ ID NO: 28669 - DNA, 978 bp, Unknown
  Obtained from environmental sample
  misc_feature (1)..(978): n is a, c, g, or t
gtgggcgacattctatcacaatcagaaattgatgcaatgctatcggggctttcggcaagccctgctgccgcccctgctgctgccccagctccagcctatagaccttttgctccaatgtcagtttcacctactgcaaacaaaaaagtaaatctctatgatttcacacgcccagaccgcatttcaaaagaccaaataagcactctgagaaatttgcacgaaggttatgctagattgctcacaaccacacttacaagcttgctcagaacagttgtggatatcagcctgcaaaatgtggaacagctcacgtatggcgaagtgattaaaagcatatccacgccaagctgtatttacgtgtttcaaatggaaccgctggaatcaagcgcgatttttgatgttagcccttcactcatattcattatgctagaccgcttatttggcgggcaagggcgttcaatagattcaaccaaccgagaaatgacagatattgagaaaaccgttatttacaagataatagagcgttctcttgctgatttgaaggttgtttgggaaaacatcggaattttttcgcccaaaatcgaaaactacgagataaatccgcaattcgtgcaaatcgcgcctccaggcgataccgtcgttttggtaacacttgaagttcgtactcgcacgggttcgggcttaatgagcctttgctttccgtttgttcttttagaatccattatagacaagttaagcggtgaatcttggatatctgcacaaaaaacaactactcaagaaacccgcagaatggttgagcgcgagctttccaccaccaatgctatgctcagagcagaaattggagccacgcagctttccgtcaaagattttttgcagctcagcgttggcgatgttatggttctagacaaacttgcgcaatccgatttaactatgtatatagaagaccgtccaaaattctgggaaaacccggctcggccgatctga

SEQ ID NO: 28670 - protein, 325 aa, Unknown
  Obtained from environmental sample
  SIGNAL (1)...(26)
  DOMAIN (52)...(243): Flagellar motor switch protein FliM
  misc_feature (1)..(325): Xaa is any amino acid
MGDILSQSEIDAMLSGLSASPAAAPAAAPAPAYRPFAPMSVSPTANKKVNLYDFTRPDRISKDQISTLRNLHEGYARLLTTTLTSLLRTVVDISLQNVEQLTYGEVIKSISTPSCIYVFQMEPLESSAIFDVSPSLIFIMLDRLFGGQGRSIDSTNREMTDIEKTVIYKIIERSLADLKVVWENIGIFSPKIENYEINPQFVQIAPPGDTVVLVTLEVRTRTGSGLMSLCFPFVLLESIIDKLSGESWISAQKTTTQETRRMVERELSTTNAMLRAEIGATQLSVKDFLQLSVGDVMVLDKLAQSDLTMYIEDRPKFWENPARPI

SEQ ID NO: 28671 - DNA, 738 bp, Unknown
  Obtained from environmental sample
  misc_feature (1)..(738): n is a, c, g, or t
gtgttcggcctaatccccgcaagccttatcgggattgcctctcccctttgcatgtacggaacaataccgattgccgcctcattttcgcaaaaaggaatgcgcgatgactggcttgcggcgtttatgatgagttctatacttctgaacccgcagcttcttttttacagcgccgccctgggcagcgctgcgctcataattcgtttcgcgtcctgttttttctgcggcatcgcctcggggcttttgttgcatatcttttacagggataaaaactttttcaatttcaaaggctttggcgaaacggaaagccgcgatactgattcaaatcttgcactgcgcttgcttaaaaacctctggcggaattttaaaacaacaggccctgctttcttaatcgggttatgccttgccgccatgtttcaacgttacataccggaagatactgtcgcggcccttttcggaaaaaaccggggctttggcctcttaatggccgcgagtgtcggggtacctttgtacgtgtgcggaggcgggacaatccctttactgcaggtatggctgcttaacggaatgacaatgggcgcggcttccgctttcatgattaccgggcaggccatgaaaattacaaaccttggggcggtaaaaattattctgggtctgaaacattttctgctttatattatatttgtcatattatttgccctgttaagcggatttatggtggattatatattcaggattggataa

SEQ ID NO: 28672 - protein, 245 aa, Unknown
  Obtained from environmental sample
  SIGNAL (1)...(25)
  DOMAIN (1)...(236): Predicted permease
  misc_feature (1)..(245): Xaa is any amino acid
MFGLIPASLIGIASPLCMYGTIPIAASFSQKGMRDDWLAAFMMSSILLNPQLLFYSAALGSAALIIRFASCFFCGIASGLLLHIFYRDKNFFNFKGFGETESRDTDSNLALRLLKNLWRNFKTTGPAFLIGLCLAAMFQRYIPEDTVAALFGKNRGFGLLMAASVGVPLYVCGGGTIPLLQVWLLNGMTMGAASAFMITGQAMKITNLGAVKIILGLKHFLLYIIFVILFALLSGFMVDYIFRIG

SEQ ID NO: 28673 - DNA, 753 bp, Unknown
  Obtained from environmental sample
  misc_feature (1)..(753): n is a, c, g, or t
atgcacggcgtatttgtaaacgaaaccggaaaaaaaacaactatcaatatcggcgaggagcccggcgatcccgtatttacgattacagaccttctgccccatcttgcaagagagcagatggataaaaaagcatcggttgtggtagaaggcgaggaccttgatattctcgcgggttcgcgtccctacgacgataaagacgaaaaagaaaaaataaaactgtacttgcttgaattgctaaacaaaaaatacggtattacagaaaaagattttgcgagcgctgaaattgaatttgtccccgcttttaaggcaagcgatgtcggtcttgacagaagcttaatcggctcctacggccatgacgaccgctgctgcgcgtggcccgccctgcaggctatcaccgatcttgcgcgcgagaaatcagcgcccaataaaacattgatttgttatctgtcagataaggaagaaatcggctctgtcggaaacacaggcgcacgttccgttaactttgaaaatttcatcgctctcctttgcggcggctctcaggcggatttacgtctgtgtttttcgcgttccgccatgttatccgccgatgtaaactcggcgtttgatccaacctactcaggcgtatttgacaaaaagaactgctcgcttatcggaaagggaattgtgcttacaaagtacacaggctccggcggcaagagcggagcaagcgacgccaacgcggaattctgcgcaaaggtacctcggccgatctga

SEQ ID NO: 28674 - protein, 250 aa, Unknown
  Obtained from environmental sample
  DOMAIN (1)...(250): Aminopeptidase I zinc metalloprotease (M18)
  misc_feature (1)..(250): Xaa is any amino acid
MHGVFVNETGKKTTINIGEEPGDPVFTITDLLPHLAREQMDKKASVVVEGEDLDILAGSRPYDDKDEKEKIKLYLLELLNKKYGITEKDFASAEIEFVPAFKASDVGLDRSLIGSYGHDDRCCAWPALQAITDLAREKSAPNKTLICYLSDKEEIGSVGNTGARSVNFENFIALLCGGSQADLRLCFSRSAMLSADVNSAFDPTYSGVFDKKNCSLIGKGIVLTKYTGSGGKSGASDANAEFCAKVPRPI

SEQ ID NO: 28675 - DNA, 369 bp, Unknown
  Obtained from environmental sample
  misc_feature (1)..(369): n is a, c, g, or t
atgataatggctgaatcctatttttttgttggtgttgccggcgttgggatgagtgcgcttgcccagtttttggctggaaaaggagtagaggcatcaggttctgacaggcgttttgagcatagcgaaggcgaaatggtgaaaagccaactgcagcaagctggcattaaatgctttttgcaagatggcagcggaataaatgaaaatttgagtgcggttgttgttagcaccgcaatagaaagcggaaacccagatacggaagcagcaaaaaaactaaatattccaataattcaccgtagcgagcttttggcaaaaatcacaagcgaaaacccaaccatagcggttagcggcacaagcggaaaagcacggtga

SEQ ID NO: 28676 - protein, 122 aa, Unknown
  Obtained from environmental sample
  SIGNAL (1)...(21)
  DOMAIN (6)...(110): Mur ligase family, catalytic domain
  misc_feature (1)..(122): Xaa is any amino acid
MIMAESYFFVGVAGVGMSALAQFLAGKGVEASGSDRRFEHSEGEMVKSQLQQAGIKCFLQDGSGINENLSAVVVSTAIESGNPDTEAAKKLNIPIIHRSELLAKITSENPTIAVSGTSGKAR

SEQ ID NO: 28677 - DNA, 897 bp, Unknown
  Obtained from environmental sample
  misc_feature (1)..(897): n is a, c, g, or t
ttgatcaccgtcgcggcgcctttcatgccttttaccacggacgcgatttggcagaacctccgcaaagactctgatcccgaatcggtgcatctggcggatttccctctgcctgtggaaagccggcgggaccgttccctggaatttcgcatggcatctgttcaaaaggcagtctccatggggcgcgccctgcgctcgcagtacaatatcaaggtccgccagccccttcgcatggcggagctcgttacgcgcaatccagatgagaagagcgcccttcttgaaatggtggaaattatccgcgaggagcttaacgtaaaaaacgtttctttcagggacaacgaggaagaccttgtcgaatacagcgtaaaagccaatttccgcgtgctgggcaaagaactggggaaggacatggccgccgccgccgcgaggatagaggcgctgagccagaatgaaatccgcggcctgcttgagggcgcgtccctttcgctggacctcgcgctcgcggacggaaggacgcgcgccgtggaaatcaccgcggacaagctggacatcaggcgcaatgagaaagctaacctccgcatacttaacgaaggcaccctcaccgtcggtcttgacacggaattaacccccgagctgagcatggaaggcgacatccgcgaccttatccgcggcgtgcagaacagccgcaaggaaatgggactgatggtcaccgaccgcgtcaggctgactgtcttcggccctgaaaaactaaaacaagcctgggacagccttggcgcgagcgtcgccgaagaaactctggctgtacaaaccgtctggggcaaggcggaaggccagataccgctggaagccggggaggaagcgtggatggtgaagatagaaaaggtaacagataacagataa

SEQ ID NO: 28678 - protein, 298 aa, Unknown
  Obtained from environmental sample
  DOMAIN (1)...(80): Anticodon-binding domain
  misc_feature (1)..(298): Xaa is any amino acid
MITVAAPFMPFTTDAIWQNLRKDSDPESVHLADFPLPVESRRDRSLEFRMASVQKAVSMGRALRSQYNIKVRQPLRMAELVTRNPDEKSALLEMVEIIREELNVKNVSFRDNEEDLVEYSVKANFRVLGKELGKDMAAAAARIEALSQNEIRGLLEGASLSLDLALADGRTRAVEITADKLDIRRNEKANLRILNEGTLTVGLDTELTPELSMEGDIRDLIRGVQNSRKEMGLMVTDRVRLTVFGPEKLKQAWDSLGASVAEETLAVQTVWGKAEGQIPLEAGEEAWMVKIEKVTDNR

SEQ ID NO: 28679 - DNA, 441 bp, Unknown
  Obtained from environmental sample
  misc_feature (1)..(441): n is a, c, g, or t
gtgggcaggcgcaaccagaccgccataggcaccctcgtcgagcgcaagaccaggtactgcatcctgctccacctgcccaaagaccgcacggcggactccgtgcagaaagaggtgataaggaaaatgaagaatctccctgagcaccttaggaaatcgctgacctgggatcagggcgccgagcttgcgttccacagcaaaataagcaaggagcttgacttgcaggtcttcttctgcgaccctcactcgccctggcagaggggcaccaacgagaacaccaacgggcttctgcggcagtacttccccaaggggacggacttgtccgtccacacggacgaggagcttgacgatgtcgccgccgagctgaacgggaggcccaggatgacgcttggctggaagacgcccgcgcagaagttcctggaattgcagaacagttgcatataa

SEQ ID NO: 28680 - protein, 146 aa, Unknown
  Obtained from environmental sample
  DOMAIN (1)...(139): Integrase core domain
  misc_feature (1)..(146): Xaa is any amino acid
MGRRNQTAIGTLVERKTRYCILLHLPKDRTADSVQKEVIRKMKNLPEHLRKSLTWDQGAELAFHSKISKELDLQVFFCDPHSPWQRGTNENTNGLLRQYFPKGTDLSVHTDEELDDVAAELNGRPRMTLGWKTPAQKFLELQNSCI

SEQ ID NO: 28681 - DNA, 1308 bp, Unknown
  Obtained from environmental sample
  misc_feature (1)..(1308): n is a, c, g, or t
atgttggaaaccagcatggattattgcgcgcagtgcaactcctgctccgaagcctgccatcttttcgagatgaccaacgggcatgaaatgtaccgccccaatttccgctcggaagttttccgccggatatacaagcagtatgtgaaaaaggagcctttcgcgaagtggcgctacggcgactttgatctgaactggcaaaccgtggcccgcctcggcgagctggcgtaccgctgcaatctgtgccgccggtgcgcgcagacctgtcccatcggcgtggacaacggcttgatcgcccgggaaatccgcaagctgttcagccaggaattcggcctgaatccgccggagttgcatgacaaaggttccatgctccagttgcgctccggttcctcgaccggcatggattccaatgtcgtgcgcgacaacgtggccttcatcgacgaagacttttccgaactcaccggctatgagttcaagaccccctgggacgtggaaggcgcggatatcctgcttctccacaatgccggggaaatcatgggctggccggaaaacatcgcggctttctccatcattttccaggctgccgggctgtcttggaccatgtcgagcgaattggccgcctatgacggcatcaactacggcaccttctacgacgacgtgcagttcgcgcgtaccgcgctgctccatgcccaggccgcgaagaaactcggcgtcaagaagatcgtgatcggcgaatgcggccacgcccacaaggcgctgaccgtcatcgccgaccgcgtgctgcccccggcgctcaacattccccgcgaaagctgcttccccctgctgcgcgacatcgtcatgtccggcaaaatcgcctttgacccctcgcgcaacaacttcccggtgaccctgaacgactcctgcaacgtggtgcgcctgatgggcatcgtgaagccgcagcgcgaaatcatgcaccgcctgtgcccgcagttccgtgaaatgtatccgaacggcgtgcataactactgctgcggcggcggcagcggatttgccattatgagccgcaacaacatcgaaatatggcgcaacaacatctccgggcgcaaaaagatggaacagatcgccggcgccttctccgactgcctgagcccggacatcaagaaatacgtctgcgctccctgctccaactgcaagggccagattcgcgagctcatcaagcataacgacctgctggagaagaacagcctgcagtacggcggcattgtcgaactcatcgtcaatgccatggtggacgtgaagcccggcttcatcaagtgggaagaagaataa

SEQ ID NO: 28682 - protein, 435 aa, Unknown
  Obtained from environmental sample
  misc_feature (1)..(435): Xaa is any amino acid
MLETSMDYCAQCNSCSEACHLFEMTNGHEMYRPNFRSEVFRRIYKQYVKKEPFAKWRYGDFDLNWQTVARLGELAYRCNLCRRCAQTCPIGVDNGLIAREIRKLFSQEFGLNPPELHDKGSMLQLRSGSSTGMDSNVVRDNVAFIDEDFSELTGYEFKTPWDVEGADILLLHNAGEIMGWPENIAAFSIIFQAAGLSWTMSSELAAYDGINYGTFYDDVQFARTALLHAQAAKKLGVKKIVIGECGHAHKALTVIADRVLPPALNIPRESCFPLLRDIVMSGKIAFDPSRNNFPVTLNDSCNVVRLMGIVKPQREIMHRLCPQFREMYPNGVHNYCCGGGSGFAIMSRNNIEIWRNNISGRKKMEQIAGAFSDCLSPDIKKYVCAPCSNCKGQIRELIKHNDLLEKNSLQYGGIVELIVNAMVDVKPGFIKWEEE

SEQ ID NO: 28683 - DNA, 507 bp, Unknown
  Obtained from environmental sample
  misc_feature (1)..(507): n is a, c, g, or t
ttgttagcncaatacgcgttttatcttggccgaaaagcgcacaacacaaatgtaaaagccgacggctggcatcacagatcggacgcgctgtcttcggtagttgtattagtcggcatattattcgcaaaaaaattctggtggatggacagcctgcttggcgttattatcgcgttaatgttattctacgccgcttttgaaatcatgaaagaagcggttacaaaaatattaggcgaagagcccaaacaaaaactgattgacgacataacagccgagattaaaaatatttataaggaagatttgcatgttcatcattttcacattcacaactatatttcccacaaggagataacttttcatatacgattaaacaaagaaatctcaataggaacagggcaccatgttgcttcggctattgaggatatgattttggagaaatttaaaatggccgcgactattcatgttgagccgctggaggatcagtatgttcatggggctgcgggcgggtaa

SEQ ID NO: 28684 - protein, 168 aa, Unknown
  Obtained from environmental sample
  DOMAIN (1)...(163): Cation efflux family
  misc_feature (1)..(168): Xaa is any amino acid
MLAQYAFYLGRKAHNTNVKADGWHHRSDALSSVVVLVGILFAKKFWWMDSLLGVIIALMLFYAAFEIMKEAVTKILGEEPKQKLIDDITAEIKNIYKEDLHVHHFHIHNYISHKEITFHIRLNKEISIGTGHHVASAIEDMILEKFKMAATIHVEPLEDQYVHGAAGG

SEQ ID NO: 28685 - DNA, 495 bp, Unknown
  Obtained from environmental sample
  misc_feature (1)..(495): n is a, c, g, or t
atgatggaagacataatgaagcatgtcaagaattggaacagcgagaaggaagtcgccgaatatctggaaaaaatattaaaaggcgaggcttatgaccgctcgggattaatttacggccagggacacgccgtatacacgaaaaatgaccctcgcgccacattgttacgcgacaaggcagtagctcttgccgaagaaaaaggctttataaaggaattaaacctttaccgccttattgaaaaacttacgccggatgtttttaagaaggtaaaaggctctgaaaaggacatttgcaccaacgtagatttttactccggctttgtctacaaaatgcttggaatcccgcctgagcttaacaccccgattttcgccgtaagcagagcagccggctggtgcgcccaccgtcttgaagaaataatcgccggcggaagaatcatccgccccgcgtacaagtgcattcagttacgccgtctgtacacggaaatagacaagcgttag

SEQ ID NO: 28686 - protein, 164 aa, Unknown
  Obtained from environmental sample
  DOMAIN (2)...(147): Citrate synthase
  misc_feature (1)..(164): Xaa is any amino acid
MMEDIMKHVKNWNSEKEVAEYLEKILKGEAYDRSGLIYGQGHAVYTKNDPRATLLRDKAVALAEEKGFIKELNLYRLIEKLTPDVFKKVKGSEKDICTNVDFYSGFVYKMLGIPPELNTPIFAVSRAAGWCAHRLEEIIAGGRIIRPAYKCIQLRRLYTEIDKR

SEQ ID NO: 28687 - DNA, 597 bp, Unknown
  Obtained from environmental sample
  misc_feature (1)..(597): n is a, c, g, or t
ttgacgccgcgggaggttatttactggcagggcaccctcgacggcgcagttgagcttcttgattttgcgggcaatatggtttttaccccatttgagccgggcggatccaggctttcggtaatccttggctgcgcaatttcgcaggacgcttcccgcctggcgataatttcgggcgttgaaaaacagcgcttcctgcttttggaacattcaggggatacctacaaagttgcctatcacgaatttttaagcgacgggttcaggcggcctgtccacgttaaatttatcaacaatgacgcggaaattgtatttgagcgggaagagggcctgggtctttatacgatcggttcacgtacaagcaccaaagtgaacctgaacggggaaatattgattatggacgattcaggagagggcgaattccttttcctgattacttcccaggggcaaaatgaaaagcgtttaatcgccatcaggtatcccgggctaatagtaactgacgctccctttaaaagcagaaacgcctttttgtcaagacggcagaataaaatttaccttgggggagacctgcttatggcatcctttgaaatggagaaaaaataa

SEQ ID NO: 28688 - protein, 198 aa, Unknown
  Obtained from environmental sample
  misc_feature (1)..(198): Xaa is any amino acid
MTPREVIYWQGTLDGAVELLDFAGNMVFTPFEPGGSRLSVILGCAISQDASRLAIISGVEKQRFLLLEHSGDTYKVAYHEFLSDGFRRPVHVKFINNDAEIVFEREEGLGLYTIGSRTSTKVNLNGEILIMDDSGEGEFLFLITSQGQNEKRLIAIRYPGLIVTDAPFKSRNAFLSRRQNKIYLGGDLLMASFEMEKK

SEQ ID NO: 28689 - DNA, 345 bp, Unknown
  Obtained from environmental sample
  misc_feature (1)..(345): n is a, c, g, or t
atgaaaaatttcatgctgtgtcttttaaatgttggattgctggtttgcggacaactgttgtttaaactcgcggcgcgtgacaatgaaataggctcgctgtcttgtcttaaaaaacttattttatctccttacatgattgcggctataactctatatgcgggaacaaccattttatgggtttatatactgaccagggtaccgttgagttatgcccatccaattcaggcgctggcctttccgttggtaactgtatgttcgctattgttcctgaaagagcagatcccttctcaccgttgggttgggataggcattatcgttttaggcgcgctggttgcgggtagataa

SEQ ID NO: 28690 - protein, 114 aa, Unknown
  Obtained from environmental sample
  SIGNAL (1)...(24)
  misc_feature (1)..(114): Xaa is any amino acid
MKNFMLCLLNVGLLVCGQLLFKLAARDNEIGSLSCLKKLILSPYMIAAITLYAGTTILWVYILTRVPLSYAHPIQALAFPLVTVCSLLFLKEQIPSHRWVGIGIIVLGALVAGR

SEQ ID NO: 28691 - DNA, 645 bp, Unknown
  Obtained from environmental sample
  misc_feature (1)..(645): n is a, c, g, or t
ttgaccatttacggttatgtcagggtatcaagcataaatcaaaacgaggacaggcagatgctcgctatgaacaagttgaatattccgttagaacaaatttttatggataaacattcaggcaaggattttaaccgtcctgcgtataagtccctcatggatgaattacgatccggcgatctgctttatataaaaagtatcgacaggctggggcgcaactacgaagagattcaaaatcagtggcgcatacttacaaaagagcgcagagtggatattgccgtgattgatatgccgctgttggatacgcgtaatggcaaggaccttgtgggaacattcctcgctgacatcgtgctgcaaattctgtccttcgtagcgcagaacgaacgcgaaaatatccgcaaacgccaggccgagggtataagagcggcaagaataaagggcatccacctgggaaggccggttatagaactgcccgataattttatggaattggcaaatctgtggatgctcagaaagctgacaacaaaggaacttattcggcagaccggcttgaaggaaaccacgctttacaggcgtttacggaaatatcggatggtaagaaagaacatatgggaagaatcgttatctacccgcaaccagcgcgcctaa

SEQ ID NO: 28692 - protein, 214 aa, Unknown
  Obtained from environmental sample
  DOMAIN (3)...(148): Resolvase, N terminal domain
  misc_feature (1)..(214): Xaa is any amino acid
MTIYGYVRVSSINQNEDRQMLAMNKLNIPLEQIFMDKHSGKDFNRPAYKSLMDELRSGDLLYIKSIDRLGRNYEEIQNQWRILTKERRVDIAVIDMPLLDTRNGKDLVGTFLADIVLQILSFVAQNERENIRKRQAEGIRAARIKGIHLGRPVIELPDNFMELANLWMLRKLTTKELIRQTGLKETTLYRRLRKYRMVRKNIWEESLSTRNQRA

SEQ ID NO: 28693 - DNA, 1548 bp, Unknown
  Obtained from environmental sample
  misc_feature (1)..(1548): n is a, c, g, or t
atggccgagacgatcaagttggccgccaatatagatttgtccgactacgcgagcgaaaccggctggagtccgattggaaaatgtattgatgttgacggtaatgaagacctcgtattcgccggaacgttcgacggcggcggccataccatcagaaatctgaccatcaaccgccccgaccccgagggtcactataagggtttgttcggccacatccgcggcgggacagtgaagaatctcggtctcgtcggcgcgaatgtcaaaggcgcaaactttgtcggttgcgtcgccggatgcgtttccgacggcggcagcgtggtcaggagttatagtttcggcgaggtcgtcggcaaaatagcggtcggcggcatagcgggagttattgacggcggcaaagttgataactgctattctaccgtagcggtcagcggtgaaaacgaggtcggaggggtggtcggttcagtccgttccggtagcggtagtgtggtcggttgcgccgcattgaatccccaagtcaaatccacccgtaaacgccctaatgtagggcgcgtagtcggaaagatcgccaacggcgcgacgatctctaacaatatagcctacgccgaaatgaagaacggcgctgacaataccgactggccggacagcgcgacggcggatcgggatagaaacggcgacgccatatccgcagatcagatccggtctgacagaaccgtcggcagacgctttaagggcgacgacgggtggacggtagcgtcggggaaacttccgggcggagcgatggcgcaggagttgccggaacatttggctgtggcgccgccgccaacaacaacatcgcctccaccgccccctccgccaccgccgtcacaaccggcacctccaccgccaccaccgccgtcgtcaccgtcacgaccggagccgccgcctccacggtcaacggttgccggttctgcaaatacgacggccgcccgtccaaaaaaagtcttgactgttgaagagttttttggtgttgccggttctgcaaataagacggccgcccgtcttcatagttttggtgaatttatttcagtactcggcaccatgattttagtgggctatgtgtgcatcgctttacccatcattcaatggtataacggaacaagatctgtcaagaagccggagatggtgtttgttaaaggcggaacgtttatgatgggtgccgccgatggcaatgatgatgaaaaaccggttcacagtgtaactataggcgattattacatctggaagtacccagtaacacagggacaatgggaacgggtaatgaaacaaaataatccatcaggaaataagaggggtttcttgtcgggttttaagagaatcttttggtttgtacacgaaagagatgatttgcctgttgagagcgtcagttggggtgatatcgtcaataattttattcctaagttaaatgaaataaccaagaaaacataccgattgccgacggaagcggagtgggaatatgccgcgcgncgtggggtaacagcanaggttataagtatgccggaagtgattacataa

SEQ ID NO: 28694 - protein, 515 aa, Unknown
  Obtained from environmental sample
  DOMAIN (382)...(514): Domain of unknown function (DUF323)
  misc_feature (1)..(515): Xaa is any amino acid
MAETIKLAANIDLSDYASETGWSPIGKCIDVDGNEDLVFAGTFDGGGHTIRNLTINRPDPEGHYKGLFGHIRGGTVKNLGLVGANVKGANFVGCVAGCVSDGGSVVRSYSFGEVVGKIAVGGIAGVIDGGKVDNCYSTVAVSGENEVGGVVGSVRSGSGSVVGCAALNPQVKSTRKRPNVGRVVGKIANGATISNNIAYAEMKNGADNTDWPDSATADRDRNGDAISADQIRSDRTVGRRFKGDDGWTVASGKLPGGAMAQELPEHLAVAPPPTTTSPPPPPPPPPSQPAPPPPPPPSSPSRPEPPPPRSTVAGSANTTAARPKKVLTVEEFFGVAGSANKTAARLHSFGEFISVLGTMILVGYVCIALPIIQWYNGTRSVKKPEMVFVKGGTFMMGAADGNDDEKPVHSVTIGDYYIWKYPVTQGQWERVMKQNNPSGNKRGFLSGFKRIFWFVHERDDLPVESVSWGDIVNNFIPKLNEITKKTYRLPTEAEWEYAARRGVTAXVISMPEVIT

SEQ ID NO: 28695 - DNA, 324 bp, Unknown
  Obtained from environmental sample
  misc_feature (1)..(324): n is a, c, g, or t
atgattggaatttattacaagcaggtgaaaaattcaaaaaaattcaaccattggtttaaggagagtagaatgataaaggtaattaatgcggaattaaaaagcgattataaagttcatgttgaatttaatgacggaacaaaagggacaatagattttaaacaaatattagaggaagaccacagagcgataataagggatttattgaatattgatttattcaaaacattaaaagtaaatttaaatacgctatgttgggataatgatgtagattttgctcctgattatttatatgataagttaaaagtaaaagagaaagctgcataa

SEQ ID NO: 28696 - protein, 107 aa, Unknown
  Obtained from environmental sample
  misc_feature (1)..(107): Xaa is any amino acid
MIGIYYKQVKNSKKFNHWFKESRMIKVINAELKSDYKVHVEFNDGTKGTIDFKQILEEDHRAIIRDLLNIDLFKTLKVNLNTLCWDNDVDFAPDYLYDKLKVKEKAA

SEQ ID NO: 28697 - DNA, 300 bp, Unknown
  Obtained from environmental sample
  misc_feature (1)..(300): n is a, c, g, or t
atgaatgattttatcgctattgattttgaaaccgctacgggtaaacccgaaagcgcgatttccgtcggcttggtaaagtaccgcaattacaagcctgtaagctcttattattcgttaatccgtccgccgaacctgtacatacgcccggattttacggatattcacggtcttacggttgacgacataagggacgcgccggattttggttatctatggaaaaatgaaataaaaaggtttataggaattttttggatatatggggttggaggtaaaaaaaatgaaaataataaaggaacatga

SEQ ID NO: 28698 - protein, 99 aa, Unknown
  Obtained from environmental sample
  misc_feature (1)..(99): Xaa is any amino acid
MNDFIAIDFETATGKPESAISVGLVKYRNYKPVSSYYSLIRPPNLYIRPDFTDIHGLTVDDIRDAPDFGYLWKNEIKRFIGIFWIYGVGGKKNENNKGT

SEQ ID NO: 28699 - DNA, 630 bp, Unknown
  Obtained from environmental sample
  misc_feature (1)..(630): n is a, c, g, or t
gtggtatcgcgcccctcgttgaagtccctgcaagcggcaagaaagccgtcgagaccgccgacaagaagaacgtcggagcggaaacccgtgagaagcaaaaaggcggattctaaggtgggctactacttagcttgtactgagccgcctatagcggaacccataacgctccaagaggcgttgctacaatgtcacgccttggagggcgtcgaggacgacttcttcttctgcaaaatcgccgctggccgtcgtaaggtagaggatttcacccaccgcgccttactgcggcaaaagtgggtgctgacttacgacgactattgtccgagcatggtggtgttgccgcggtcgcccgtgattgccctcgaaagcgtcatcgtagacggcgagccgcttgatccgttgccgcccgtgttagatggactgccgtcgcggataaaaatcaacgtaggaggcggctgtcctttgcgggtggaatacgtcgcagggtatggggatgagcctaaagacgtgccggagacgctgcgtgatgcaataaagctcttcgtcggatggagctatgagaaccgcgctgcggaaacggaagttccgagagctttttatgatttaatccgcccgtatcagctgtgggtgtag

SEQ ID NO: 28700 - protein, 209 aa, Unknown
  Obtained from environmental sample
  misc_feature (1)..(209): Xaa is any amino acid
MVSRPSLKSLQAARKPSRPPTRRTSERKPVRSKKADSKVGYYLACTEPPIAEPITLQEALLQCHALEGVEDDFFFCKIAAGRRKVEDFTHRALLRQKWVLTYDDYCPSMVVLPRSPVIALESVIVDGEPLDPLPPVLDGLPSRIKINVGGGCPLRVEYVAGYGDEPKDVPETLRDAIKLFVGWSYENRAAETEVPRAFYDLIRPYQLWV

SEQ ID NO: 28701 - DNA, 351 bp, Unknown
  Obtained from environmental sample
  misc_feature (1)..(351): n is a, c, g, or t
ttgaaatggaggttttttatggctcgtaagacggggctgacgcccaaaagcctttccagcatgttgctcgacgccggtgtcgtctatgcaaattatggctcaagtgaccctcaacatccgcagtttaggttgggtgcgactcgcggaggtagcacttttaagctcaccggaactgtccatgatatgtccgtagacggcattacaggcatcgcccgtggtgctagacgattcctcggaaacacagcggaattaacgtgcaatatggtcgagatcagcaaggagatcctgacgatggccgtccccggagcgacatattctgcaccgattcccgcgactctcggccgattctga

SEQ ID NO: 28702 - protein, 116 aa, Unknown
  Obtained from environmental sample
  SIGNAL (1)...(30)
  misc_feature (1)..(116): Xaa is any amino acid
MKWRFFMARKTGLTPKSLSSMLLDAGVVYANYGSSDPQHPQFRLGATRGGSTFKLTGTVHDMSVDGITGIARGARRFLGNTAELTCNMVEISKEILTMAVPGATYSAPIPATLGRF

SEQ ID NO: 28703 - DNA, 771 bp, Unknown
  Obtained from environmental sample
  misc_feature (1)..(771): n is a, c, g, or t
ttgccggtagggttccacgcgcttgccacaatattagtcggcgacgacccgtcttccgccacctacgtgaagatgaagggcaacgcctgcgcccgtgtggggatgctctcgctcaaggtggagatggggcgcgataccgccacggaggagcttttggagcggattaacgccctgaacggcgacccccagacggacgggattctgttgcagcaccccgtccccaagcagatagacgagcgcgccgcgtttgaggctatatctatagataaggacgtggacggcgtgacctgcctcggcttcgggcgaatgtccatggggtgcgccgcttacggcagcgccactccggcggggataatgcggctgctcgaccgctatgagatccccatagagggccgccacgccgtcgtcgtcggaaggagccctatccttggtaagcccatggccttgatgctgctcaaccgcaacgccacggtcaccgtttgccactccaagacggccggcctgccggaacttgtaaggcagggcgacatagtggtgggcgcggtgggtaagccggagttcatacaggcggagtggataaaggagggcgcggtggcggtcgacgccggctaccacgttggcggcgttggcgacatcgacctgaaaaacgcggcttccaaagtaagcgcctacacaccggtgcccggaggcgtggggcccatgaccatatccacactgatactgcaaacgatgcgcgcagccgaaaagacagtcgggatagcagagaagtaa

SEQ ID NO: 28704 - protein, 256 aa, Unknown
  Obtained from environmental sample
  DOMAIN (4)...(93): Tetrahydrofolate dehydrogenase/cyclohydrolase, catalytic domain
  misc_feature (1)..(256): Xaa is any amino acid
MPVGFHALATILVGDDPSSATYVKMKGNACARVGMLSLKVEMGRDTATEELLERINALNGDPQTDGILLQHPVPKQIDERAAFEAISIDKDVDGVTCLGFGRMSMGCAAYGSATPAGIMRLLDRYEIPIEGRHAVVVGRSPILGKPMALMLLNRNATVTVCHSKTAGLPELVRQGDIVVGAVGKPEFIQAEWIKEGAVAVDAGYHVGGVGDIDLKNAASKVSAYTPVPGGVGPMTISTLILQTMRAAEKTVGIAEK

SEQ ID NO: 28705 - DNA, 1281 bp, Unknown
  Obtained from environmental sample
  misc_feature (1)..(1281): n is a, c, g, or t
atggagttaggggcggtaataggcgccgcgccggcggagaatgttatacgcaatacgcccaaaccgggagatgttgtaatacttctgggcggacgcacgggaagggacggcatagggggggcgacaggctcttccaagtcgcacacttccctctcgcttgaaaccatgggcgccgaggtacagaaaggaaacgcgccggaagagcggaaaattcaaaggcttttccgtaatccgcaagcggcgcgtcttataaaacgctgtaacgatttcggcgcgggcggcgtcagcgtctctgtcggagaacttgcggacggacttttgatagatcttgataaagttacaaaaaaatacgaggggctcgacggcacggaacttgctatcagtgaaagccaggaaagaatgtccgttgttacagcggaaaaagacgcgaaaaaatttattgagcttgccgatgccgaaaatcttgaagcggttgtaattgcggaagttactcttgaaaaacgccttgtaatgaaatggaacggaaaaactattgtaaatctttcaagggaatttcttaacagcaacggggcggaaaaacacgcaaaagcccgtattgtttctgtacgggttaataatattaaaacggaaccggacgcgcagcagttggaaaaattttcaggcggtttaaatatttgttcgcagaaagggcttgttgaccgttttgattcaagcgtgggaatggcgaccgttctcgcgccttacggcggaaaatttcagcttacgcccgctcaggcaatggcggcaaaaataccagtccttaacggcgaaacaaacacctgctcccttatgtcatggggttttgatcctgaaatatcgtccttaagcccgtaccacggagcggttttcgccgttactttttcgcttgcgaaaataatagccgcgggcggaagcagaaagcgctgccggctctcttttcaggaatattttgaaaggttgcgcgacgatccgttaaggtggggcaagcccgtatccgcgctcctgggcgctcttgacgcccagcttgggctggaaatagcggcaataggcggcaaagattcaatgtcaggttcttttacgttaaaaaacggcggcgacatcgacgttccaccaaccttagtttcatttgcggtctcaaccgcgaagacggataaaattgtaacgccggaattcaaacgcgccggaagtcatgtttatcttttcaaaccgccacgctctgtttttgaaaaacagagattttgccgccttgcgcgattattttga

SEQ ID NO: 28706 - protein, 426 aa, Unknown
  Obtained from environmental sample
  DOMAIN (21)...(174): AIR synthase related protein, C-terminal domain
  misc_feature (1)..(426): Xaa is any amino acid
MELGAVIGAAPAENVIRNTPKPGDVVILLGGRTGRDGIGGATGSSKSHTSLSLETMGAEVQKGNAPEERKIQRLFRNPQAARLIKRCNDFGAGGVSVSVGELADGLLIDLDKVTKKYEGLDGTELAISESQERMSVVTAEKDAKKFIELADAENLEAVVIAEVTLEKRLVMKWNGKTIVNLSREFLNSNGAEKHAKARIVSVRVNNIKTEPDAQQLEKFSGGLNICSQKGLVDRFDSSVGMATVLAPYGGKFQLTPAQAMAAKIPVLNGETNTCSLMSWGFDPEISSLSPYHGAVFAVTFSLAKIIAAGGSRKRCRLSFQEYFERLRDDPLRWGKPVSALLGALDAQLGLEIAAIGGKDSMSGSFTLKNGGDIDVPPTLVSFAVSTAKTDKIVTPEFKRAGSHVYLFKPPRSVFEKQRFCRLARLF

SEQ ID NO: 28707 - DNA, 867 bp, Unknown
  Obtained from environmental sample
  misc_feature (1)..(867): n is a, c, g, or t
gtggatgatcctatcaggctttatctacggnaaatcggcagggaaaacctgcttacagccgaacaggaagtccatctttccaaacaaatggaagacggtgaaaatatcatcaaaagggtgttaaaaaaatccggaatgataattccagaattttttcacattgcccagaaggctttttcaaagagagacctccgcgaattaaatctttccaaaaaagagataaccgaacacatgacggagcgtcgcaggctgaatcaattctataaggaaactttaaggcttgcccttcctgatctcaaaagctacatagaagtcaagcgcaggttaatcggccgcggaatgaatatttttgaggatcaggaattgaatgagattaggggccggttgatgaagataatcgggtccgccgagattcaccccgaagaaatcgcggggttttcggaaaagtttatccaggcttcaaaacggataaagcgctataaaaaagatcaggaaaaaatcgaaaaacatctccatgtcaattccttaaaagagcttcgggcgcttggcagggggcttacagttaaggaagagcgggaaaagcttgaagatgctttaggtttgagctccgatgaaataaaagacaagatcaggcagattcaggtaaccgagaaaaagctcaggcagatggaagcggaatttgaggaatccattgaacgcataaacctcatggcaaaggaaattaaccgcggcagggtaatgatgaaaagcgccaaggacaggcttatcaaggcaaatttgcggcttgtggtttcaattgccaaaaaatatacaaacagggggcttcatttcttcgatcttgtccaggagggcaatatcggcctataa

SEQ ID NO: 28708 - protein, 288 aa, Unknown
  Obtained from environmental sample
  DOMAIN (2)...(38): Sigma-70 factor, region 1.2
  misc_feature (1)..(288): Xaa is any amino acid
MDDPIRLYLRXIGRENLLTAEQEVHLSKQMEDGENIIKRVLKKSGMIIPEFFHIAQKAFSKRDLRELNLSKKEITEHMTERRRLNQFYKETLRLALPDLKSYIEVKRRLIGRGMNIFEDQELNEIRGRLMKIIGSAEIHPEEIAGFSEKFIQASKRIKRYKKDQEKIEKHLHVNSLKELRALGRGLTVKEEREKLEDALGLSSDEIKDKIRQIQVTEKKLRQMEAEFEESIERINLMAKEINRGRVMMKSAKDRLIKANLRLVVSIAKKYTNRGLHFFDLVQEGNIGL

SEQ ID NO: 28709 - DNA, 531 bp, Unknown
  Obtained from environmental sample
  misc_feature (1)..(531): n is a, c, g, or t
ttggattatgtttcttatattagtaaaaatgaaaatgaaagagaaaagctttttcccagatttcgtttttccctggagataaacaattttgaagatccaaacgcaaaggaaatttacgttgctttggaagaatgtttcagatacggagaggaaagtatggatgaattgctggcgcgcatttcttcacctgagctgaaaaaaatccttttggaacgcagcgtttcaggagaattttcaatcaatgctgaacaatttgtaaatgacggtataaaaaaaatcaaaagaaaaaaccttgaacacagacaggaagaaataattataaaacttcgctcgcttaagaaaaatatcgccggtgaaggtaacagttcggaagcggcggacaaagtccacgacgatgaccgcgaatttgaggcgacagacgaagtcgcggatgaaatcaaggacgaagtccacgaactgctagccgaaaagatgcaggttgacgatgagttaaaccaaatgaagcaaggaagattatcatgcctgagttga

SEQ ID NO: 28710 - protein, 176 aa, Unknown
  Obtained from environmental sample
  misc_feature (1)..(176): Xaa is any amino acid
MDYVSYISKNENEREKLFPRFRFSLEINNFEDPNAKEIYVALEECFRYGEESMDELLARISSPELKKILLERSVSGEFSINAEQFVNDGIKKIKRKNLEHRQEEIIIKLRSLKKNIAGEGNSSEAADKVHDDDREFEATDEVADEIKDEVHELLAEKMQVDDELNQMKQGRLSCLS

SEQ ID NO: 28711 - DNA, 837 bp, Unknown
  Obtained from environmental sample
  misc_feature (1)..(837): n is a, c, g, or t
atgatcaatgaacggcttgcgattcaggctgcggagagggacaggattaccgttgcggaaagcgaggtaaacagacaggttgatcagcttaaaagccagatgattcaacttattgggcggtcgcctacagacgcggaatttgctacgacgataagaaatcagaccggtcttgatatgccatcattccgggaaaaaatcagacggcagcttattgttcaaaaatacctcatgtcaaaaaagcagagtactattgaaagtataaaagtcccaaccgaggcggatattgttaaccagtataatttggcaaaagcccagcttgtaaggccggatacagttcgcatttccatgattcaagctacttacggtcaggatgccgcttcaaaaaccaaagccaaagaactgatagacaggctggcaagggaaattggcaacagtccctcaaagtttgatgaggtgtttattcgcggtcaggcgactaactccggttattatgccggggacgaagggtatctgccgcgaagtatgcaaaccgcgcaggtagtcgggcaggattttatcaacatcgctttcagtctgaagcagggcgaagtttcaaaagtgatcgaaggtcagcggggctaccagattatcaaagtaaccgagacttatgcccaaaaaaatctggacctggacgatattgtccagcccggttcccgtgtaactgtccgggaatttatcggtaatggcctattgcaggaacgtcaggcggaattaattgccagggcttcccaggaacttattgaagatctgagaaaaggcaggccctttcagatatttgaaaagaacctgtcctggtaa

SEQ ID NO: 28712 - protein, 278 aa, Unknown
  Obtained from environmental sample
  DOMAIN (117)...(214): PPIC-type PPIASE domain
  misc_feature (1)..(278): Xaa is any amino acid
MINERLAIQAAERDRITVAESEVNRQVDQLKSQMIQLIGRSPTDAEFATTIRNQTGLDMPSFREKIRRQLIVQKYLMSKKQSTIESIKVPTEADIVNQYNLAKAQLVRPDTVRISMIQATYGQDAASKTKAKELIDRLAREIGNSPSKFDEVFIRGQATNSGYYAGDEGYLPRSMQTAQVVGQDFINIAFSLKQGEVSKVIEGQRGYQIIKVTETYAQKNLDLDDIVQPGSRVTVREFIGNGLLQERQAELIARASQELIEDLRKGRPFQIFEKNLSW

SEQ ID NO: 28713 - DNA, 666 bp, Unknown
  Obtained from environmental sample
  misc_feature (1)..(666): n is a, c, g, or t
gtgaacactgtctttttaagcatttccgccgggaaaggcccggaagaatgtgcccatgccgcctctttaacggtaaaggcattgctggaggaaatacaaagccttccggaaaaaaacattaaggcggagcttattgaaagcgagccgactcaaataaaaggaaacatcagatcggcgctgttggttctggaaggaaacgaagcggaaagctttagccgatcctgggttggcgttattcaatggatatggcaaagcacataccgtccacatcacaaaagaaagaactggtttgttggtgtaaagccttattgcgtaccggagcagaacgagtttcccgtttcagacatacgctttgaaaccacaagggccggagggcccggaggccagcacgtcaacaaaactgaaactgctgtacgggcagtccatgtcccaacaggtaaatgcgccgttgcgcggggagagcgttcccagttaatgaacaaaaagcttgcgcttgcccggctcatggccctttttgccgatgaaaaagccgcaaaagaaaaacaaaaccgttctgagttacgccacacgcattgggagctcgaacggggcaaccctgtccgcgtatacgacggcgaaacattgaagcttattaaaaggagaaataatgacagaaacaacaattaa

SEQ ID NO: 28714 - protein, 221 aa, Unknown
  Obtained from environmental sample
  DOMAIN (102)...(215): Peptidyl-tRNA hydrolase domain
  misc_feature (1)..(221): Xaa is any amino acid
MNTVFLSISAGKGPEECAHAASLTVKALLEEIQSLPEKNIKAELIESEPTQIKGNIRSALLVLEGNEAESFSRSWVGVIQWIWQSTYRPHHKRKNWFVGVKPYCVPEQNEFPVSDIRFETTRAGGPGGQHVNKTETAVRAVHVPTGKCAVARGERSQLMNKKLALARLMALFADEKAAKEKQNRSELRHTHWELERGNPVRVYDGETLKLIKRRNNDRNNN

SEQ ID NO: 28715 - DNA, 585 bp, Unknown
  Obtained from environmental sample
  misc_feature (1)..(585): n is a, c, g, or t
ttgaataggaggtgcggcgcggcgatggaaaacgctttaatcatttcaaactctgaaaaagacacggctttatttacgggctttctgaaagcggcttccattcatcaggttgcttcttctcagtcatgtgacagcgcccgcaaacttattcaaaaacaggatttcgatttaataattgtcgactcgccgctcccggatgaatccggcgagggcttttcccgggatgccgccgccaatggcgtatcccaggtgatcctccttgtaaaaagcgaatcttttgattcggcgtccgccgcctgcgaggacgacggcgttcttgtcatcgcgaaacctgcggacaaatcccttttgtggtccgcgctgtcgcttgcccgatcggttcaaaacagggtaaaacgcatacaatctgaaaacacgcaattaaaacaaaaaattgaagacttacgcattattgaccgcgcgaaatggattttaatttcttccatgaaaatgaacgaacaggaagcgcatcgctacatagaaaaacaagccatggacatgcgttcatcccgcagatttgtcgccgaaggcatcctaaaacgatag

SEQ ID NO: 28716 - protein, 194 aa, Unknown
  Obtained from environmental sample
  DOMAIN (10)...(122): Response regulator receiver domain
  misc_feature (1)..(194): Xaa is any amino acid
MNRRCGAAMENALIISNSEKDTALFTGFLKAASIHQVASSQSCDSARKLIQKQDFDLIIVDSPLPDESGEGFSRDAAANGVSQVILLVKSESFDSASAACEDDGVLVIAKPADKSLLWSALSLARSVQNRVKRIQSENTQLKQKIEDLRIIDRAKWILISSMKMNEQEAHRYIEKQAMDMRSSRRFVAEGILKR

SEQ ID NO: 28717 - DNA, 996 bp, Unknown
  Obtained from environmental sample
  misc_feature (1)..(996): n is a, c, g, or t
atgcttaaagaaatcatgaagcagccgaaaatcctccgtgaaacgataaactcggcggtaaaatccggcggttataaaagcatttttgatactcttgacgttacgcgctttaacaagatcgtgataagcgcctgcggttccgcttacaacgcgggagttgtcgcaaggtatgtatttgaaaaactgtgcagattcccatcaatagaagtggaacttgcaagcgaattccgctataaggacgccgttattgacgataaaacgctggttattctgatcagccagtccggtgaaaccgcggataccatcgcggccatgcgcgaggcaaaacgcaaaggcgcggttaccctgtccatcgtcaatgttgtcggcagcactatcgccaaagaagcggactactgcatgtttaccgcggcgggccccgagattgccgtggcgacgacaaaagccttttcggcccagcttgtgctgctgtatattctggcaatatggttcgccgccggattggggaaattatcgccccaggagtcacaggaactgttagctgaaattgacgccctgcccggaaaaacagaacgcctgcttaaacagaccgacgctattcagatgtacgcttctacctgcatcggctataagagcatcttcttcatcggcaggaatattgattacgccatcgcgctggaaggctcgctcaaactcaaagaaatttcctatattcattccgaagcctacgcgggcggcgaattgaagcacggcactatttctctggttgaaaaggatacgctggttgtcgccatctccaactgcgccccgttgtacggcaaaattatgagcaacgcggagcaggttataagccgggcgcgaaagtactgcttatcggcaactgtccggacgcaaaaccggacgacaaactcttccatatcgctttacctgaaatttttgatttgttttccccttccctgtcggttattgttttacagcttttcagctattatgtag

SEQ ID NO: 28718 - protein, 331 aa, Unknown
  Obtained from environmental sample
  DOMAIN (204)...(321): SIS domain
  misc_feature (1)..(331): Xaa is any amino acid
MLKEIMKQPKILRETINSAVKSGGYKSIFDTLDVTRFNKIVISACGSAYNAGVVARYVFEKLCRFPSIEVELASEFRYKDAVIDDKTLVILISQSGETADTIAAMREAKRKGAVTLSIVNVVGSTIAKEADYCMFTAAGPEIAVATTKAFSAQLVLLYILAIWFAAGLGKLSPQESQELLAEIDALPGKTERLLKQTDAIQMYASTCIGYKSIFFIGRNIDYAIALEGSLKLKEISYIHSEAYAGGELKHGTISLVEKDTLVVAISNCAPLYGKIMSNAEQVISRARKYCLSATVRTQNRTTNSSISLYLKFLICFPLPCRLLFYSFSAIM

SEQ ID NO: 28719 - DNA, 963 bp, Unknown
  Obtained from environmental sample
  misc_feature (1)..(963): n is a, c, g, or t
ttgctcggcattgaaaatgaagtggcgctcagactgctgcacaagacccagtcggccaaaaaccttggcgatctgaatacattgttccgggactttatgctcgaaaagccggaaacatttgacgccgccgacaggcttgtcaacgagtttggagaactcagcgccgcgcaccaggcggtagtgaccgcccgcaaacaaatcgagactctggttccagcgagagaaaagcaccatcaaatggaaaaaatcatatctcagaagaacgatctccatgaactgcaggcagggattgatttttatcgtgaaatacggcgaatggatttgttgaaagaacgcatagcctcgcttattgtcgaaaaagaaggctgggagggtgagatcacccggcgtcaaagtcatttggacaatcaaaatgacgttttacgggaactggaacatcagcatagggagattggcggcgatcagattgaacagtgggaaagcgataagcggacgctggaaactcagcgcgcggatcgcgtacggaaacgggatcaggcggaagcagcctgcagggaactgggatgggcgttaggtgaaacaccacaggaatttgcggagctcgttggcatggcccgcggtgaaattgaagggatggaaagcagaaacaaagccgcccgcgaagatctgctgttgtacgccggccagaaanaagaagcagaggatgaatttaccattgcattggaggaggtccgggctcttcaaagccagcctttcatattccggctgttatgctggaactgcgaaatagaatcgcttcggcaatcggggtttccgacgaagcattgccctttgccggagagcttatcgaagttaaacaggacgaggcgtcatggcagggcgccattgaacgggttttacacggtttcgccttatcccttctggttgatgaacgctactattcagcattatcataccatataa

SEQ ID NO: 28720 - protein, 320 aa, Unknown
  Obtained from environmental sample
  misc_feature (1)..(320): Xaa is any amino acid
MLGIENEVALRLLHKTQSAKNLGDLNTLFRDFMLEKPETFDAADRLVNEFGELSAAHQAVVTARKQIETLVPAREKHHQMEKIISQKNDLHELQAGIDFYREIRRMDLLKERIASLIVEKEGWEGEITRRQSHLDNQNDVLRELEHQHREIGGDQIEQWESDKRTLETQRADRVRKRDQAEAACRELGWALGETPQEFAELVGMARGEIEGMESRNKAAREDLLLYAGQKXEAEDEFTIALEEVRALQSQPFIFRLLCWNCEIESLRQSGFPTKHCPLPESLSKLNRTRRHGRAPLNGFYTVSPYPFWLMNATIQHYHTI

SEQ ID NO: 28721 - DNA, 885 bp, Unknown
  Obtained from environmental sample
  misc_feature (1)..(885): n is a, c, g, or t
atgctggaactgcgaaatagaatcgcttcggcaatcggggtttccgacgaagcattgccctttgccggagagcttatcgaagttaaacaggacgaggcgtcatggcagggcgccattgaacgggttttacacggtttcgccttatcccttctggttgatgaacgctactattcagcattatcataccatataaacagcactcatcttggacaacgccttgtttattatcgtaccggacgcgcggagcaatggcaggagaaacctgtttcacctgattcaatggtatttaaactcaatattaaagaagaacattacaccgaatggttgaaggccgaattacgccagcgcttcaattattcatgcgtagagtcggttcaagctttcagagcggcggaacgcgcgataacgcgcgaggggcagataaagcacagcaaaacccgtcatgagaaagacgacaggcgcgccgtgggtgacaaaagaaactggatcctgggttttaataaccacgaaaagctggccctgtttcaacagcaggctcaggaattggcggctgcaatttcagacctggaaaagaagatcaatacattatccgaacaggacaatctgaacgcgaaacgggcccttcattgccaaacgctcgtcaatatgcagtggcaggaaattgatgtgcttccgataatagaacgtatctctgccattgagaagcaaattcatgaaatgcgtgacggcaataaagtgttacgcgaaatttcagaacgaatcaacatgcagaagtccatcgtctcacgggctgatgaagacctgtgcaaagctaggggtgaacatgataagacgattgggcagcttaaagaatcaaatgaccatctcaataaattacagaaatga

SEQ ID NO: 28722 - protein, 294 aa, Unknown
  Obtained from environmental sample
  misc_feature (1)..(294): Xaa is any amino acid
MLELRNRIASAIGVSDEALPFAGELIEVKQDEASWQGAIERVLHGFALSLLVDERYYSALSYHINSTHLGQRLVYYRTGRAEQWQEKPVSPDSMVFKLNIKEEHYTEWLKAELRQRFNYSCVESVQAFRAAERAITREGQIKHSKTRHEKDDRRAVGDKRNWILGFNNHEKLALFQQQAQELAAAISDLEKKINTLSEQDNLNAKRALHCQTLVNMQWQEIDVLPIIERISAIEKQIHEMRDGNKVLREISERINMQKSIVSRADEDLCKARGEHDKTIGQLKESNDHLNKLQK

SEQ ID NO: 28723 - DNA, 654 bp, Unknown
  Obtained from environmental sample
  misc_feature (1)..(654): n is a, c, g, or t
atgaacaacatcaagattggcgttaagctaattgcgtcttttctgctagtcgctatgctttcggcggctatgggaatgtacatgatgcgtggcctcgatttcctcaacgaccaatcagattttatgtataagaagggagccgtgcccctagggcttctgactgaggctctaaagcaaacccaagagatgagggtacagatgcgcgactggactaccgccaggaatgatgagcaacggaatgctattctcaaaaaaatagacctagcacgtgataccgcagtagatgcaacaaatcagcaactgagcctcaccataaaggaagaatcaaaaactgttttacgttccctgattgatgcctgcaataagtatgcggctacggctcgtaaattttcaaatgaaactaaggattttgaccctgtcactggagcttacacaaaaagcacgccgccagagatagttgctataggcaacgaaattttggatttgaccaagagagcctcagagataaggattggggcggtgaaagagtcttgggagaatggagatgaaaccgcgcgctataccaaaggcgttgcttttgcttttttggcagtggttgtgctgttttcaattgttgtgggcgtttatttaacactttccataacgggcgtttga

SEQ ID NO: 28724 - protein, 217 aa, Unknown
  Obtained from environmental sample
  SIGNAL (1)...(25)
  misc_feature (1)..(217): Xaa is any amino acid
MNNIKIGVKLIASFLLVAMLSAAMGMYMMRGLDFLNDQSDFMYKKGAVPLGLLTEALKQTQEMRVQMRDWTTARNDEQRNAILKKIDLARDTAVDATNQQLSLTIKEESKTVLRSLIDACNKYAATARKFSNETKDFDPVTGAYTKSTPPEIVAIGNEILDLTKRASEIRIGAVKESWENGDETARYTKGVAFAFLAVVVLFSIVVGVYLTLSITGV

SEQ ID NO: 28725 - DNA, 924 bp, Unknown
  Obtained from environmental sample
  misc_feature (1)..(924): n is a, c, g, or t
atggaaaaacttattgagactgcgaaaaccctgcggacggtatcaggttacggcggctatatccacttaaaattaattccgggaacaggcgaaaaaatgatacgcgaagcgggaaaatgggcggacaggctcagcgtgaacattgagcttcctacagaaaaaagcctgcaatgtctcgcgccggaaaaatcggggaaagttattttgggcgcgatgaatgatttttcggggattagccgcgagattgaggaagaccggagtattccaaaatttttaccgcagggaaaaacaaaggagacttatttcgcgccggcgggacaaagcacgcagttgattgtaggagcgacaggtgaagacgacaggcagatcatcaatttgacaagttctctttacaataaattttcattaaaacgtgtgtactactccgcttttatccatccgggcagttacgcgcaagaagaaaatcttcaagacccgcgcctgccggaaagcgtcgggccgccgcttgttcgggaacaccgtttgtatcaggcggactggcttttacggttctaccattttaacgcgggtgaaattttgagcgaggacgaacctttccttgacgcgcacattgatcctaagacggcgtgggcgttaaaaaatttggactttttcccaatagagataaacagcgccgattacgaaactttgttgcgtatcccgggcataggcgcgaaaacagcgcgcagagtaattgagacgcgccgttcccgcagtatccatttggacggtttgcgccgaatgggcggagtcttaaaacgcgcccgctattttattacggcgggcggctcctatatggagcgtcccgatgatccttttcgcatacgccgcctgctctcagacattgacggtgcaggcttacagcttccgctttttgagttctaa

SEQ ID NO: 28726 - protein, 307 aa, Unknown
  Obtained from environmental sample
  DOMAIN (218)...(247): Helix-hairpin-helix motif
  misc_feature (1)..(307): Xaa is any amino acid
MEKLIETAKTLRTVSGYGGYIHLKLIPGTGEKMIREAGKWADRLSVNIELPTEKSLQCLAPEKSGKVILGAMNDFSGISREIEEDRSIPKFLPQGKTKETYFAPAGQSTQLIVGATGEDDRQIINLTSSLYNKFSLKRVYYSAFIHPGSYAQEENLQDPRLPESVGPPLVREHRLYQADWLLRFYHFNAGEILSEDEPFLDAHIDPKTAWALKNLDFFPIEINSADYETLLRIPGIGAKTARRVIETRRSRSIHLDGLRRMGGVLKRARYFITAGGSYMERPDDPFRIRRLLSDIDGAGLQLPLFEF

SEQ ID NO: 28727 - DNA, 1044 bp, Unknown
  Obtained from environmental sample
  misc_feature (1)..(1044): n is a, c, g, or t
atggataatcagaacgaggtggatgttctggatgtgatagaacaacgcaaaaaagattatgaaaaggaaccgacatttgaaaagttatcatatctttccaaaattatgaatgcgggattagatgcgcgtaaagccaaagatggttttcgtaggcttttgacgctgttgtatcctgacgtcgctcactttatctatgaacttctccaaaacgctcaggacgctaataaagacatggtgtcccctacgacggctatattcacactatcaaaagacaaacttgtgtttgagcatagcggtcgtccgtttatcctagaagacgttgaagccattacatgcgtcggtgaaggtacaaaaaaagacgatccaaccgctatcggtgagtatggcgttggatttaaatctgtattcgcgtatacgaacactcctgaaatacactctgacaagttccacttctcgattagcgaccttgtaattccgaaaaaaacggaggagatccctaccggagagtccacacggtttattctaccgtttgacaacccaaagaaactgccggataaagcggtttctgagacggaggaacaactcgaaaaacttccgcccgagacattgttattcattggaaaaattaaaaagatcgaatatttgttatctgacggcaccacgcgtggggttatggagcgtgttgacatagacgatcacataactgaaatcaaaatggatgttccgaaccaagtgaagcgtgtttactattatctccgctatgagaaagatgctaaagtttatgacgaagacgggaatccggcaaaccataaggtcgcggtcgcgtttgagttggataaacaaggcgacggctggaaaataataaaaccttcttcttcgggtaaagtatgcatatttttcccggcggcaagcatatcgtcaaacttacacttttgtatccacgcgccgttcgcgtcaacggttgcgcgtgacactatccgcaatggtgtcaaaaggtacgaaacattacgcgacgccattgccgaacttgccggcgaatcttga

SEQ ID NO: 28728 - protein, 347 aa, Unknown
  Obtained from environmental sample
  misc_feature (1)..(347): Xaa is any amino acid
MDNQNEVDVLDVIEQRKKDYEKEPTFEKLSYLSKIMNAGLDARKAKDGFRRLLTLLYPDVAHFIYELLQNAQDANKDMVSPTTAIFTLSKDKLVFEHSGRPFILEDVEAITCVGEGTKKDDPTAIGEYGVGFKSVFAYTNTPEIHSDKFHFSISDLVIPKKTEEIPTGESTRFILPFDNPKKLPDKAVSETEEQLEKLPPETLLFIGKIKKIEYLLSDGTTRGVMERVDIDDHITEIKMDVPNQVKRVYYYLRYEKDAKVYDEDGNPANHKVAVAFELDKQGDGWKIIKPSSSGKVCIFFPAASISSNLHFCIHAPFASTVARDTIRNGVKRYETLRDAIAELAGES

SEQ ID NO: 28729 - DNA, 597 bp, Unknown
  Obtained from environmental sample
  misc_feature (1)..(597): n is a, c, g, or t
ttgctctacatgtctgaattgatacggaaaaacaagaaagttgccattgtgtataacataatgaataacaagagcgaaattcttatggaagtttctccaaaatttcccgtattttatttgcatggctgccgcaacgaaaacattgtccctgggctagaaaacgccttggaaggccacaaagagggtgatgtattttccgttgaactgccgtttgaattgacctttgggccttatgacaaaaagctcgttatggaagtatctaaagaagagctgtcatcttttatagacgatttttgggttggcggctatatagaacgctttgattatgatgactttgaagagatgtctgaagccgatagattctggaaagagatggaagatcagcaccagccagagggttttgttatccgtgaaattcgcaaagacacggttatcctagacggcaaccatcaatacgcgggaatggatttgatattcaacgtaaaggttgtttccgttgccgatgcttcggtagtggaattggaaaagcggctatccaaaagaagcagaagaatacttgacgaagaagacgattacttgacccctcggccgatctga

SEQ ID NO: 28730 - protein, 198 aa, Unknown
  Obtained from environmental sample
  misc_feature (1)..(198): Xaa is any amino acid
MLYMSELIRKNKKVAIVYNIMNNKSEILMEVSPKFPVFYLHGCRNENIVPGLENALEGHKEGDVFSVELPFELTFGPYDKKLVMEVSKEELSSFIDDFWVGGYIERFDYDDFEEMSEADRFWKEMEDQHQPEGFVIREIRKDTVILDGNHQYAGMDLIFNVKVVSVADASVVELEKRLSKRSRRILDEEDDYLTPRPI

SEQ ID NO: 28731 - DNA, 942 bp, Unknown
  Obtained from environmental sample
  misc_feature (1)..(942): n is a, c, g, or t
atgaccgccccgattattgataccgataccagggagctttacggctttgtgggggttggggttgaccttaggtccatacaggaacacattgaaagcctggcgccctatggtaccggcaaagtacagtttatcagttccgacggcattgttgtggccgatagagatataagtaaaatcggcgggaacttccacgatgtttcagcagaccttataggtcctcaaggcataaaggatttagaggattcattagccaccggaaactaccatcagattttatataacgggaatatagtggtaacttatcctgttcatgtgggaaccaccaaaacatattggtcgcttgttgttgaagtagatgagaagaccgtattggcgggagtgtacaatatgcggatatttaccattattttcgctttggttatggttcttattgcctctgcaattgttttcgtcataatcgtctatgcaatgaaaccaattgaaaaggtggtagtctaccttagaggtattgtcgaaaccggcagttcccaaaatctggatctgaccaaatcattgacggttaaaagcaatgacgaaatcggcgaattgtccaagcgtcttaatcagacttttgaggcaatcggcgatcttgtacgaaaaatgaaatacaaggtcaacgcgcttaccaataccggccatgaactttcttccaatatggcggaaacttccaaagctgtggatcagatttcagtaaattttgacagtattaagggcatgatgggcaagcaggaacagagcgccgccgaagcggataacgcggtgcagcatatccaaaccaacattgacaacctgaatacgttaatagaagaccagtcagacagtattaataaatcatcttccgctattgaggaaatgaccgccaacattcattcggtaaccaacactctgatagaaaacagttaa

SEQ ID NO: 28732 - protein, 313 aa, Unknown
  Obtained from environmental sample
  DOMAIN (134)...(209): HAMP domain
  misc_feature (1)..(313): Xaa is any amino acid
MTAPIIDTDTRELYGFVGVGVDLRSIQEHIESLAPYGTGKVQFISSDGIVVADRDISKIGGNFHDVSADLIGPQGIKDLEDSLATGNYHQILYNGNIVVTYPVHVGTTKTYWSLVVEVDEKTVLAGVYNMRIFTIIFALVMVLIASAIVFVIIVYAMKPIEKVVVYLRGIVETGSSQNLDLTKSLTVKSNDEIGELSKRLNQTFEAIGDLVRKMKYKVNALTNTGHELSSNMAETSKAVDQISVNFDSIKGMMGKQEQSAAEADNAVQHIQTNIDNLNTLIEDQSDSINKSSSAIEEMTANIHSVTNTLIENS

SEQ ID NO: 28733 - DNA, 678 bp, Unknown
  Obtained from environmental sample
  misc_feature (1)..(678): n is a, c, g, or t
atggaagaccaggaagtcggaagccgtgaaatattgcaatccgtgaaccacctgaaagacataaacttatcggtaaaaaaaggcgcggaagatatgttgaaatcgggcgagcatcttaccaggcaaacaggtgatttcattgaaatcagcagagcatcggtaaacggtatgaacgacatagtgaacggggcaatgcatcagatacataccgcggtcacccatgtggatcaaatgagcgccgcgaacaccagaaattttgacgagcttaaagcggaatcggagagattcaaagttagctcaagtgacgagaagaaaaaagttatcgttattgatgatgatgaaccaattctcaccatgtcaaaaggcatgctgggcggtaattatgatgttaccactgttaaatcaggtaaagaggcgctccagttattttaccagggctacacgcctgatttggtattattggatttgaatatgcctgatatggacggatgggaaacttataacagcataaaggctatcagcaacatacaccatgttccgacagcgattttttcatcttcagaagatccgaaggacaaagcgcaagcgcagaaaatgggagcagccgatttcataaagaaacctcttaataagtctgagatgctggagagggtaggaaaactggtcggaaggagatga

SEQ ID NO: 28734 - protein, 225 aa, Unknown
  Obtained from environmental sample
  DOMAIN (105)...(219): Response regulator receiver domain
  misc_feature (1)..(225): Xaa is any amino acid
MEDQEVGSREILQSVNHLKDINLSVKKGAEDMLKSGEHLTRQTGDFIEISRASVNGMNDIVNGAMHQIHTAVTHVDQMSAANTRNFDELKAESERFKVSSSDEKKKVIVIDDDEPILTMSKGMLGGNYDVTTVKSGKEALQLFYQGYTPDLVLLDLNMPDMDGWETYNSIKAISNIHHVPTAIFSSSEDPKDKAQAQKMGAADFIKKPLNKSEMLERVGKLVGRR

SEQ ID NO: 28735 - DNA, 651 bp, Unknown
  Obtained from environmental sample
  misc_feature (1)..(651): n is a, c, g, or t
atggaaaacccacttgcctcaaacctacacccacgaggttacattcgcgaagaacgcccttcaccctcgttttatattgaagaaacggcgaaggcgctcggtcccgaaacaatcgctgttacggacgtgggtcagcatcagatgtggaccgcccaatttttccccgccgagaagccaagatcgtttatcagttccggcggacttggaacaatgggcttcggtcttggggcggcttgcggagctaaagtagcgaatccccaaaaaaacgtggcgctttttacaggagacggcagtttcagaatgaactgcgccgagatggcaaccttaagcaacaataaaatcccgcttttgataatcgtctttaataacggagtcctcggcatggtaaggcaatggcagagtttcttttacgaaagccgttactctgaaacgactcttggttcataccccgactttttaaaactctgcgaagcgtacggcattacaggtttccgcgccgtaaacagggaatcctttaaaaaagccctccacgccgccgccgcggaactatccgccggaagagcagcgctcatagaagccgacatagaccgcgatgagaatgtccttcccatggtcccttcggggaaaccgatagatgaacagatactataa

SEQ ID NO: 28736 - protein, 216 aa, Unknown
  Obtained from environmental sample
  DOMAIN (42)...(193): Thiamine pyrophosphate enzyme, C-terminal TPP binding domain
  misc_feature (1)..(216): Xaa is any amino acid
MENPLASNLHPRGYIREERPSPSFYIEETAKALGPETIAVTDVGQHQMWTAQFFPAEKPRSFISSGGLGTMGFGLGAACGAKVANPQKNVALFTGDGSFRMNCAEMATLSNNKIPLLIIVFNNGVLGMVRQWQSFFYESRYSETTLGSYPDFLKLCEAYGITGFRAVNRESFKKALHAAAAELSAGRAALIEADIDRDENVLPMVPSGKPIDEQIL

SEQ ID NO: 28737 - DNA, 783 bp, Unknown
  Obtained from environmental sample
  misc_feature (1)..(783): n is a, c, g, or t
atgagcctcgacatattcggcgagcggctggacatccatacaggcggcattgacctagtcttcccgcaccacgagaacgagatagcccagagcgagggtctgctgggcaagccatgggtgggcgtctgggtgcacggcgaacacctgatggtggagggcgagaagatgtccaagtcgctgggcaacttctatacgctcagggatctgcgccaaaagggcgttgaccccattgccttccgcttcgccgtgctgtcgaaccactaccggaagcagtacaacttcacgctcgatggcataaaggcgtccgaggccgcgctccggcgcgtgcgcgcgttcagacgccgaatggaggacgcaaacgccattggcggcggaggcggattcaaagagcccgttgaccccgtggagcgtgttggccgcgcaagacaggagttttgggacgccatccaggacgacctgaacacgcctgaggccctagcggccgtattcacgcttgtgacagacctcaacgcccaggacgaccgaacgctcctgacacccgcagagcgcggcgcggcactggctttcttggacgagacagacgccatttttgcctgctggccctccgagaccgcggtccaaggcgcacctgtcgaagagatagagtccctgatagaggcccgcagggcggccaagcagagcaaagactggaccgaggccgacaggataagggacaggctgaaggctatgggcgtgacgctggaggacaggaaggacggcagcgtggcgtggcggattggatga

SEQ ID NO: 28738 - protein, 260 aa, Unknown
  Obtained from environmental sample
  DOMAIN (1)...(104): tRNA synthetases class I (C) catalytic domain
  misc_feature (1)..(260): Xaa is any amino acid
MSLDIFGERLDIHTGGIDLVFPHHENEIAQSEGLLGKPWVGVWVHGEHLMVEGEKMSKSLGNFYTLRDLRQKGVDPIAFRFAVLSNHYRKQYNFTLDGIKASEAALRRVRAFRRRMEDANAIGGGGGFKEPVDPVERVGRARQEFWDAIQDDLNTPEALAAVFTLVTDLNAQDDRTLLTPAERGAALAFLDETDAIFACWPSETAVQGAPVEEIESLIEARRAAKQSKDWTEADRIRDRLKAMGVTLEDRKDGSVAWRIG

SEQ ID NO: 28739 - DNA, 453 bp, Unknown
  Obtained from environmental sample
  misc_feature (1)..(453): n is a, c, g, or t
atgaacaaaatcatcgcactacttctcctctgcaccgctctctttgcccagcaaaaaggcaccttcaccgatacgcgagacggtaaaatatacaaaacaacaaaaatcggcgagcaggtttggatggcggaaaatttgaattatgaggtggaaggtagcagatgttatgacaataaacctgacaactgcaaaaaatacgggaaattatataattgggaaatggctatgaagatttgcccaagcggttggcatttgccaagcaaagaggaatgggatgtattggcagcagaggttggcggcgaaaaaatagcaggcaagtaccttaaagctgctaacggatggcaaatgaatggcaacggcaatgataagtacggattttccgccctgccgggtggctcctatacttatggtgtatatgccatcaatggctactttcctggcgacttttcttga

SEQ ID NO: 28740 - protein, 150 aa, Unknown
  Obtained from environmental sample
  SIGNAL (1)...(16)
  misc_feature (1)..(150): Xaa is any amino acid
MNKIIALLLLCTALFAQQKGTFTDTRDGKIYKTTKIGEQVWMAENLNYEVEGSRCYDNKPDNCKKYGKLYNWEMAMKICPSGWHLPSKEEWDVLAAEVGGEKIAGKYLKAANGWQMNGNGNDKYGFSALPGGSYTYGVYAINGYFPGDFS

SEQ ID NO: 28741 - DNA, 486 bp, Unknown
  Obtained from environmental sample
  misc_feature (1)..(486): n is a, c, g, or t
atgcatctctatcacggtggaacagaagttatagaaaagccagaagttcgcattgcgaaccgccctgttgattttggagacggtttttatacaacttccgattttgagcaagcatctaatttcgctaaattaagagctgattttagaaaagtagattttggaattgtgaatagttacgaaatagacgaaaaactttttgccaccttttctgttttaaaatttgaaaacccaagcgaagaatggtttgattttgttatagattgtcgtagaggtggcaagctatttgaaaaatatgatttgattataggtccggttgcaaatgatagagtatttagagttttagatttttacgaagccggagtatatacaaaggctcacgctattaatgagcttttaccttacaagttatcaaaccaatatgctttttttaataaagatctagtttccaatttgaaattcataaaatatacagaggttaaaaaatga

SEQ ID NO: 28742 - protein, 161 aa, Unknown
  Obtained from environmental sample
  misc_feature (1)..(161): Xaa is any amino acid
MHLYHGGTEVIEKPEVRIANRPVDFGDGFYTTSDFEQASNFAKLRADFRKVDFGIVNSYEIDEKLFATFSVLKFENPSEEWFDFVIDCRRGGKLFEKYDLIIGPVANDRVFRVLDFYEAGVYTKAHAINELLPYKLSNQYAFFNKDLVSNLKFIKYTEVKK

SEQ ID NO: 28743 - DNA, 861 bp, Unknown
  Obtained from environmental sample
  misc_feature (1)..(861): n is a, c, g, or t
atggtaattaagataaacgctcctgttacaaatataaataatcaggtttacaataataatgttaacctcaaaaatacacaggttaacaaaaaaaaacaatatttacgaactctgaactccgattccaaatctccgatccctgtttcctgttccccattccctgttcccatcctttggcaaggttcaggcataattgttttcaacaaaccgcagggactttccacgcacggaccggccagccttgacagcattgttaatgcctggttaggcagtaccctgccccgctctctatcattcaagcccggccccttgcaccgcctggacaaaccgacatcgggcgccattgctttctcgcaaacgcttgaaggcgctaaactttttagcgctttacttagggaacggaaactggagaaatcctatattgcgattgtagagggctgtattgagcaagaagaatcatggcgcgacacactggagcatgataaaaacgcgcgaaaatcactcgttaatcccccactcccgactcccgaccccccactccctactcccaaacaagcccttaccaccgtcaaaacactggcttcaaacggcagctattccctgattgaagcgcggattaaaacaggcagacaccaccagatacgcgcccaggctgcggcgcacgggcatcctctggccggggataccaagtacggcgcaagccccttacccggccaaacgcgaggaggcagttatttcctccatgcctggaaaataatgtttaatgagtgtccggacggactaccccgagagattatcgcgccgcttcccgaagcgttccggtcgcggataacggagttgtttgggaaatgtaaatactaa

SEQ ID NO: 28744 - protein, 286 aa, Unknown
  Obtained from environmental sample
  DOMAIN (63)...(220): RNA pseudouridylate synthase
  misc_feature (1)..(286): Xaa is any amino acid
MVIKINAPVTNINNQVYNNNVNLKNTQVNKKKQYLRTLNSDSKSPIPVSCSPFPVPILWQGSGIIVFNKPQGLSTHGPASLDSIVNAWLGSTLPRSLSFKPGPLHRLDKPTSGAIAFSQTLEGAKLFSALLRERKLEKSYIAIVEGCIEQEESWRDTLEHDKNARKSLVNPPLPTPDPPLPTPKQALTTVKTLASNGSYSLIEARIKTGRHHQIRAQAAAHGHPLAGDTKYGASPLPGQTRGGSYFLHAWKIMFNECPDGLPREIIAPLPEAFRSRITELFGKCKY

SEQ ID NO: 28745 - DNA, 330 bp, Unknown
  Obtained from environmental sample
  misc_feature (1)..(330): n is a, c, g, or t
ttgcgccccagcattttgatcatccacaccggagggactcttgggatggccgccgccagcggctctcagggtttggcccctgggccgtttttggacaggctgctggaccatttgccggagctgcgagagatcgctgacctagagctagaagttccgttcaaccgtgacagctcctcgttggagcctagcgacattttgcagatagcgggccacatccgcgaccgccactcaaaatatcaaggcgtggtggtgatccatggcaccgacacgatggccttcactgcgtccgtgctgggcttcactctgtcggattctcgtgccgaattctga

SEQ ID NO: 28746 - protein, 109 aa, Unknown
  Obtained from environmental sample
  SIGNAL (1)...(24)
  misc_feature (1)..(109): Xaa is any amino acid
MRPSILIIHTGGTLGMAAASGSQGLAPGPFLDRLLDHLPELREIADLELEVPFNRDSSSLEPSDILQIAGHIRDRHSKYQGVVVIHGTDTMAFTASVLGFTLSDSRAEF

SEQ ID NO: 28747 - DNA, 432 bp, Unknown
  Obtained from environmental sample
  misc_feature (1)..(432): n is a, c, g, or t
atgaatgggataaggatctgggggggtttttttaatccgttagggggcctttgttcccatctttatgtctgtgattccaacgggctaaaacggttttcccgcctacgggagtttgacgtttttaaggaagccttttttgcgcgggagccctattcctttaaggaagtgctttttgcggacatggctgaatatttaacaaaccgacctctgttagacgaaaggatcattgcctttataaatgaagtgaacgataaagacctggactctcttttaaagtacagcgattccagtggaaacctgtacgaaaagaactttggcggccttatcatgcacagttttaaccacgacacccatcatcggggcatgatctcgttatgcctggaaatgctgggccgggaaaacgattttgcttctttcaacgccgtcctctag

SEQ ID NO: 28748 - protein, 143 aa, Unknown
  Obtained from environmental sample
  misc_feature (1)..(143): Xaa is any amino acid
MNGIRIWGGFFNPLGGLCSHLYVCDSNGLKRFSRLREFDVFKEAFFAREPYSFKEVLFADMAEYLTNRPLLDERIIAFINEVNDKDLDSLLKYSDSSGNLYEKNFGGLIMHSFNHDTHHRGMISLCLEMLGRENDFASFNAVL

SEQ ID NO: 28749 - DNA, 747 bp, Unknown
  Obtained from environmental sample
  misc_feature (1)..(747): n is a, c, g, or t
atggaatgtggggtttgcataaatcaatgcccaatgtcaaaggacagctcaaagccaactgccctttcatggaaatcttacgccgacgatccggcttaccacgaggagcaggcaaaagcatggtattacttcctttcactgccggaagtgcccgccgcagaactcaatcttggcacccagaagggtcttgcgtataaaaggccgctttttgaattctccggtgcgtgcggcggctgcggcgagacgccctatgttaagctcgtaacccagctttttggcgacaggatggtcatggcgaacgcaaccggctgttcttccatttacggcggcaacctgcccaccactccgtattgccaaagggcggacggaaggggcccggtgtgggcaaacagcctgtttgaagacgccgctgaatttggtatgggcatgaggcttacaagcgacaaactcgccttacacgcccatgaaatcgcggataaggcaaaatccgaaggaattgccgttgccatcattgacaagattctggcaaacgaccaaaaagatgatgacgctatagaaacccagcgcaaaaacgtggacgagttaaaagcggccctcaagaacgattccaaaccgacggcaaagctgctactctccctggcagatttctttatcaaacggtcggtgtggattctcggcggcgacggctggggctacgacatcggcttcggcgggcttgaccacgttatcgcttccaccggaacgtga

SEQ ID NO: 28750 - protein, 248 aa, Unknown
  Obtained from environmental sample
  misc_feature (1)..(248): Xaa is any amino acid
MECGVCINQCPMSKDSSKPTALSWKSYADDPAYHEEQAKAWYYFLSLPEVPAAELNLGTQKGLAYKRPLFEFSGACGGCGETPYVKLVTQLFGDRMVMANATGCSSIYGGNLPTTPYCQRADGRGPVWANSLFEDAAEFGMGMRLTSDKLALHAHEIADKAKSEGIAVAIIDKILANDQKDDDAIETQRKNVDELKAALKNDSKPTAKLLLSLADFFIKRSVWILGGDGWGYDIGFGGLDHVIASTGT

SEQ ID NO: 28751 - DNA, 510 bp, Unknown
  Obtained from environmental sample
  misc_feature (1)..(510): n is a, c, g, or t
atgtcaaaagcaaccccggtaggcgctatcgccaagttcgccaacgccggaaaggaaattacaaagaaagacctgggcgcgatagcgatgagttacggttatgtgtatgtcgccaagatttcactgggcgctgacatgaaccagacgatcaaagctttccgcgaggctgagtcatacaacggcccctcgcttatcatcgcctactcgcactgtatcaaccacggtatcgacatgagcaagggacttgagcacggcaaggcggtagtcaccagcggcctgtggcccctgttccgctacgaccccaggctcaaagaccagggcaagaaccccttccagcttgactccaaggaaccctccaccagcattgaggatttcatgtacagcgaagtccgcttcaagagcctcaaggcggccgaccccaaccgcgccgacagactgcttaaaatagccaaggacaaagccgagcgcacctggaaagagtacaagtacctggcggacagaccgttctaa

SEQ ID NO: 28752 - protein, 169 aa, Unknown
  Obtained from environmental sample
  misc_feature (1)..(169): Xaa is any amino acid
MSKATPVGAIAKFANAGKEITKKDLGAIAMSYGYVYVAKISLGADMNQTIKAFREAESYNGPSLIIAYSHCINHGIDMSKGLEHGKAVVTSGLWPLFRYDPRLKDQGKNPFQLDSKEPSTSIEDFMYSEVRFKSLKAADPNRADRLLKIAKDKAERTWKEYKYLADRPF

SEQ ID NO: 28753 - DNA, 825 bp, Unknown
  Obtained from environmental sample
  misc_feature (1)..(825): n is a, c, g, or t
gtgagccttagggaatttgtcgccagggttgtggaaaactggcctgcaaaggtattgtcgctggctttagctatatttttactgatttatcaccggatgagccttcttgaaacgaggattttttttacccccatagttattgaacaattaaacgcgatgatgccttcaagtccctatccgcgaattgtaaagatcagccttaaaggagaaggccaaaaccttaattcaattctggaagaagatatagaagcctatgttaattttaaggatattaaaacttccggaacatataaggttccggtattatggcgtaagaaaggcaccgctcagggtgtggagcccctgcaaatatccgttgatcccatggagataactttttcattggatcataaaatcagcaaatttgtccccattgccgtgaatttcaccgggcaggtggaatcaggctacaatatgaattcttattctattgaaccgaatcagattgtggtcgaaggccccgcaaccctgatgggaggcctctcggaacttcagacagaggttattgatctcagcgggcgcaggagtgatttttccgtaaccgcttcaattttgcacaacgatcccctcgttgtgatccggggggacggatacgtaaatttctccgcttccgtcagccagattattctagtaaggaatatttccaatgtcccgattaccgtaatcggtctggacgaacaatttatcatggaaccggcggtagtaaccgccaatgttcatattgaaggggcggacggcaaaattgtggaagcattcagaccatcaggccgaatttttgaaaattga

SEQ ID NO: 28754 - protein, 274 aa, Unknown
  Obtained from environmental sample
  DOMAIN (136)...(234): YbbR-like protein
  misc_feature (1)..(274): Xaa is any amino acid
MSLREFVARVVENWPAKVLSLALAIFLLIYHRMSLLETRIFFTPIVIEQLNAMMPSSPYPRIVKISLKGEGQNLNSILEEDIEAYVNFKDIKTSGTYKVPVLWRKKGTAQGVEPLQISVDPMEITFSLDHKISKFVPIAVNFTGQVESGYNMNSYSIEPNQIVVEGPATLMGGLSELQTEVIDLSGRRSDFSVTASILHNDPLVVIRGDGYVNFSASVSQIILVRNISNVPITVIGLDEQFIMEPAVVTANVHIEGADGKIVEAFRPSGRIFEN

SEQ ID NO: 28755 - DNA, 633 bp, Unknown
  Obtained from environmental sample
  misc_feature (1)..(633): n is a, c, g, or t
atggccgagatgccgggatttttcgtgtttctcagcgggtacattgaatattttcctttggccgctctcatctgtctgctgttggctggctgcaatatcccgatatcggaagatcttattataattacgggcgcacttttaagccaggaaaaaccttccattctggtatctaaccttatcgcgatttacattggggttattgccagtgattttatggtttactggattggaaccagggtacggaagggaagggcgaaaagcagctttttttccgacctgattccggaaaaggcaatagaaaaaatgcgcaataaactggacaagtatggcatttttacctttattgtctgccgctttatcccgttcggtgtaaggaacacccttttttttacttccggtttttctaacctgcacttgagggtttttgccctttacgacatcattgccgccatgatcagcgtaaacacgctttttttccttgcgtattttttgggcgattccgtaagaagaccaatgaaaatagccggccttgttctttttattttacttgtctccggcgttataatgctgtttgtacgcataattgttttgtggaaaagaaaaaaagcggagactcagaaaagtactgaataa

SEQ ID NO: 28756 - protein, 210 aa, Unknown
  Obtained from environmental sample
  misc_feature (1)..(210): Xaa is any amino acid
MAEMPGFFVFLSGYIEYFPLAALICLLLAGCNIPISEDLIIITGALLSQEKPSILVSNLIAIYIGVIASDFMVYWIGTRVRKGRAKSSFFSDLIPEKAIEKMRNKLDKYGIFTFIVCRFIPFGVRNTLFFTSGFSNLHLRVFALYDIIAAMISVNTLFFLAYFLGDSVRRPMKIAGLVLFILLVSGVIMLFVRIIVLWKRKKAETQKSTE

SEQ ID NO: 28757 - DNA, 600 bp, Unknown
  Obtained from environmental sample
  misc_feature (1)..(600): n is a, c, g, or t
ttggcatttaaaagcggcttcgattaccgctttatctatcttgattccacggatatcggcagccgtgaccgccacgacgggggaatctatctaaccgctgaattcaaacctgtaagtcaatttatgataattccctccttaaaagccgtgtttacaaacaaaggcggcgcgcttttaaccgcagtcccgaaacttggtttgctttggaatttaaatgattcgcttgctctcagaaacaactatttccgcagtttcaagtttcccgattttgaggaactttactggagcgacggcggctcggcttttggaaatgccggtaatcccgatctaaaacccgaagacggctggggagcggatatcggtttttcatggcgttataaacatttaattaattttgaaagcacattttttacccaccgcttaaaagattcgattcactggtatcagggtgccaacggcatctggcgtcctgaaaatatcggagacgcgatgtttttcggccttgacaacaaactgcgttttgaaatcccggttaatttcggaaaaataaaaaaaattatcccctcagtttcgtatcagtatcttttagttatctggtaa

SEQ ID NO: 28758 - protein, 199 aa, Unknown
  Obtained from environmental sample
  misc_feature (1)..(199): Xaa is any amino acid
MAFKSGFDYRFIYLDSTDIGSRDRHDGGIYLTAEFKPVSQFMIIPSLKAVFTNKGGALLTAVPKLGLLWNLNDSLALRNNYFRSFKFPDFEELYWSDGGSAFGNAGNPDLKPEDGWGADIGFSWRYKHLINFESTFFTHRLKDSIHWYQGANGIWRPENIGDAMFFGLDNKLRFEIPVNFGKIKKIIPSVSYQYLLVIW

SEQ ID NO: 28759 - DNA, 1635 bp, Unknown
  Obtained from environmental sample
  misc_feature (1)..(1635): n is a, c, g, or t
atgcgttttggtatatgcaaagccgggaatttttttccggctttaatactatttttattttctctctttttcccaaacaccgtaaaaggacagtccgccgaaaatgacgccgaactttccttttatgacgaggaaggcataaccgttaccggaaccgttcaaaccagtcagcagatggcagtcatcaataaagatgaaattgagcgccgtaacgctcctgacattgcggctcttctgcgggatacgcttgctcttaacatcaccggttacggggcttacggaaatatgacccttcttaacctgcgcggtcttgattcaaaacggcttgcgtttttaataaacggagtccccgtaaattcttcttcggacggaaaatttgacattgagcagattgatcttaactcaatcgaacgcatagaagtaatttacggaggttccgataccaaattcaatgtttcaggcgcgatgggcggggtgattaacattgtaaccgtcaaaaaacaaaaacccggactgcggctgggcgcttccgtttccaataccggcgtaatcccaggcgaataccgggggagaaacgggcaaactcaagccccgaattgggaagatttggcggatacccagaagattgatatttccgccgcttacggaggagaaagcgcttcattttcagctaacgcgtttataaaccgagcgcnaaaccatttcttatttaccgatcgctacaaatattccccgccgcaaggacaacaacgaagtatgggacgcgggaggcgctttatctgttacaaaagaaatacgggatatttcaaaattgatttttcgtcaaacttttattacggtgacaaaaacatacccagttccggctttncaaacaatttcggcaatcaacgggatatttcctcgcgtaacaatgtaatgcttgatatgccccgcgcttttcacgatgatcttgcggcggaagcgtctcttggctattcattcaacagaagaaattatacatcgtccgcggatattttttcacgtcacgatcagcagaactttacggtaataaaccgctggagttgggaaacaaatgacaagctgacgctaaaaagcggctttgattaccgctttatctatcttgattctacggatattggcagacgtgaccgtcaagatggcggaatctatttgaccgctgaatataaacctgtaaatcaatttatgttaatcccctctgtaaaaaccgtgtttacaaacaaaggcggcgcgctctttaccgcagtccctaaactgggcttgctttggaatgtaaatgattcgcttgctttcagaaacaactatttccgcagtttcaagtttcccgactttgaagaactttactggagcgacggcggcgcggcttttgggaatgtcacagccttcggcagtgtcggcaaccccgatctaaaacccgaagacggctggggagcggatattggaataatatggcgttataaacatttaattaattttgaaagcgctttctttacccaccgtttaaaagattcgatacactggtatcagagagccaacggcatctggcgtcctgaaaatgtcggagacgctatgttcttcggtctggacaacaaactgcgttttgaaattcacggttaa

SEQ ID NO: 28760 - protein, 544 aa, Unknown
  Obtained from environmental sample
  DOMAIN (51)...(159): TonB-dependent Receptor Plug Domain
  misc_feature (1)..(544): Xaa is any amino acid
MRFGICKAGNFFPALILFLFSLFFPNTVKGQSAENDAELSFYDEEGITVTGTVQTSQQMAVINKDEIERRNAPDIAALLRDTLALNITGYGAYGNMTLLNLRGLDSKRLAFLINGVPVNSSSDGKFDIEQIDLNSIERIEVIYGGSDTKFNVSGAMGGVINIVTVKKQKPGLRLGASVSNTGVIPGEYRGRNGQTQAPNWEDLADTQKIDISAAYGGESASFSANAFINRAXNHFLFTDRYKYSPPQGQQRSMGRGRRFICYKRNTGYFKIDFSSNFYYGDKNIPSSGFXNNFGNQRDISSRNNVMLDMPRAFHDDLAAEASLGYSFNRRNYTSSADIFSRHDQQNFTVINRWSWETNDKLTLKSGFDYRFIYLDSTDIGRRDRQDGGIYLTAEYKPVNQFMLIPSVKTVFTNKGGALFTAVPKLGLLWNVNDSLAFRNNYFRSFKFPDFEELYWSDGGAAFGNVTAFGSVGNPDLKPEDGWGADIGIIWRYKHLINFESAFFTHRLKDSIHWYQRANGIWRPENVGDAMFFGLDNKLRFEIHG

SEQ ID NO: 28761 - DNA, 495 bp, Unknown
  Obtained from environmental sample
  misc_feature (1)..(495): n is a, c, g, or t
gtgtacgaaacggccatctcatacaacccgcggagctacgaggagggcaagaaaatcggctggaaagacggcgttcgcgccttatactgcctgcttcactacggagcccatacatcgccgcttccgatgcaacttattctgtacctctttataggcggcgtatcgttattcgcaaacgtgatatgtttcgggataggaaactacgccgggcttccgctgaatgtttctatcgtctccgcgttcatcttagcggcagcggtcaattatatactatgcatcctgatcttgttccagcacaattcgcggtggaataatgccggtgaactatcgttctatttgctgtcgatcacgataatgggcgcattggattacggactgacgcacggactaattgcgctgtcgtgcggggcactggtgtccaaattcgtagcctcgcttgccgggtttgtcggaaactttgttttaaggcgatggttggtatttccggagaattaa

SEQ ID NO: 28762 - protein, 164 aa, Unknown
  Obtained from environmental sample
  DOMAIN (47)...(161): GtrA-like protein
  misc_feature (1)..(164): Xaa is any amino acid
MYETAISYNPRSYEEGKKIGWKDGVRALYCLLHYGAHTSPLPMQLILYLFIGGVSLFANVICFGIGNYAGLPLNVSIVSAFILAAAVNYILCILILFQHNSRWNNAGELSFYLLSITIMGALDYGLTHGLIALSCGALVSKFVASLAGFVGNFVLRRWLVFPEN

SEQ ID NO: 28763 - DNA, 1320 bp, Unknown
  Obtained from environmental sample
  misc_feature (1)..(1320): n is a, c, g, or t
gtggccgtgcgcacgcaggttattttcaaattccgggaactggtgaacgcccatttcgaggaactgtccgtgctgcttgccacggaaatgggcaaaaacttggatgaggcgcggggtgacgtcttcaaggtaatcgaagcctgcgagcttgccgtcggcgcgcctttggaactgcaaggccattcgttgatggaggctaccagatcccacgacatcgtccagtaccgggagcctgtcggcgtttttctgggcattgccccgtacaacttcccggcgatgattcctttcggctggtttattccttcctgtatcgtgtccggcaattgcatggtgctcaaggccgccaccatggttccccagaccggcatgcgtctgcttgagctgcttatcgaggcgggtctgccgaagggtgttgtcacgctgataacctgtagccgggaagaactgacggccctgttggaacacaaggatattgacggcatcagctttgtggggtcggaatccgtcggcaaaaaaatttacgccgcggccgcgcttgccggcaaaagagttcaatgcctggtggaggccaagaaccacgcccttatcctggaagacgcccccctggaatggacggcgcgcagggtgatcaactccgctttcggctgcgcgggtcaacgctgcatggcccttccggcggtagcggtacaggagagcatcgcggataaactggttgctgctattgcggaaaaagccaggcagatcaaagtcggtccggcttatgagaaaaccaccattatgggtccagtagtaaatgcggggcacaaaaaatttgtagaggactggatacagaagggcatagacgaaggcgctaaagttgtactcgacggcaggaattacaaggtaccagggtatgaaaacggcttttacataggcccgacgattctggatcatgtaaatccggagatgaccataggtgacagcgaagtctttgggccggtactttgcgtaaagcgggtaaaaaattttcaggaagggctcgcgcttatgaacgccaacccctttgccaacggttcggttatctttacacaaaacggctactatgcccgcgaattcgcccgaaacaccgacggtggtatggtaggaatcaacgtaggcattccggttcctgtcggtatgttccccttcaccggtcataaggaatcatttttcggcgatctgcattgcctgggtaaagacggctatcggttctacaccgaaaccaaggcggttacttaccgctggtttgacgaagaagaaatgaaaaaagaaaaagttagtacctgggacggtatgatgtaa

SEQ ID NO: 28764 - protein, 439 aa, Unknown
  Obtained from environmental sample
  DOMAIN (2)...(417): Aldehyde dehydrogenase family
  misc_feature (1)..(439): Xaa is any amino acid
MAVRTQVIFKFRELVNAHFEELSVLLATEMGKNLDEARGDVFKVIEACELAVGAPLELQGHSLMEATRSHDIVQYREPVGVFLGIAPYNFPAMIPFGWFIPSCIVSGNCMVLKAATMVPQTGMRLLELLIEAGLPKGVVTLITCSREELTALLEHKDIDGISFVGSESVGKKIYAAAALAGKRVQCLVEAKNHALILEDAPLEWTARRVINSAFGCAGQRCMALPAVAVQESIADKLVAAIAEKARQIKVGPAYEKTTIMGPVVNAGHKKFVEDWIQKGIDEGAKVVLDGRNYKVPGYENGFYIGPTILDHVNPEMTIGDSEVFGPVLCVKRVKNFQEGLALMNANPFANGSVIFTQNGYYAREFARNTDGGMVGINVGIPVPVGMFPFTGHKESFFGDLHCLGKDGYRFYTETKAVTYRWFDEEEMKKEKVSTWDGMM

SEQ ID NO: 28765 - DNA, 1092 bp, Unknown
  Obtained from environmental sample
  misc_feature (1)..(1092): n is a, c, g, or t
atgaagaaaaaagtgatgctcattgacgacaacacgacaaacntgcaggtgggcaaaagcgcactcagcgacatctatgacgtgttgacggtcaattcaggagagaaggccctgcaattgcttgaaaaggtggttcccgacttgatactgctggacatcgaaatgccagggatgaatggtttcgagacaataaatcggatcaaagacagggaatgcttggcaagcatcccggtggttttcctaacggcaatggacggcaccggcagcgagctggcaggactgaacttgggtgcggtggactatatacataaaccattttctcctcccctgctccaaaagagaatagaactccacctcatgctccaagagcaacgggagcgtctagctgaccaaaacgcccgcctgctggaattcaaccaaaacttgcagtcattggttgaagtaaaaaccgaaaagatagtcaagcttcaagacgtgttcatcgagacattcgcagagatggtggaatccagagacgacactaccggcggacacattgtcagaacccagctctatgtgagagccctagtggaaaaaatggtcaaagagcgcgtctatccgaataccatcgaagaaaaggacatcgagcatatagtgaggtcgtcccaactgcacgacgttgggaagattatcatcccggacagcatcctcaaaaagcctggaaggctgaccgaccatgaatttgagctaatgaagcgacacaccgtaatcggcatggagacgatctccaagatagccagcagggcagaagaaagcgattttttgaaacacgcccagatcatggcccacagccaccacgagagatgggacggcaatggctatccgctggggctgtcaggcgaaaatatcccgatccaaggcagattgatggccatagcagacgtgtacgatgctctggttacggcgaggccgtacaaaccagcctttgaacacgaaatggcgaccggaatcataatcgcaggcaagggcagccagttcgacccgctgctgggcgagctttttgaagacctttccacagaattcaaagagatagcaaagagaacaatccgatga

SEQ ID NO: 28766 - protein, 363 aa, Unknown
  Obtained from environmental sample
  DOMAIN (175)...(312): HD domain
  misc_feature (1)..(363): Xaa is any amino acid
MKKKVMLIDDNTTNXQVGKSALSDIYDVLTVNSGEKALQLLEKVVPDLILLDIEMPGMNGFETINRIKDRECLASIPVVFLTAMDGTGSELAGLNLGAVDYIHKPFSPPLLQKRIELHLMLQEQRERLADQNARLLEFNQNLQSLVEVKTEKIVKLQDVFIETFAEMVESRDDTTGGHIVRTQLYVRALVEKMVKERVYPNTIEEKDIEHIVRSSQLHDVGKIIIPDSILKKPGRLTDHEFELMKRHTVIGMETISKIASRAEESDFLKHAQIMAHSHHERWDGNGYPLGLSGENIPIQGRLMAIADVYDALVTARPYKPAFEHEMATGIIIAGKGSQFDPLLGELFEDLSTEFKEIAKRTIR

SEQ ID NO: 28767 - DNA, 432 bp, Unknown
  Obtained from environmental sample
  misc_feature (1)..(432): n is a, c, g, or t
gtgcttgaggccatgcgtgatgcgcgcactgccgttggcgttgaagcaatgcttgcggaaaattttccttgcaacgcgttgtccttgatgaatcccgcggcgaaatccgtcccgcccgaaggaagcttgcccgtccctgcccagggagtgccgctccagcttatcgaacagcaaggcagggcgctggaaggcatagcttccgcgctggctttgcttgtgcgcaggcaggaggatctggaggagttggcgcaacaggcccgtaccgcgcaagaggaaagtagaatcctgcgcgacgaggtcgcccgcctgcgcgtggtgatggatagcgccgagaagctgcatcagcaggatctggatcaactccgcaactggcttggccgtttgatacgcatccagtccaacgccgccgcatccgccgcatccgctgcctga

SEQ ID NO: 28768 - protein, 143 aa, Unknown
  Obtained from environmental sample
  misc_feature (1)..(143): Xaa is any amino acid
MLEAMRDARTAVGVEAMLAENFPCNALSLMNPAAKSVPPEGSLPVPAQGVPLQLIEQQGRALEGIASALALLVRRQEDLEELAQQARTAQEESRILRDEVARLRVVMDSAEKLHQQDLDQLRNWLGRLIRIQSNAAASAASAA

SEQ ID NO: 28769 - DNA, 393 bp, Unknown
  Obtained from environmental sample
  misc_feature (1)..(393): n is a, c, g, or t
gtgaaggttctcttcaagcatatgccgcacggcaaagacaacgcttcgcgcctggcggcggagtattttgtggccgcctcgttccagaataatcgcgctccctggctcttgcacaacagcttttttgccgaaccggagaagctctccgcagaagcgcaaagctttaccgccaaagcggcggatcaggccggactggacatgaagaaactgaatgcggatctcaagagcaaaaagaccgccgcgattattgaagaagaccaggccgatgccaaaaggctcgctattgaaggcacaccctattttctggtcaacaatctcacgatacgcggagctgttccctacgacatattgaatgccgctgtggacatggccctgacggaagccagaaaataa

SEQ ID NO: 28770 - protein, 130 aa, Unknown
  Obtained from environmental sample
  DOMAIN (1)...(122): DSBA-like thioredoxin domain
  misc_feature (1)..(130): Xaa is any amino acid
MKVLFKHMPHGKDNASRLAAEYFVAASFQNNRAPWLLHNSFFAEPEKLSAEAQSFTAKAADQAGLDMKKLNADLKSKKTAAIIEEDQADAKRLAIEGTPYFLVNNLTIRGAVPYDILNAAVDMALTEARK

SEQ ID NO: 28771 - DNA, 1053 bp, Unknown
  Obtained from environmental sample
  misc_feature (1)..(1053): n is a, c, g, or t
gtggtgatcgtcgccagcgtctcgtgcatatacgggatagggtcgcccgaagcctacgagggggcggcggtcaagttgagcgtagggcaagagtttacccgccgcgactttctgatggcgctctccgatatgcagtacgtgcgcaacgatatgtccctgcagcgcggcagcttccgcgttaagggagacgtcattgaagtccagcccgcctacgaggaggacgcggtgcgtatcgagaccttcggcgataggctggaggccatcagctacatatccccgttaacgggaaaaacaaaacagaagtttgacgaggtgaccatcttcccggctaaacactacatgaccaccggcaacgtgacgatgaagagcgccgtcgaccgcatatcggaggagttggatgaaaggctttcaattctgcgcaaatccggaaagcttgtagaggcgcagcgtctggagcagcggacgcgctacgatatggagatgctgaccgaagtcggctacgtaaacggcatagagaactactcccgcattctcgagggcagggagccgggcacacgtccgtatacattgattgatttcttcaagccgccgtatttgctgatcatcgacgagtctcacgtatcgctgccgcagatacaggggatgtacaacggcgaccgcgcccgaaaggagacgctcgtcgaccacggcttccgcctcccttgcgcgctcgacaaccgcccgctgaagttcaaagagttcgaggggctttccggcaagacgctcttcgtctccgcgacgcctggcgactacgaactggagaagagcggcggcgtcatcgtggagcaggtgatccgccccacgcacctcgtcgacccgcccatagagctgcgccccgccgccaaccaagtagacgacctcatcgatcagctgcgctccacgacggaacgcggcgagcgggcgctggtcaccacgctgacaaagaagatggccgaagacctgaccgagtatctaggctccatagggttgcgcgtacgctacctgcactccgaaatcgacacgttccggccataa

SEQ ID NO: 28772 - protein, 350 aa, Unknown
  Obtained from environmental sample
  misc_feature (1)..(350): Xaa is any amino acid
MVIVASVSCIYGIGSPEAYEGAAVKLSVGQEFTRRDFLMALSDMQYVRNDMSLQRGSFRVKGDVIEVQPAYEEDAVRIETFGDRLEAISYISPLTGKTKQKFDEVTIFPAKHYMTTGNVTMKSAVDRISEELDERLSILRKSGKLVEAQRLEQRTRYDMEMLTEVGYVNGIENYSRILEGREPGTRPYTLIDFFKPPYLLIIDESHVSLPQIQGMYNGDRARKETLVDHGFRLPCALDNRPLKFKEFEGLSGKTLFVSATPGDYELEKSGGVIVEQVIRPTHLVDPPIELRPAANQVDDLIDQLRSTTERGERALVTTLTKKMAEDLTEYLGSIGLRVRYLHSEIDTFRP

SEQ ID NO: 28773 - DNA, 921 bp, Unknown
  Obtained from environmental sample
  misc_feature (1)..(921): n is a, c, g, or t
atgaatatgaaacttatctttttgctaaggaaaaatatttttacggctctttttgtatttattgtcggggtttcactgtatgcacaaagcggcggaaacactgcattaataggcaaatgggctttagtggaaggccctactcgcaataatccggaaaacatggagctatgggctgatggaactggcatcgttgatagagcagaaattagttggaggacagcagagggtcgtttttatcttacccatccattactgacagcatcatggagttatcaagtatcaggtacaacacttacatttactgataataatggcacaattttgaaatataacaaaatgtcaaattcatcttcccaggagtatgaccctgaaagcgtatttagggcggagccggtgagcggcggcgactcggtacggattaccggttaccagggaagcaaatgggcagtccgtatcccgccgagcatacaggatttacccgttacccatatctggcttggagcatttcgcaatagaaaactgaccagcgttaccattcccaacagcgttaccaacattttggatacggcgtttgccgacaaccaactgaccagcgttatcatacccgacagcgttacttcccttgggcgtggggtatttgcgaataaccgactgaccagcgttactattcccaacaacgtaacttccattggggattcggcatntgcgaataaccaactgaccagcgttactattcccggcagcgtaacttccattggggactgggcatttcgtaataaccaacttatcagcattaccatcggcgctaatgtcaagattgaaaacgactcgttttcaggagagtttttcgacttttacaacgcgcaggagcaaagggcgggaacctatacctacagtaacgacaagtggagtatacactag

SEQ ID NO: 28774 - protein, 306 aa, Unknown
  Obtained from environmental sample
  misc_feature (1)..(306): Xaa is any amino acid
MNMKLIFLLRKNIFTALFVFIVGVSLYAQSGGNTALIGKWALVEGPTRNNPENMELWADGTGIVDRAEISWRTAEGRFYLTHPLLTASWSYQVSGTTLTFTDNNGTILKYNKMSNSSSQEYDPESVFRAEPVSGGDSVRITGYQGSKWAVRIPPSIQDLPVTHIWLGAFRNRKLTSVTIPNSVTNILDTAFADNQLTSVIIPDSVTSLGRGVFANNRLTSVTIPNNVTSIGDSAXANNQLTSVTIPGSVTSIGDWAFRNNQLISITIGANVKIENDSFSGEFFDFYNAQEQRAGTYTYSNDKWSIH

SEQ ID NO: 28775 - DNA, 327 bp, Unknown
  Obtained from environmental sample
  misc_feature (1)..(327): n is a, c, g, or t
ttgaatcaaagtacactggacaacaatatccgtgtcattagacgcatcgcgcagatactcaacaagttcaggaattacaaggtaaaggttgaaggccacgcgaatccgactacggcccccggctctgcccgtgtacaggaagaatcatcgctgaaagctctcagtgaaaagcgcgcgggatttgttcttgagcagcttgtccgcaacggcatcgccagaaaccggctttcatttaccggcgccggcggttccatgccggtggttccttatgaggatcattcaggctggtggaaaaacaggcgtgtgactttatctgannttaggtaa

SEQ ID NO: 28776 - protein, 108 aa, Unknown
  Obtained from environmental sample
  DOMAIN (2)...(100): OmpA family
  misc_feature (1)..(108): Xaa is any amino acid
MNQSTLDNNIRVIRRIAQILNKFRNYKVKVEGHANPTTAPGSARVQEESSLKALSEKRAGFVLEQLVRNGIARNRLSFTGAGGSMPVVPYEDHSGWWKNRRVTLSXXR

SEQ ID NO: 28777 - DNA, 1476 bp, Unknown
  Obtained from environmental sample
  misc_feature (1)..(1476): n is a, c, g, or t
ttgcttcacaatctcggcgatctgggattcataaaaaatttcacatgggcgtttgttatgcggaatatgggcatgagctgggcccccacctggtttacgccctggcttggttttacatttgactttatttatattgaaggcaaaggaggaaagccgtctcctctgataatgaatttcgccgccgatgtcggagtcccttccgtcatcgttccggaaaatatcaatgtaattgccaaggcgggaatcaccattaccattcttgaaaaaatcaccctttccgtattatggcccggcgcagcgggctacaatatgcgggaggcaaaagaggatgacggcaaacgcttccagtggctcccctccgtgggaatggggatcaactttataatcccgttcggcggcaaaaggcatggcgaatatcgccttggcgaaaatcgccttggcgaatttcgccttagcgaacggcgtccctctgacggagatataacctttgatgccgcgttcaagcctctgtattacgatgtttacgcgacaggcgcaggagtgacatggtatgcangttacagagacgaccttccgccaaatatcattgttgattatcccgaaactcaatatatttcccccaactatgacggaaagcaggacaatcttttatttcccgtcagaatagcagacgaccattatgtgacaagctggatcatgacaataaaagattcaaacggcaatacagtccgcacgtaccaaaacaaggatcgccggtttgaaatgatggacgcaagggacatttacgggcgttattatctggaaaagaaaggggttgacgttccttcgacgatgagatgggacggcgtctttaacacgggcgaaatcgggccggacggaaaatactatttctccatcagcgcctcggacgaaaacggcaatacgggatacagcccaagctacgaggtaataataaagaacaatccgccgcaagtcactatagacgacataagcctaaatgatcgcgtttttgatccttcgagcgggaacagaagaaccataaatattgttccgcacggcactatagaggataaatgggaaagcggcatttatgacgcggaaggaaaactgatacggacattcgaaccaaacagcggaagcccgcagccgcaaacatgggacggtagaaccgactcaggcgcgtttgctccggacggcgcatatactttcaaaatatcggccacagacatagcgggaaacacaggttccgctgttatgagcaatattgtcgtagacacaaaaacagtcggcgctctccttacggcgtcggcttacgcgattgccccaaaaattggacagaccgccgagttggtacactttagtgatcgtcttaaccggacggacggcgtanattcatggaaactggaaataaaagacgacaaaggcgctactgtaagaacttttctaaggaaacggaaagccgccggaaaattttag

SEQ ID NO: 28778 - protein, 491 aa, Unknown
  Obtained from environmental sample
  misc_feature (1)..(491): Xaa is any amino acid
MLHNLGDLGFIKNFTWAFVMRNMGMSWAPTWFTPWLGFTFDFIYIEGKGGKPSPLIMNFAADVGVPSVIVPENINVIAKAGITITILEKITLSVLWPGAAGYNMREAKEDDGKRFQWLPSVGMGINFIIPFGGKRHGEYRLGENRLGEFRLSERRPSDGDITFDAAFKPLYYDVYATGAGVTWYAXYRDDLPPNIIVDYPETQYISPNYDGKQDNLLFPVRIADDHYVTSWIMTIKDSNGNTVRTYQNKDRRFEMMDARDIYGRYYLEKKGVDVPSTMRWDGVFNTGEIGPDGKYYFSISASDENGNTGYSPSYEVIIKNNPPQVTIDDISLNDRVFDPSSGNRRTINIVPHGTIEDKWESGIYDAEGKLIRTFEPNSGSPQPQTWDGRTDSGAFAPDGAYTFKISATDIAGNTGSAVMSNIVVDTKTVGALLTASAYAIAPKIGQTAELVHFSDRLNRTDGVXSWKLEIKDDKGATVRTFLRKRKAAGKF

SEQ ID NO: 28779 - DNA, 867 bp, Unknown
  Obtained from environmental sample
  misc_feature (1)..(867): n is a, c, g, or t
atgctccgcgccggaatatgccttatgactacccccggccttgatgtgtatcagctcaagcgttcaaaaatggtaaaacattatgcgcatatacttcatgctccgagcgacgcgactatgtaccgcctttttgggtttgattattttgattctattctgctaaccggcgattatcaggctgaagatataaggactctggagcgtcagcgtaacattacggagaagaaacttgtcactgtaggatgcagttatcttgatgtatacgccgaaaaaatcaagaaccttcccgctgaagaaaaccatccctttaccgtgcttgtttccccttcatggggcgcttccgcgcttttgacccgttatggtgaaaaattactcgatcctcttgccgcttccggctggcgtattattatccgtccgcatccccaatcaaaaaaatcggaagccacaatgctggatcgtttgcaaacgcgttataaagattcaagcaacattgagtgggattatgagcgggaaaatatttattctcttaataaagccgatataatgatttccgatttttcaggaatcatttttgattatatgtttctgcgcgacaggccggtattgtatgtgagccagaattttgatctgcgcccttatgacgcggacgatattgaccatgaattgtggcagttcaaaacagtaaaagaagcgggaattgaactgcgtgaagaagattttccgcgcattaccgaaattataaagaatgcgggagacagcgaaagtcttgcaaatatccgcagaaaagcccgcgaaacggcatggcggtatccgggtgaagcgggaaaacgtgtttttgattttatgatgggaattataaatgactga

SEQ ID NO: 28780 - protein, 288 aa, Unknown
  Obtained from environmental sample
  DOMAIN (91)...(284): CDP-Glycerol:Poly(glycerophosphate) glycerophosphotransferase
  misc_feature (1)..(288): Xaa is any amino acid
MLRAGICLMTTPGLDVYQLKRSKMVKHYAHILHAPSDATMYRLFGFDYFDSILLTGDYQAEDIRTLERQRNITEKKLVTVGCSYLDVYAEKIKNLPAEENHPFTVLVSPSWGASALLTRYGEKLLDPLAASGWRIIIRPHPQSKKSEATMLDRLQTRYKDSSNIEWDYERENIYSLNKADIMISDFSGIIFDYMFLRDRPVLYVSQNFDLRPYDADDIDHELWQFKTVKEAGIELREEDFPRITEIIKNAGDSESLANIRRKARETAWRYPGEAGKRVFDFMMGIIND

SEQ ID NO: 28781 - DNA, 864 bp, Unknown
  Obtained from environmental sample
  misc_feature (1)..(864): n is a, c, g, or t
atggcctccaagttccgtggaatttcaaaatttatctttattattgccgccgcgctttatccggggctgattttttactttctggtaatccgtaaaaccccgttacggctgttttccctttttgtcgtcgtatttgccctttttgtctttatcaccggaacatccgcaaaaagcaaagctaagggcgtttccttcttttggaattcagccctgcttttggcgcttgggggcttatgccttattgttaactcctccattatcctgaaactctaccctctgctgatgaatatactgttcctgacggctttcggcagcacccttttttccccgcccactatgattttccgtttcgccgtaatgcaggacaaatccattaagggttccctgaatgaaaaaaggatcgccgcctactgccgtaaagtaacttatgtctggtgcggattttttattattaacggaggcattgccgcatggactattttttccggttctgacgcgctgtggtctgtttataacggaggaatttcctatatactgataggaaccctctttacgggggaattcatagtacgaaaaatggtacagaaaaagatgcccaaaagcgttccgctttcgacatttaagaataatgttcgtccccgctcaacggtcttatgttacgaaggcgcatggaacgattctgtttacaaaacatggggggattttcttgaaggtactgccgaacctgcgccgcgtaataaactctcaaagcgtactttgcggcgaaaaatggctgctccactgcgaggactgctggtactttcttctggcttttaccgccctgctccagtgcaaaaaagaaatactcttaaggcgcaaatataa

SEQ ID NO: 28782 - protein, 287 aa, Unknown
  Obtained from environmental sample
  misc_feature (1)..(287): Xaa is any amino acid
MASKFRGISKFIFIIAAALYPGLIFYFLVIRKTPLRLFSLFVVVFALFVFITGTSAKSKAKGVSFFWNSALLLALGGLCLIVNSSIILKLYPLLMNILFLTAFGSTLFSPPTMIFRFAVMQDKSIKGSLNEKRIAAYCRKVTYVWCGFFIINGGIAAWTIFSGSDALWSVYNGGISYILIGTLFTGEFIVRKMVQKKMPKSVPLSTFKNNVRPRSTVLCYEGAWNDSVYKTWGDFLEGTAEPAPRNKLSKRTLRRKMAAPLRGLLVLSSGFYRPAPVQKRNTLKAQI

SEQ ID NO: 28783 - DNA, 657 bp, Unknown
  Obtained from environmental sample
  misc_feature (1)..(657): n is a, c, g, or t
atgtttattcttatgagtaaatcctgggttacattctcgcgttatatttttaacactgtattcattacgattgtcggaactgccggattaattattgtagcttcgatgggagcgtttgttgtttcaaaatacaaattccccggttcaaagattttttttaccggtgtaattataactctcatgttttccggttatgtaacggcaatacccaactaccttgttatggcgcgtctcggttgggtagacacttatctttccgtaattattcccgcgtttgcgatgcctatgggattcttcttattaaaacaattcattgacaccataccggataccctgttggaagccgcaaaagtggacggcgctaaagaattccgtatttttatatggatagtcctaccgatgattaagcccgcatggcttaccgtaatgattttttccgttcaaaacctatggaatgcgagagcttccaactttatatattcggaacaattaaaaacactgccatacgcacttggtcaaatcatcacaggcggcatcgcccgagccggcgtaggagctgcggtaaccctctttgtaatgattgttccgttagtaatgtttatattcgcccagagtaatgttttacaaacaatggcaaactcaggaataaaggaataa

SEQ ID NO: 28784 - protein, 218 aa, Unknown
  Obtained from environmental sample
  DOMAIN (12)...(218): Binding-protein-dependent transport system inner membrane component
  misc_feature (1)..(218): Xaa is any amino acid
MFILMSKSWVTFSRYIFNTVFITIVGTAGLIIVASMGAFVVSKYKFPGSKIFFTGVIITLMFSGYVTAIPNYLVMARLGWVDTYLSVIIPAFAMPMGFFLLKQFIDTIPDTLLEAAKVDGAKEFRIFIWIVLPMIKPAWLTVMIFSVQNLWNARASNFIYSEQLKTLPYALGQIITGGIARAGVGAAVTLFVMIVPLVMFIFAQSNVLQTMANSGIKE

SEQ ID NO: 28785 - DNA, 552 bp, Unknown
  Obtained from environmental sample
  misc_feature (1)..(552): n is a, c, g, or t
atgatattgggaggagacgagattggccgcactcaaaatggaaacaacaacgcctactgccaggacaatgaaatctcctggtatgattggtctttttatgaaaagaattacgcttattatcgctttgtaaaggaaatgatcgctttccgccgccgccaccccggttttatgcgccccgagtttttcacgggccgggacggaaagtacaacgccattcctgacataagctggtttgacgaaaaaggggataccccgaattgggatgagatcggcccgtgccttgcctttagaatggacgggtcttacgctgatatacttgccgacagggacgacaacgactttttcattatgttcaatgggagcgaaaaagctttacaattcaaggtttgcgaaccaatggccggtaaaaaatgggttcgcgccgtggacacaggccttccttcgcccgacgatattctgataagcggggaagagcgaattctggaaaatccgtatgcctatccgcttaaagaaaaaagcatggtgatacttatatcgaggttgttgtattaa

SEQ ID NO: 28786 - protein, 183 aa, Unknown
  Obtained from environmental sample
  misc_feature (1)..(183): Xaa is any amino acid
MILGGDEIGRTQNGNNNAYCQDNEISWYDWSFYEKNYAYYRFVKEMIAFRRRHPGFMRPEFFTGRDGKYNAIPDISWFDEKGDTPNWDEIGPCLAFRMDGSYADILADRDDNDFFIMFNGSEKALQFKVCEPMAGKKWVRAVDTGLPSPDDILISGEERILENPYAYPLKEKSMVILISRLLY

SEQ ID NO: 28787 - DNA, 612 bp, Unknown
  Obtained from environmental sample
  misc_feature (1)..(612): n is a, c, g, or t
atggacgaaagcagttttatttttggcgtagatctggacggggtggtgggggacttttacggcgcgatgagaaagatcgccgcctcctggctgaataaaccgcttgaggatcttacaaccgacgtcagctatggtcttgaagaatgggggcttgaagaattcggcggctatgaaaggcttcaccgttttgctgtaacgcagcgtaaccttttccgcgacatggagcccatcaaagacgcacctgccgttctgagaaaactttctaacaagcacattagaattcgcatcattactcacaggctttttcttaaatactcccacaaagctacaatcacccagactgtggattggctggattcctgggacattccctattgggatctttgtttcatggccgacaagggcgctgtaggtgctcatgtgtatatcgatgattccccggccaacattgtgcgtctaagggatcaaggctgcaacacgattattttttccaattctaccaacctgaaactggacggcccaagagcctacaactggcaggatacggaacgccttgttatggaagcctttgaggaatggcaaaccggtaccaggaatatgttcgctccctga

SEQ ID NO: 28788 - protein, 203 aa, Unknown
  Obtained from environmental sample
  misc_feature (1)..(203): Xaa is any amino acid
MDESSFIFGVDLDGVVGDFYGAMRKIAASWLNKPLEDLTTDVSYGLEEWGLEEFGGYERLHRFAVTQRNLFRDMEPIKDAPAVLRKLSNKHIRIRIITHRLFLKYSHKATITQTVDWLDSWDIPYWDLCFMADKGAVGAHVYIDDSPANIVRLRDQGCNTIIFSNSTNLKLDGPRAYNWQDTERLVMEAFEEWQTGTRNMFAP

SEQ ID NO: 28789 - DNA, 648 bp, Unknown
  Obtained from environmental sample
  misc_feature (1)..(648): n is a, c, g, or t
gtgaaaacaaacaaaaagtttacggtatgccgtatcgccgtctttctggcggcagttgtttttgctttgctttcgggatgtaaaagtaaggaggaaaagatgcaggctttatttgacggattgactctggcggcgccgctcaaggcgtatggcgatgttaaccctatctgtctccagcggtttggggctgacccctgggggcttgtttataaagacagggtatatgtgtacatgacaggcgatacgttcagtttatcttcaggcacaaacttattaccggatctttcaaatttagggccaaatacttattcaaatatcaataccatacgggtggtgtcttcttccgaccttgtaaactggacggaacatcctgaaatcagggctgccggttcacagggggcggcaacgcgggcgacaaactcatgggctcctgccgcggcttacaaaaacatcggcgggaaagactattttttcctgtacttcgccgacaacggcaatggtatatttgtgcttcgcgcggatagcccgctgggcccatttacaaacccccgccctgacggcagcgccattataagcagatcaacgcctaactgttcatatgtcacctggctgtttgaccccgccgttctggaggatgacgacggatag

SEQ ID NO: 28790 - protein, 215 aa, Unknown
  Obtained from environmental sample
  SIGNAL (1)...(22)
  misc_feature (1)..(215): Xaa is any amino acid
MKTNKKFTVCRIAVFLAAVVFALLSGCKSKEEKMQALFDGLTLAAPLKAYGDVNPICLQRFGADPWGLVYKDRVYVYMTGDTFSLSSGTNLLPDLSNLGPNTYSNINTIRVVSSSDLVNWTEHPEIRAAGSQGAATRATNSWAPAAAYKNIGGKDYFFLYFADNGNGIFVLRADSPLGPFTNPRPDGSAIISRSTPNCSYVTWLFDPAVLEDDDG

SEQ ID NO: 28791 - DNA, 864 bp, Unknown
  Obtained from environmental sample
  misc_feature (1)..(864): n is a, c, g, or t
atgatcagattcggccgagctggaaaccccaccggccttgatcttattgaggcggcaaaagccgtcgaaccttatgcccaggagctgctctttacctgtgtggaacgcgaaggcaccatgaccggcatcaaccttgagccggtgaaaaaattgcgcgaagccgtcaactgtcaaataaccgtcgcgggaggcgtctctacgttagctgaaattgaagaaatcgccgcaatcggctgtgacgtacagcttggcatggccttatacaccggaaaaataaacctcgccgacgctttcacagtatcgcttaactggaaaaaaggggaaactctgctccccataatcgttcaatctacagatgggcaagtactaatgaccggttttaccgacagagaagcgttagctgaaacattcaagcggaataatgtctgcttccacagccgcacccggaacaaactctggatgaagggtgagacatcgggcaatacgttaaaattatcgcgtttacgcgccgactgtgacagggacgcccttctcgcagtcacggaaccggcaggtccggtttgccacacgggcgcgtggtcttgttttgcgactaacaggaattatacattgcaatttttgcagaatataatacaggagcgttttcgtaatcccgcgccggggtcgtatacagccacccttgatgatgagcttgtccgcgagaaaattatggaagaggcaaaagaactctgcgaggcgaagacccatgacgaaattgtctgggaagccgcggacttgctctactttgcgacagtgttaatgacaaaagcgaatgtcaccattgatgaaattcttgacgagcttgaccggaggcataaaaaataa

SEQ ID NO: 28792 - protein, 287 aa, Unknown
  Obtained from environmental sample
  DOMAIN (204)...(286): Phosphoribosyl-ATP pyrophosphohydrolase
  misc_feature (1)..(287): Xaa is any amino acid
MIRFGRAGNPTGLDLIEAAKAVEPYAQELLFTCVEREGTMTGINLEPVKKLREAVNCQITVAGGVSTLAEIEEIAAIGCDVQLGMALYTGKINLADAFTVSLNWKKGETLLPIIVQSTDGQVLMTGFTDREALAETFKRNNVCFHSRTRNKLWMKGETSGNTLKLSRLRADCDRDALLAVTEPAGPVCHTGAWSCFATNRNYTLQFLQNIIQERFRNPAPGSYTATLDDELVREKIMEEAKELCEAKTHDEIVWEAADLLYFATVLMTKANVTIDEILDELDRRHKK

SEQ ID NO: 28793 - DNA, 990 bp, Unknown
  Obtained from environmental sample
  misc_feature (1)..(990): n is a, c, g, or t
atggcagacctcacactcaatttcacgaatggcacccctctccgctacggggaaaattcacaccagcaggcgactttttacaaagaccccagctgcgatgaagcgtctcttgccaccgcagagcaactgcacggcaaagagctctcttacaacaatatagtagatgcggatgccgcgttggagatgataagggaattctcggattcaaatgcggttgccataataaagcatttaaacccgtgcgggcttgcaacaggcgaaactttggaggaagcactcaaagcggcgtgggaaggcgacccggttagtgcatacggctcggttattgcggtcagcagaaaagtagatttaaaaacagcggaatttttaaaggggcgttttgttgagattttgctcgctccggattttgatgcagatgctttggaatttttgagaaataaatccaaggatattcgtctgcttaaagttggggagattaagcctgccaaaacttgcaaagtgtataagcacgttattggcggaatgttagttcaagacagagatgttgaggtttgggaaaaatttgaatgtgtgaccaaagcgaaatttccaaaagaaaaagaagccttggcaaaattttcttggttggtttgcaaacacactaaatccaatgctatagtgatgtgctatgaatacaaggctggttattttatgattttagggcttggccccgggcagccaaatcgcatagattcaaatttgcgtctgtgccagccaagggtggcggataacattaaacgtatgaatttaagcgaaagcgtttggggtgagcttgtgctctcttccgatgcgttcttcccctttgcggataatgtggaaatctcaaattccgctggcattaaatacatcgtgcagccaggtggctcaaagagagacggcgaagttatagaaacctgcgacaagtttggcatagctatggcgttcaccaccacaaggcatttcaggcattga

SEQ ID NO: 28794 - protein, 329 aa, Unknown
  Obtained from environmental sample
  DOMAIN (1)...(254): AICARFT/IMPCHase bienzyme
  misc_feature (1)..(329): Xaa is any amino acid
MADLTLNFTNGTPLRYGENSHQQATFYKDPSCDEASLATAEQLHGKELSYNNIVDADAALEMIREFSDSNAVAIIKHLNPCGLATGETLEEALKAAWEGDPVSAYGSVIAVSRKVDLKTAEFLKGRFVEILLAPDFDADALEFLRNKSKDIRLLKVGEIKPAKTCKVYKHVIGGMLVQDRDVEVWEKFECVTKAKFPKEKEALAKFSWLVCKHTKSNAIVMCYEYKAGYFMILGLGPGQPNRIDSNLRLCQPRVADNIKRMNLSESVWGELVLSSDAFFPFADNVEISNSAGIKYIVQPGGSKRDGEVIETCDKFGIAMAFTTTRHFRH

SEQ ID NO: 28795 - DNA, 489 bp, Unknown
  Obtained from environmental sample
  misc_feature (1)..(489): n is a, c, g, or t
atggcgagcgattggggtggggatttattcataagcctgcattgcaacgccatagcaggcaaggaaatgcagcaaaaagcagaagggtttaaattttacatattgcgcgctggcggcacagaagaagataaggccatagctcgcagggaaaaccaggcgatagcgttggagtctggcaaaaagggcaaggacgagatttcccctgctgaatggattattttggataaccagctcgctttatacgccgaaaaaagcgcactgctcgcagggcatttagtggaagcgtttgacggcggttctctgagaaaattgcagacaggagccgggcaagcgggatttatggttttggttggtgcttacatgcccgctgttttggctgaattgggttttataacgcaccctggcgatggagcatttttggccacggaaaaggggcgggacgaaataacggacaagcttgtaaaagctataatagcattttctaggtaa

SEQ ID NO: 28796 - protein, 162 aa, Unknown
  Obtained from environmental sample
  DOMAIN (11)...(159): N-acetylmuramoyl-L-alanine amidase
  misc_feature (1)..(162): Xaa is any amino acid
MASDWGGDLFISLHCNAIAGKEMQQKAEGFKFYILRAGGTEEDKAIARRENQAIALESGKKGKDEISPAEWIILDNQLALYAEKSALLAGHLVEAFDGGSLRKLQTGAGQAGFMVLVGAYMPAVLAELGFITHPGDGAFLATEKGRDEITDKLVKAIIAFSR

SEQ ID NO: 28797 - DNA, 525 bp, Unknown
  Obtained from environmental sample
  misc_feature (1)..(525): n is a, c, g, or t
ttggcggatttgccgccgcagggcgtggatttcgtcctggacgatgcggccatgtggaattcgctgatggaggagttccgtctggactgccgcctgtcgcggagtccgaaagcggaactgcgcatcctgcccgtagagggcggatttctcgtgcgcggacgggtcgcgggcgtttttacgctgccgtgcagccggtgcgctgaagacgctacggtgccttttgacgaacgttttgagcattttgtcgctctcccgtctgcggaggacgacgaggcggacacgccggatcatgaggaggcggaagcgcacctgcgcattcttgcgggcggcgtgccggaactcgatcttgccggtctgtgcggcgaagagtttgtactggccctgcccgtaaaagccttgtgcgcccctgactgcaaggggctgtgcccggaatgcggggcaaaccgcaacgaaatttcgtgtgcctgcgccggcggggcggatccccgcctggccgccctgcgcggtctgaaaatagaatcctga

SEQ ID NO: 28798 - protein, 174 aa, Unknown
  Obtained from environmental sample
  DOMAIN (2)...(169): Uncharacterized ACR, COG1399
  misc_feature (1)..(174): Xaa is any amino acid
MADLPPQGVDFVLDDAAMWNSLMEEFRLDCRLSRSPKAELRILPVEGGFLVRGRVAGVFTLPCSRCAEDATVPFDERFEHFVALPSAEDDEADTPDHEEAEAHLRILAGGVPELDLAGLCGEEFVLALPVKALCAPDCKGLCPECGANRNEISCACAGGADPRLAALRGLKIES

SEQ ID NO: 28799 - DNA, 939 bp, Unknown
  Obtained from environmental sample
  misc_feature (1)..(939): n is a, c, g, or t
atgagcgcgaaacccattctggccattgatgccatggggggggatttcggccccggcgtcatcgtgcccggcgcgatacaggccgcgcgggacttgcgcgtgaaggtgctgctggtgggagacgcttcccaggtggaagccgaactggccaagctcactccgggccaggccgagtatgaaatcgtgcatgcgcccgaagtcgcgcatatgcacgaaaaaccttccgagatcctgcgccgcaagaaagattcctccattcaggtcgcgtgccgtctggtgaaggacggcgctgcggacggcgtgatcagcgcggggcattccggcgccacgaccgcctgcggcattttcatcatcggacgcatccccggtgtggagcgtccggccttggcggcctgtctgcccacggaaaaaaatcctctcgtggtcattgacgccggcgccaatgtggattgcaggccctaccacctgttccagttcgggctgatgggcgatgccttcgcgcgcgacatcttcggctatccctcgccgcggatcgccttgctcagcatcggcgaagaagagggcaagggcaaccatcaggtcaaggaagcctacgatctgtataaaatggccgaacaggcgaatttcatcgggaacgccgaaggacgcgatattttttccggcgatatggatgtcgtcgtctgtgacggttttgtgggcaacattattttgaaaatgagcgaaggcttcgccgtttccatgatgcgcatgctgaagagggaactcgtttccggcttcgtgaccaagctcggcacctggctttccaagcccgccttcaaacgtttcgtcaacacggtggattatgccgaatacggcggcgcgccgcttctggggttgcagggcatctgccttgtctgtcacggcaagtccagccccaaagccatcaccaacgccatttaa

SEQ ID NO: 28800 - protein, 312 aa, Unknown
  Obtained from environmental sample
  DOMAIN (7)...(312): Fatty acid synthesis protein
  misc_feature (1)..(312): Xaa is any amino acid
MSAKPILAIDAMGGDFGPGVIVPGAIQAARDLRVKVLLVGDASQVEAELAKLTPGQAEYEIVHAPEVAHMHEKPSEILRRKKDSSIQVACRLVKDGAADGVISAGHSGATTACGIFIIGRIPGVERPALAACLPTEKNPLVVIDAGANVDCRPYHLFQFGLMGDAFARDIFGYPSPRIALLSIGEEEGKGNHQVKEAYDLYKMAEQANFIGNAEGRDIFSGDMDVVVCDGFVGNIILKMSEGFAVSMMRMLKRELVSGFVTKLGTWLSKPAFKRFVNTVDYAEYGGAPLLGLQGICLVCHGKSSPKAITNAI

SEQ ID NO: 28801 - DNA, 915 bp, Unknown
  Obtained from environmental sample
  misc_feature (1)..(915): n is a, c, g, or t
atgctggggctgccgggcggctttgccgaggcggcaacgctttcttttggtttcttccgcaggctccgcgttagctgttctgattgtcggggaagtacggcgccgttcgtcgatggaggcggttccgcgcttcttaaggggcggccctctggcgcttgttaccatgggccttttgtcgctggtttttgtatccgcagcgacggtgttttatgccgttttgggggcaaattagcgatggcagccgcgaaaataaaactgatcctcggctcccacgcccatgtgccgtacggatcgaataacgccgagtttgaaaatgtttacgtgaatctgatgcggccctttgtcaccagcctgtacaaataccccggtttacaggcggttctccattattcgggcgtgctgctccattgggtcgagcgttcgcatcccgaactgttcatgctgattaacgatatgatcgcccgcaagcaggcggaaatactcggaggcggattttacgagcccatgctgccgattattcctttacaggataaaatagggcagattgagctgttaacaacatacatacgcaaacagttcgggaaacggccccagggctgctggatacccggctacgcctgggagcagggccttgtaagccccctcgcgagctgcggcatgggcttcacttttctcggcagccgccagtttaccctggcgggcggcaaagactccccctgcgtctgcgaagaccagggaaagctcattaccgttttccccgtgtccagttccattgaggaagacctgaccaggaaaagccttattcccatattaaaaagtattaacagtattaacaatgaaagcggcggcgcgcctgacggcagcggcgcgcctggcggcagcggcgcgcctgacggcgggactcggccgatctga

SEQ ID NO: 28802 - protein, 304 aa, Unknown
  Obtained from environmental sample
  DOMAIN (87)...(296): Glycosyl hydrolase family 57
  misc_feature (1)..(304): Xaa is any amino acid
MLGLPGGFAEAATLSFGFFRRLRVSCSDCRGSTAPFVDGGGSALLKGRPSGACYHGPFVAGFCIRSDGVLCRFGGKLAMAAAKIKLILGSHAHVPYGSNNAEFENVYVNLMRPFVTSLYKYPGLQAVLHYSGVLLHWVERSHPELFMLINDMIARKQAEILGGGFYEPMLPIIPLQDKIGQIELLTTYIRKQFGKRPQGCWIPGYAWEQGLVSPLASCGMGFTFLGSRQFTLAGGKDSPCVCEDQGKLITVFPVSSSIEEDLTRKSLIPILKSINSINNESGGAPDGSGAPGGSGAPDGGTRPI

SEQ ID NO: 28803 - DNA, 777 bp, Unknown
  Obtained from environmental sample
  misc_feature (1)..(777): n is a, c, g, or t
atgtttactaatctccaaatctcgctcttaattcctgtctctgccctcatagccttgttttctgccttgtttttttacaaaagcatgaaaagtaagcccgaaggcgaccaaaaaatgaaagatattgcccaatatgttagggaaggcgcgatggcctacctaaaaaggcagtataagatagtttcgcttgtgtttgtggttttattcgtaatactggtagtgcttgtggtgctaggtatccaaaatccctttgttcctgtggcatttttaacaggcggttttttctccggtttgtgtggatttttgggtatgaaaactgcgactcaggccagtagcagaacggcaaatggagcaaaagataatctgaacaaggccctgcaaatcgcttttagaagcggtgcagtgatgggcttgatagttgttggctttggcttgctggatatatctatttggttttttttgctgaattatatttttgataacaatgttatgggttttggcattggttatacgcaagaacagaagatgattgaaatcacaaccgttatgataacatttggaatgggcgcaagcgttcaggcattgtttgctagggttggtggcggtatttacacaaaagctgctgatgttggcgcagaccttgttggcaaggtagaagctggaatcccagaagacgacccacgcaacccagcaaccatagcggacaacgttggcgacaatgttggcgacgtggctggaatgggtgcggatttatataaagttatgcgctcgcgataa

SEQ ID NO: 28804 - protein, 258 aa, Unknown
  Obtained from environmental sample
  SIGNAL (1)...(27)
  DOMAIN (4)...(258): Inorganic H+ pyrophosphatase
  misc_feature (1)..(258): Xaa is any amino acid
MFTNLQISLLIPVSALIALFSALFFYKSMKSKPEGDQKMKDIAQYVREGAMAYLKRQYKIVSLVFVVLFVILVVLVVLGIQNPFVPVAFLTGGFFSGLCGFLGMKTATQASSRTANGAKDNLNKALQIAFRSGAVMGLIVVGFGLLDISIWFFLLNYIFDNNVMGFGIGYTQEQKMIEITTVMITFGMGASVQALFARVGGGIYTKAADVGADLVGKVEAGIPEDDPRNPATIADNVGDNVGDVAGMGADLYKVMRSR

SEQ ID NO: 28805 - DNA, 438 bp, Unknown
  Obtained from environmental sample
  misc_feature (1)..(438): n is a, c, g, or t
ttgctcggctatgacaacttaaaacgctggcttttgattttggcttatgctgggggcaacagcgcaaagataaatagccactcgccgctactcgtaaacgcaatacaccgcgcaaagttctttgaagaactctctaaattcttgaaattaagcgaaaatgtaacagaaaaagcttacttgatgggtttaatcagtcatctggatatgatttacaaagttcctatacaatccgttttggaacaaatgaatttagacacagaaataaaccaagcgattataaacaaagatggaactctgggagaattgttcacccttttgcaagccatagaagcagatgacatggacaaaattgaactatctctaacccacctatcactttccacggaaaatatcaactcagctttattgaaggcatacgaagccagcaataatatctaa

SEQ ID NO: 28806 - protein, 145 aa, Unknown
  Obtained from environmental sample
  misc_feature (1)..(145): Xaa is any amino acid
MLGYDNLKRWLLILAYAGGNSAKINSHSPLLVNAIHRAKFFEELSKFLKLSENVTEKAYLMGLISHLDMIYKVPIQSVLEQMNLDTEINQAIINKDGTLGELFTLLQAIEADDMDKIELSLTHLSLSTENINSALLKAYEASNNI

SEQ ID NO: 28807 - DNA, 387 bp, Unknown
  Obtained from environmental sample
  misc_feature (1)..(387): n is a, c, g, or t
atggaaatttgctccggtggaattataggcatgggagagagcatggagcaacgcgttgagctgccctgcgagctgcgcgagctaggggtaaaatccgttcccataaatattttaaatcccataaagggttccgctttggaaaatgcaaagccactttcggaagaggaaattttaaccacaatggcggtattccgttttgtgcttccagatgcctttatacgctttgcaggtggcagaataaacatgagcgaatctttgcagaaaaaagccttgcagtccggcataaacgcttccttggtaggaggtcttttaacaacgccgggttcaaacgtaaacgatgattacgagatgtttaaaaccttgggctacgacgctcgccgagcctag

SEQ ID NO: 28808 - protein, 128 aa, Unknown
  Obtained from environmental sample
  DOMAIN (34)...(125): Biotin and Thiamin Synthesis associated domain
  misc_feature (1)..(128): Xaa is any amino acid
MEICSGGIIGMGESMEQRVELPCELRELGVKSVPINILNPIKGSALENAKPLSEEEILTTMAVFRFVLPDAFIRFAGGRINMSESLQKKALQSGINASLVGGLLTTPGSNVNDDYEMFKTLGYDARRA

SEQ ID NO: 28809 - DNA, 981 bp, Unknown
  Obtained from environmental sample
  misc_feature (1)..(981): n is a, c, g, or t
atgatngaggaaaattcggatcgggagaaagaattgggatacggcccataccaggatggcctgtatatgtccagcaaactgtatatttcctggaaaattccgaccggcttgacggtttccgggtttggggaactgatatatacccccatagtttcgtcaacttttaaccatgagtttccgcaatggcccctggatgattttcgcaaaggcccgttcctgaacttcagccattcactgggttttgaaaaaatcgactggcacgccaattaccgcgagggcctttctgtctttatgggtaattcataccaatatgattttaaccagatgttttattccgtttctttggatatcaccggaattggacaccatattatcagagacttcttcgccgtctcctcaaggctcatgtataaatactggcactcttccgacgaatcgtgggagggggagtatgtcagctattatttacgcggaatcgcggataaatccatcatcgcgtaccagatgttttcattaaacatggattttcctttccggttgtttgtctttacgccttcacagtggtttaataaccggaaactcagcttcttcgattttgaaatgcatgcctcccctgttattgatctggccgtgtattaccaaagaggttttgataagggaaaactcctgtattaccccggagaaacagccgctgcgggcggcattgaattggtggtgtttccggcgtttatgcggaatttgtacgtgcgcctgggttttgccataaatctgaaggagtttataaccgcgcggccgctcaggcttcctgacggcgatgaccgggaaatatatttaattatggggcatttcttttatgagacatatccccaaagcggcttttttaatacccgttctgataaaattattcaggctgctgacccacagccacaaaatatacctgattatcctgttcgtgatgacagttggttttgccctggttga

SEQ ID NO: 28810 - protein, 326 aa, Unknown
  Obtained from environmental sample
  misc_feature (1)..(326): Xaa is any amino acid
MXEENSDREKELGYGPYQDGLYMSSKLYISWKIPTGLTVSGFGELIYTPIVSSTFNHEFPQWPLDDFRKGPFLNFSHSLGFEKIDWHANYREGLSVFMGNSYQYDFNQMFYSVSLDITGIGHHIIRDFFAVSSRLMYKYWHSSDESWEGEYVSYYLRGIADKSIIAYQMFSLNMDFPFRLFVFTPSQWFNNRKLSFFDFEMHASPVIDLAVYYQRGFDKGKLLYYPGETAAAGGIELVVFPAFMRNLYVRLGFAINLKEFITARPLRLPDGDDREIYLIMGHFFYETYPQSGFFNTRSDKIIQAADPQPQNIPDYPVRDDSWFCPG

SEQ ID NO: 28811 - DNA, 528 bp, Unknown
  Obtained from environmental sample
  misc_feature (1)..(528): n is a, c, g, or t
atgaaaacattcggcggccccgtcctctttttagaccgttccgacataaacacggacgaaatcattccggccaaatacctgaccgagtcaaaaaaagaagccctcaagccctatctcttagaggacttaaagttagacggcttcaaccccacaggctcatggcgcggcaacgtcaaagtcgtcgtgacacgcgccaacttcggctgcggctcatcccgcgaacacgctccgtgggcgcttgaggtgaacgacatcacctgcgtgatcgccgagagctacgctcgaatcttccgccagaacatgttcaacggcgggatgctggcgatagagttatccgccgggcagattgacgagattttcgccataagcggtaagggcgccgtgaactgcgacattgacgcggcgggaaagaagctgacgtttacgagcgcgggcgggactaagagcgttgatttcagtctgtcgcaatttgataacgcgcttgtcaaggcggggggatgggtggagtttgcggaaaagaggtactaa

SEQ ID NO: 28812 - protein, 175 aa, Unknown
  Obtained from environmental sample
  DOMAIN (1)...(114): Aconitase C-terminal domain
  misc_feature (1)..(175): Xaa is any amino acid
MKTFGGPVLFLDRSDINTDEIIPAKYLTESKKEALKPYLLEDLKLDGFNPTGSWRGNVKVVVTRANFGCGSSREHAPWALEVNDITCVIAESYARIFRQNMFNGGMLAIELSAGQIDEIFAISGKGAVNCDIDAAGKKLTFTSAGGTKSVDFSLSQFDNALVKAGGWVEFAEKRY

SEQ ID NO: 28813 - DNA, 1542 bp, Unknown
  Obtained from environmental sample
  misc_feature (1)..(1542): n is a, c, g, or t
ttgatggccgaggggtggtatagagcagcgccgttgggtgcgactatgactatggaagatgccatcctattcgccgaacttgacgtggataaaaaagaagaatttgatccccgtaattttgatcatattgtcgataatccattcaggaatgtcgcggattatcctctgtcaactttttcaattgacgtagataccgcgggttactcaataacgcgcaactttattaatggcggcaggctgccacccaagtcggcaatcagaatagaagaattgataaattattttgattacgattacgcgccacccaatgatggcgcgtcgcttagcgacgcgaaacccttcgctgttcataccgaagtcggattcgccccgtggaatccctctcattatttggcgcggatcgcggtaaaaggcaaggaatttcccgccagtggacgccccaatgtaaatctggtttttctgattgacgtttcaggttcaatgagtcccgcaaacaggctgccgctggtaaaagaatcattaaaaatgctggtggaagaactgaacggcgcagataaagtggctatctgcgtgtacgcgggagcggcgggaaccgtattgcctcccacaagcatcgacaacaaaaaagccatattggccgcgctgagaaagttagagtcaggcggctctaccgcgggcggagagggaattcaacttgcctataatttagcgcagcanaactttaatccgcaggcgataaaccgcgttatcctgtgtaccgacggggattttaatgtgggcattaccaaccgcagcgatctggtagatataattgccgcaaaagccaaaagcggcgtatatttgactgttttgggattcggcatggataactacagggacggaaccttaaagcaactggcatccaaaggcaacggaaattacggatacattgataccatagaagaagccagaaaaattttagtggagcagttgagcggaacattagtcacgattgcccaggatgtaaaaattcaggttgagtttaatcctgaaaccgtcagtgcttaccggctcataggctatgagaaccgccttcttcacaaagaagatttcaacgacgataccatagacgcgggcgacataggcgcggggcattctgttaccgctttttatgaactcataccaaaaggggctgaagataatgctacgcgcaaagttgacaccctaaaatacatgacacccgcggcatcaaacggttatacgaatgaacttttgactgtgaatctccggtacaaactgcctaaagaaaccgaaagctctctgttcagtttttcggttttagcgtcctctgtaaaatcggttggaaaagaatcggcagattttagatttgcttcagcggtcgccggttttggaatgctgttacgcgatagtccccacaaaggaaatgctggttatgataccatttttaaatcggcgcaaaccgcaatcgggaaagataaatcaggataccggcggggttttctggaaatgataaagaaagcgcaggcaatcagcggtaactaa

SEQ ID NO: 28814 - protein, 513 aa, Unknown
  Obtained from environmental sample
  DOMAIN (150)...(324): von Willebrand factor type A domain
  misc_feature (1)..(513): Xaa is any amino acid
MMAEGWYRAAPLGATMTMEDAILFAELDVDKKEEFDPRNFDHIVDNPFRNVADYPLSTFSIDVDTAGYSITRNFINGGRLPPKSAIRIEELINYFDYDYAPPNDGASLSDAKPFAVHTEVGFAPWNPSHYLARIAVKGKEFPASGRPNVNLVFLIDVSGSMSPANRLPLVKESLKMLVEELNGADKVAICVYAGAAGTVLPPTSIDNKKAILAALRKLESGGSTAGGEGIQLAYNLAQXNFNPQAINRVILCTDGDFNVGITNRSDLVDIIAAKAKSGVYLTVLGFGMDNYRDGTLKQLASKGNGNYGYIDTIEEARKILVEQLSGTLVTIAQDVKIQVEFNPETVSAYRLIGYENRLLHKEDFNDDTIDAGDIGAGHSVTAFYELIPKGAEDNATRKVDTLKYMTPAASNGYTNELLTVNLRYKLPKETESSLFSFSVLASSVKSVGKESADFRFASAVAGFGMLLRDSPHKGNAGYDTIFKSAQTAIGKDKSGYRRGFLEMIKKAQAISGN

SEQ ID NO: 28815 - DNA, 897 bp, Unknown
  Obtained from environmental sample
  misc_feature (1)..(897): n is a, c, g, or t
atgatctggccggtgcgccagcttgggcgtatgcttgccgatctttcaaaaactctggtcgcggcggggcgtatcagcgagatacttgccagcgagtcggaaaccgacccccctgacgcgctgacgcccgatctgaaaggggaaatttgttttaataacgttacctttaattatggggataatgaaccaatactaaagaatatttcttttaccattaaacctggtgaaagcatggcgatactgggagccactggttccggaaaatcaacccttgtccacctgttaagccgcttgtacgatctgaattacaattcttcatataacgccggatcaattacaattaacggtattgatatacgccgcatcgcgaggccctggctgcgccgccacatagggctttgtctgcaggaagcttttcttttttccaagaccattaaagaaaatatcgctatagcaagaccggaaatggaaattgaagaaataaaaaaagccgcagcagcagccatgatagacgaaaccatcgaaagttttgcggatggttataacactgtcataggggagcggggcgtcaccctttccggagggcagaagcagagggtggctatttccagaatgttggccagaaatacgccggtgataatttttgacgacagcctttccgccgtagacattgaaaccgacgcgaaaatccgcgcggctatgcgtatcagggtcaaagacgcggcggttattatcatttcccatcgcatatcaagccttatgcaggcggataaaatccttgtccttaaaaacgggacagtggaagacattggctcccacgaggagctattggaacggggcggcagttatcggcggatttttgatctgccagcggcaggtggattggacaatggctga

SEQ ID NO: 28816 - protein, 298 aa, Unknown
  Obtained from environmental sample
  DOMAIN (64)...(268): RecF/RecN/SMC N terminal domain
  misc_feature (1)..(298): Xaa is any amino acid
MIWPVRQLGRMLADLSKTLVAAGRISEILASESETDPPDALTPDLKGEICFNNVTFNYGDNEPILKNISFTIKPGESMAILGATGSGKSTLVHLLSRLYDLNYNSSYNAGSITINGIDIRRIARPWLRRHIGLCLQEAFLFSKTIKENIAIARPEMEIEEIKKAAAAAMIDETIESFADGYNTVIGERGVTLSGGQKQRVAISRMLARNTPVIIFDDSLSAVDIETDAKIRAAMRIRVKDAAVIIISHRISSLMQADKILVLKNGTVEDIGSHEELLERGGSYRRIFDLPAAGGLDNG

SEQ ID NO: 28817 - DNA, 1284 bp, Unknown
  Obtained from environmental sample
  misc_feature (1)..(1284): n is a, c, g, or t
atgggcggggccggcaacaagtcctacgacgtctcctacgacgtcccgggcaagggccccgtcgtggaggccaccgtcgtcaagtgcaaaaacgggcttgccgtcaactacgccgagccttacatgcgccgccgcgaccccgactgcaccgtggtgggcgactccaagccctccgacaaggagcgattttccgaacgcttcggcggcgacttcgacaaggtgcgcgccgacactttcgattggctgaaaaagcaggagctgacggccctcgccttcactctgggcgagagcagccacggggcgctcatgatcgccccccgcaacgccggtttcttcgtcggcgggctggccgacctccaggggatgctgaacccgcttgaggtgccggacaacttccagattgcctgcgtaatgtacgtggcgccgccgttccgccatacgcacttcaacggtaagcaggtcgtggtgcacaaccgcctgaacgaagtgcacgagatattctcatataacctataccccggccccagcgccaaaaagggcgtatacggggcgctcctcaccatcggcgagcaggagaattggctcacgctccacgccgccaccgtgcaggtcgtcacgccgtacgacaacatcacgaccatcatgcacgagggggccagcggcagcggcaagagcgagatgctcgagctggtccaccgcgagtgggacgggcggctgctgttaggccgcaacacgaagacgggcgcgaggcggatcatctccatgaaccagacctgctccctatacccggtcaccgacgatatggccatgtgcccgcacgaagtccaagacaagggcggctacgttcacgcctgcgacgccgaacaagcgtggttcgtccgactgaaccacatcacccactacgggaccgacccgcagctggagaacataaccgtccacgccgaagaaccgctgatattcctgaacatgcagggcgtccccgactccaccgtgctgatctgggagcacatagaggactcgcccggcaaacgctgccccaacccgcgcgtcatcctgccccgccgcctcatgcccaactgcgtgaacggggcggtggaggtgcacgtccgaaacttcggcttccgcaccccgccgtgcacaagggagaagccctcctacggcatcgcgggcttcctgcacgtgctgccccccgcgctgggatggatatggcgcctgatctccccccgcggctacgacaaccccagcgtcaccgacgacgacgcgatacgagcagctcgtccataa

SEQ ID NO: 28818 - protein, 427 aa, Unknown
  Obtained from environmental sample
  misc_feature (1)..(427): Xaa is any amino acid
MGGAGNKSYDVSYDVPGKGPVVEATVVKCKNGLAVNYAEPYMRRRDPDCTVVGDSKPSDKERFSERFGGDFDKVRADTFDWLKKQELTALAFTLGESSHGALMIAPRNAGFFVGGLADLQGMLNPLEVPDNFQIACVMYVAPPFRHTHFNGKQVVVHNRLNEVHEIFSYNLYPGPSAKKGVYGALLTIGEQENWLTLHAATVQVVTPYDNITTIMHEGASGSGKSEMLELVHREWDGRLLLGRNTKTGARRIISMNQTCSLYPVTDDMAMCPHEVQDKGGYVHACDAEQAWFVRLNHITHYGTDPQLENITVHAEEPLIFLNMQGVPDSTVLIWEHIEDSPGKRCPNPRVILPRRLMPNCVNGAVEVHVRNFGFRTPPCTREKPSYGIAGFLHVLPPALGWIWRLISPRGYDNPSVTDDDAIRAARP

SEQ ID NO: 28819 - DNA, 423 bp, Unknown
  Obtained from environmental sample
  misc_feature (1)..(423): n is a, c, g, or t
ttgtacggtattatgaaactgcttttggtattggattcggatgaaagttacaatctcatttcgctttacgtcaaacctctgggctttgagctgatccgttaccgccacgccgttaaggcaatggataacatcgacgaagttgaccccagggcaattgttataagcgcaagggattttccccgccactggaaaactatggtgcagtttttcagatctgagcgttccagggatgagtgtccggtaattattcttaccggtgaggattttaccgttgaagaaagatccaaagcttctttccttggagtaagcggcaccattcttgaaaaattggacagccccgcggaaattgagcgctttcacggaataataagccgttatcttccggttgatgaaaaacgcgcgcagccgccgttttcatgttga

SEQ ID NO: 28820 - protein, 140 aa, Unknown
  Obtained from environmental sample
  misc_feature (1)..(140): Xaa is any amino acid
MYGIMKLLLVLDSDESYNLISLYVKPLGFELIRYRHAVKAMDNIDEVDPRAIVISARDFPRHWKTMVQFFRSERSRDECPVIILTGEDFTVEERSKASFLGVSGTILEKLDSPAEIERFHGIISRYLPVDEKRAQPPFSC

SEQ ID NO: 28821 - DNA, 978 bp, Unknown
  Obtained from environmental sample
  misc_feature (1)..(978): n is a, c, g, or t
gtgaatcggaaaaacgctccggactttcgtccgttaatgcttgttctgctcgttttttgcggtgtttcattgcttccggcggcagaggcggggattgattttagcatccgttattttgacaagcgggtgtattaccttgaacaagacccgatttttatccatgttacgataacaaacaacagcccgtatacatacaggttcaaattggcggatgagcgggctttttccgtggattttgacgttaggacgaacagtaaccgtgttgtggaagcggcggatattttggttcgcaaacggagccagagccagcaggtttacttcagggaagtttcagtagagcctggggaatctttttcctttgtcgaggatctgaagaattacgccgctctgactcaaagcggtacttatgtggttcaggcaatgatctaccctgaactttaccatgtaatcaaacctgagacctcaggaatattatcaaaccgccttgcgcttaacataaggccggcgctcatacccggcccggatggtatcccgcttgaactggatgtagaaaccaatgccgttcttgtccgcgagaaactccctcccgacgaggttgtgagttatatgctgacagccagacagaaaagccagtgggaaaagttcttcctttaccttgatctggaagccatgcttatacgagacgcataccggaggcggcagtacaacgcggaatccgaagagggccgccaaaggatgcttgcccggtaccggctggatatgcagaattccgtgatagacggggacatttcgcttattcccatgaattttataattgagcgtactacccataacgggcagtcgggaacagtaaccgcgctggaatatttcagggtgggttcatatacggagaaaaagcgctatacatggtatctcgaaaaaagagacgagatatggacaattgtggattattcggttgtcaatctgggaaccgaataa

SEQ ID NO: 28822 - protein, 325 aa, Unknown
  Obtained from environmental sample
  SIGNAL (1)...(27)
  misc_feature (1)..(325): Xaa is any amino acid
MNRKNAPDFRPLMLVLLVFCGVSLLPAAEAGIDFSIRYFDKRVYYLEQDPIFIHVTITNNSPYTYRFKLADERAFSVDFDVRTNSNRVVEAADILVRKRSQSQQVYFREVSVEPGESFSFVEDLKNYAALTQSGTYVVQAMIYPELYHVIKPETSGILSNRLALNIRPALIPGPDGIPLELDVETNAVLVREKLPPDEVVSYMLTARQKSQWEKFFLYLDLEAMLIRDAYRRRQYNAESEEGRQRMLARYRLDMQNSVIDGDISLIPMNFIIERTTHNGQSGTVTALEYFRVGSYTEKKRYTWYLEKRDEIWTIVDYSVVNLGTE

SEQ ID NO: 28823 - DNA, 684 bp, Unknown
  Obtained from environmental sample
  misc_feature (1)..(684): n is a, c, g, or t
gtgaaggaaataaaacttttacaggaaggcattgacgctttaagtcaaagcgataaagacattgagcgccttatcgccccccgcgccgaagaagttatttcgcggcttacaagctacataaacgaaattgagctctttaacgaggcatatggacttgtaggagccgcaaacacagaagaactggtaattaaacacattcttgattctctagcgccgcttggaatcatattgcgcttgttaaaaaccggcgaaacagaaaagccgcaaatagccgatgccggttccggcgcgggacttcccggtatcccgctttcccttgcccttcccggcttcgactttacccttattgagcgcatggggcgcagggcgggatttttatggaacacaaaggcaagcatgagcatttccaacataaccgtagaagagggagaactggaaaaaaccggacatgagcgttttcaccttgttacattccgcgctttcaagcccttggagactaaactgctcaagactcttttcaaagtttgcgtaaaagggggcgttatcgccgcctacaagggaaagcgcgaaaagattgataaggaaatggcgcgtcaggactgtaattgggaagcaatcccatataaagtcccatttttagacgaggaaaggcatcttttagtgataaaggcgccaaaaatctga

SEQ ID NO: 28824 - protein, 227 aa, Unknown
  Obtained from environmental sample
  DOMAIN (32)...(220): Glucose inhibited division protein
  misc_feature (1)..(227): Xaa is any amino acid
MKEIKLLQEGIDALSQSDKDIERLIAPRAEEVISRLTSYINEIELFNEAYGLVGAANTEELVIKHILDSLAPLGIILRLLKTGETEKPQIADAGSGAGLPGIPLSLALPGFDFTLIERMGRRAGFLWNTKASMSISNITVEEGELEKTGHERFHLVTFRAFKPLETKLLKTLFKVCVKGGVIAAYKGKREKIDKEMARQDCNWEAIPYKVPFLDEERHLLVIKAPKI

SEQ ID NO: 28825 - DNA, 993 bp, Unknown
  Obtained from environmental sample
  misc_feature (1)..(993): n is a, c, g, or t
gtgcgtaaaatactgctgagggcagtacagcaggatccttccctgcctgaaccgcactatcatcttgcccgttattacaagaatcttggcaatgatcatgaggaaagggttaccctggagatcgccctcgaccgctttggaaaagcggaggaaagcaatctgcgccgtcttactagccgcattgacgcctaccagcgttatgctgataatctgattaacagcagggaattcctgcatgccgaagagcagctgcaaaaaggaattgaactgtacgaggacgctatgtcacggcggctcttgtcaagctcgccccagtacggaagactctacgcggggcttggcgacctggagtattttgtaaagacaggggatatggaagccgctctgcgctattataacatggcacagcagaacggatgggcgccgcctgatatgcaataccgcatgggcgccgcttattatcagcttggcgactggcggaatgctctggagaatttctttaccgcttcctcaaagctgccccagaaccgccgcatattgtttgcgcttggaaactcggctcttaaacgcggcgattattttgccgcccagggttattacagccgcctgcttgacatgcttgaacgccagcgtagccgcctgccgctgctgctgcccaatgaccgccccgagtacctggatcttgccgagcgtttgatgatggcccgcaacaatgccggcgtcgccaaccagatgcttgccgccaggaccggaagccggactaaccagtcgcgcgctatgtctttatactcggaagcgcagcgcgcatgggattcccttacccgtgaaccccgttcaatggttcgttcgggcagtatatctctgccatccctgaacatcaggaacattctttatccgcagcaaaattatgagcctcaaatgtttatgcgtatagacagggaagcctcggaattctcacgctgggagcagcttgccccggcattcagggactag

SEQ ID NO: 28826 - protein, 330 aa, Unknown
  Obtained from environmental sample
  DOMAIN (143)...(176): Tetratricopeptide repeat
  misc_feature (1)..(330): Xaa is any amino acid
MRKILLRAVQQDPSLPEPHYHLARYYKNLGNDHEERVTLEIALDRFGKAEESNLRRLTSRIDAYQRYADNLINSREFLHAEEQLQKGIELYEDAMSRRLLSSSPQYGRLYAGLGDLEYFVKTGDMEAALRYYNMAQQNGWAPPDMQYRMGAAYYQLGDWRNALENFFTASSKLPQNRRILFALGNSALKRGDYFAAQGYYSRLLDMLERQRSRLPLLLPNDRPEYLDLAERLMMARNNAGVANQMLAARTGSRTNQSRAMSLYSEAQRAWDSLTREPRSMVRSGSISLPSLNIRNILYPQQNYEPQMFMRIDREASEFSRWEQLAPAFRD

SEQ ID NO: 28827 - DNA, 531 bp, Unknown
  Obtained from environmental sample
  misc_feature (1)..(531): n is a, c, g, or t
atggcggcaggctggacaattgaaaaaatccaggctgcttttgctgtgggttcagcgtctaaaattccaacagcgcggataatgcccaatacgccagcattgatctcaaaaggcatgatcgcccttgccgtatcgccggaagtctccggtgaaaaagccgatgcgttagacgcaatgctcaagggagccggtactgttgacaggatttctgaaaattactttaacgccgttacgggcctttcaggttccggccccgcgtttgcgtttctgttcatggaagctcttgccgacgggggtgtcctcgccggtctgccccgcgacaaggctctgtgttacgccgcacagaccgtgcttggctccgcggcgatggttttggaaacgggcaaacaccccggagaacttaaagacatggttgcctctcccggcggcacaaccattgccggcgttgcctcgctggagtcaagcagcttcagagccgccgcgatacaggccgtaacagccgcgtggaagagggcaatggaattgggctag

SEQ ID NO: 28828 - protein, 176 aa, Unknown
  Obtained from environmental sample
  DOMAIN (1)...(160): NADP oxidoreductase coenzyme F420-dependent
  misc_feature (1)..(176): Xaa is any amino acid
MAAGWTIEKIQAAFAVGSASKIPTARIMPNTPALISKGMIALAVSPEVSGEKADALDAMLKGAGTVDRISENYFNAVTGLSGSGPAFAFLFMEALADGGVLAGLPRDKALCYAAQTVLGSAAMVLETGKHPGELKDMVASPGGTTIAGVASLESSSFRAAAIQAVTAAWKRAMELG

SEQ ID NO: 28829 - DNA, 660 bp, Unknown
  Obtained from environmental sample
  misc_feature (1)..(660): n is a, c, g, or t
atgcggataaaaatttgcggattgtcccgcagcgaagacattgattatgtaaacgaaggacgtcccgattacgccggttttgtattcgcgcaaagcaagcggcaagttacacacggcaccgcggagcgtttgcgctcccgccttgaggaaggcattgtacctgtcggtgtttttgtaaacgcgcaaattgacgagattgccgccctgtacaataacggcgtaatttccatagcccagcttcacggcggcgaagatgacgattatatcgcgaggctaaaggaaaaaagcaacagccttccggtgatcaaggtctgcaagtttttatcaataagacgggaaaaaaactcaacagaaaaggaagaagacaaccgggactttgcgtatttcgcgtactctggaataataaacaataaaagagcggattatatccttattgattcgggagcgggatcgggaaaaacttttaattgggacttactgaaaaaattaacgattgaaaaaccgtggtttcttgccggaggcattaattctgacaatatagtcaaggctattgcgttaaaccctttcgccattgatgtcagcagcggggccgaaacggacggtatcaaaaaccgcgaaaaaatattacaattaatcgctatcgcaaaaaaaggaaaataa

SEQ ID NO: 28830 - protein, 219 aa, Unknown
  Obtained from environmental sample
  DOMAIN (3)...(214): N-(5'phosphoribosyl)anthranilate (PRA) isomerase
  misc_feature (1)..(219): Xaa is any amino acid
MRIKICGLSRSEDIDYVNEGRPDYAGFVFAQSKRQVTHGTAERLRSRLEEGIVPVGVFVNAQIDEIAALYNNGVISIAQLHGGEDDDYIARLKEKSNSLPVIKVCKFLSIRREKNSTEKEEDNRDFAYFAYSGIINNKRADYILIDSGAGSGKTFNWDLLKKLTIEKPWFLAGGINSDNIVKAIALNPFAIDVSSGAETDGIKNREKILQLIAIAKKGK

SEQ ID NO: 28831 - DNA, 435 bp, Unknown
  Obtained from environmental sample
  misc_feature (1)..(435): n is a, c, g, or t
atggccgagctcaccgttgccgcagctgagactgccacgaccctctacgtcattgcgacctccagggcaaataccgaaaaatccggctccatcgccgtaacgattccaaccgtaaccttggtaaccgttaaccctgcaaacgtgcaaataaagaggggcgaaggtcaggcctttacagccagggtagagggtaccggcgacccaggccaggaagtaacgtggaaggttgaaggcgttggcggcgcggcgataaccacaataaccaccaacggcgtgctaatagtcagcacgatggagacgttgacgcatcttcttgttacagccacctctgtagatgaccccacgaaattcggcaatacgctggtaacgatacctgcaaccccgactgctataatccctgccgcgccaactacaactaccgccgacggttcttaa

SEQ ID NO: 28832 - protein, 144 aa, Unknown
  Obtained from environmental sample
  misc_feature (1)..(144): Xaa is any amino acid
MAELTVAAAETATTLYVIATSRANTEKSGSIAVTIPTVTLVTVNPANVQIKRGEGQAFTARVEGTGDPGQEVTWKVEGVGGAAITTITTNGVLIVSTMETLTHLLVTATSVDDPTKFGNTLVTIPATPTAIIPAAPTTTTADGS

SEQ ID NO: 28833 - DNA, 786 bp, Unknown
  Obtained from environmental sample
  misc_feature (1)..(786): n is a, c, g, or t
atgaaagtttttcgcctgagtttcaaggtgcagattgtctggcgttttgatgtggctatgaccatggttgccacagtaggccgcattatcgcagcgtggatcgtatggaatgtgatttttagttccaatgataccgttaatggttttagcctcatcgccatgctgtcctattacattatcagttcaatactgagctcagttgatttttcatatcaaatctcgggcgaggtttcggacctaatacgcgccggaaggttctcagggcatatgattacaccaatgaacccgttccttttttttagcgccatgaccgcaggtgaatcagcgttccacttgggtttcagccttcttgcagctgcgatttgcgccgcgatatttcaggtaaatgtgacaatcacaagcgatgctgtcagaatacttatcgctctggcaatgataccgactggacttatgttcatgtcctgttatcattattttatcgggatactgacgttcaagttccttgaaatcgaattcttcatgcatgtgcagggggcaatcatcgcgttcgcgacaggctcccttgtcccgctttcattgttgccagaagaagcgcttctggttctgcgcttccttccgttcacacacgtcgtgtacacgccggccatgctgctctgcggtcagttaagcgcggaggaggggcttttcggcctggctgttatcgtggcatgggcggtattaatgccggctgttgtgcagttcgcgtacagccacctgcgggtaaaatacgacggggtgggaatatga

SEQ ID NO: 28834 - protein, 261 aa, Unknown
  Obtained from environmental sample
  DOMAIN (23)...(261): Protein of unknown function (DUF990)
  misc_feature (1)..(261): Xaa is any amino acid
MKVFRLSFKVQIVWRFDVAMTMVATVGRIIAAWIVWNVIFSSNDTVNGFSLIAMLSYYIISSILSSVDFSYQISGEVSDLIRAGRFSGHMITPMNPFLFFSAMTAGESAFHLGFSLLAAAICAAIFQVNVTITSDAVRILIALAMIPTGLMFMSCYHYFIGILTFKFLEIEFFMHVQGAIIAFATGSLVPLSLLPEEALLVLRFLPFTHVVYTPAMLLCGQLSAEEGLFGLAVIVAWAVLMPAVVQFAYSHLRVKYDGVGI

SEQ ID NO: 28835 - DNA, 762 bp, Unknown
  Obtained from environmental sample
  misc_feature (1)..(762): n is a, c, g, or t
atggcgacaatgaaagcgtcagaggcgattatcaagatccttgagacagaaggtatcacggcggcttttggcatccctggggccggtattaacggcctgtataaatttctggggcaaagcaaggttatcaggcatttctgccaccgtcatgaagaagccgcagtacacgccgcaggtggttacttccgggccagcggaaaaatagcggcggcgatctgcacatccgggccgggcgctaccaatttcgttaccggcgtttattcctgcaatatagacagcattccggtaattgccattacgggacaggccgtgtgcgcccagttgggcaaagacgcctttcaatgcgtagatatcgcgaagatctgcgagcctgtagcgaagaaaacctactgtgttaccgatccgaaaaaagttgtggaaacatttaacgaagcgttttaccttgcaagggaaggcaagccgggggccatcgtggtcgatcttccccttgatgtgcaaaacgccgatatagagtttgatcctgcttcatacaagagccgcccagttacagcgcctgagcctgccgccgccgacattgccaaggccgtcaaaatgatcggcgaggccaaaaacccggccctgcttttaggcggcggagtcatcctcgccgatgccgctaaggaagcggtagaacttgcggaaattttaaagacgccggttatttgtacctacatggcaaaaggggccattcccgaggagcatcccctcaatgctcgccgataa

SEQ ID NO: 28836 - protein, 253 aa, Unknown
  Obtained from environmental sample
  DOMAIN (4)...(174): Thiamine pyrophosphate enzyme, N-terminal TPP binding domain
  misc_feature (1)..(253): Xaa is any amino acid
MATMKASEAIIKILETEGITAAFGIPGAGINGLYKFLGQSKVIRHFCHRHEEAAVHAAGGYFRASGKIAAAICTSGPGATNFVTGVYSCNIDSIPVIAITGQAVCAQLGKDAFQCVDIAKICEPVAKKTYCVTDPKKVVETFNEAFYLAREGKPGAIVVDLPLDVQNADIEFDPASYKSRPVTAPEPAAADIAKAVKMIGEAKNPALLLGGGVILADAAKEAVELAEILKTPVICTYMAKGAIPEEHPLNARR

SEQ ID NO: 28837 - DNA, 906 bp, Unknown
  Obtained from environmental sample
  misc_feature (1)..(906): n is a, c, g, or t
atgacagaatcggccgagcggataaaagtcttcctgtttccatttcaagagatctggggctatcttgtcgcgggctttgagcaggggcttaatttgaattaccctgttacagatctggtttactttagcgccgacgtgaattcttacggcaaacttattggcattcccaatattaaaaatatttcatcttttcgcggcagaaaacatttaatagcgacttgcaacggcatagcgcttactcactttgttcttatggaaggaagcaacgagcgaaaagctttaatcagtgatctattggaagccgcaaaaccatacgacggccttcagattgattttgaaagcgtatcagcccgtgacggaggagcctttctttcatttctgggtgaattacgcgccggcctgggaaacaagatcttttcagttgccctcatgggcaggaccagggccaataatgatgatattcagacttattacgcaagaataagacccatagtggatcgcctttttgttatggcatatgacgaacactggtcaggcggcgagcccggccctgtcgcttcaatggattggtgccagagggtagcccgttacgcactggataccatcggtgcggaaaaactggtcatgggactgccattctacggcaggagctggggaactccgaacaccaaccgggctttgatctattcaaccactgaaggtgttatgagagaccaaaaaataacggaagtacagagggaaaagggcatcccctatttcaaatacacaataccggtttcggtaacgctctattacgaggacgcttattcccttgctaccaggcttgatatgtataacagaatgggtgtaaatcaggtcggcttctggaggctcgggcaggaaaccagggcgttctgggcccaatag

SEQ ID NO: 28838 - protein, 301 aa, Unknown
  Obtained from environmental sample
  DOMAIN (16)...(294): Glycosyl hydrolases family 18
  misc_feature (1)..(301): Xaa is any amino acid
MTESAERIKVFLFPFQEIWGYLVAGFEQGLNLNYPVTDLVYFSADVNSYGKLIGIPNIKNISSFRGRKHLIATCNGIALTHFVLMEGSNERKALISDLLEAAKPYDGLQIDFESVSARDGGAFLSFLGELRAGLGNKIFSVALMGRTRANNDDIQTYYARIRPIVDRLFVMAYDEHWSGGEPGPVASMDWCQRVARYALDTIGAEKLVMGLPFYGRSWGTPNTNRALIYSTTEGVMRDQKITEVQREKGIPYFKYTIPVSVTLYYEDAYSLATRLDMYNRMGVNQVGFWRLGQETRAFWAQ

SEQ ID NO: 28839 - DNA, 1455 bp, Unknown
  Obtained from environmental sample
  misc_feature (1)..(1455): n is a, c, g, or t
ttgggcatgaccatggacggttctatcgtcatacttgaaaacatccataactaccgcctgcgcggagcaaaacccgaaattgccgcgatccttggaagcagggaaatgctcagggcaatcattgcttcggcggctactactctttgcgtgtttattccccttatcatttacaagaacagccttgaaatgatgggacagctcttcaacgatttgatttttacggtggtaatttccctgagttgttcacttatcgtagcggttaccctggtaccgagtctctgcggttcctttttaaaactcaacaccagaaaacaaaagcccctgaaaatacgcttgctaagggccattgacaacgggtttgagaaggttttaatcaccatggaaaacagctacaaaggggcgctgggctactgtctctcgcaccggcttcttgtatcaacccttgctctggtgattctgctgttttcccttttacagtttaacagcatcgggatgaacatgtatttccgaagcagaaccgatgataacgtgaatatcaacgttgctatgccccttggtacagcaatcgaagaaacggaaagaattctttttcaactggaagatttaattaaagaagagatagaggggtacaacagtatcattcttaccgcaaggcgaagcggttccggcagtattcagattacgcttcccgagccgaccaagcagatcgataatcccgaaaccattatcaataaattgacgccttataccacttccatacctggggcaagggttagtttccgggcaggccgttttatggcttcaagtaccccgatggaaatttcgcttacttccaggagctacgacgctatcatagaaaccggcaatgaaatcgttcacattcttgagcgccatcttcctgaaatcgagaacccggcggtgaacattgaagaaggtgcacctcagttaatcgtcaatatagaccgcgacagggccgccgctctgggagtgtcgatgtcttctatcgcttcggagattcgtaccgccatggacggtagtaccgccgcaaccgtgagcatgggggatcggcttttaagcgtaagggttcagttgcgcgaggaagaccgcaccggaataccaaacctggacgcgatctccgttgttagcagaaacggctcaaggatttccctgtccaacgttgctgaaatcgttgagagccgtgcgccgacttccatacgccgtgagaagcaggaacgggttgtacgcgtaactggaggactacccgcaggaattgccgtaagcgaaatgcagaagcggcttgaagcaacggtgaaggaataccttattccccacgaaggcgtaacggtcagttttttgggagaagccgcagaaattcaacgctactacgggcattacattctgattattatcacagcgatcttccttgttttcagcgtaagtggccagtcagtttga

SEQ ID NO: 28840 - protein, 484 aa, Unknown
  Obtained from environmental sample
  misc_feature (1)..(484): Xaa is any amino acid
MGMTMDGSIVILENIHNYRLRGAKPEIAAILGSREMLRAIIASAATTLCVFIPLIIYKNSLEMMGQLFNDLIFTVVISLSCSLIVAVTLVPSLCGSFLKLNTRKQKPLKIRLLRAIDNGFEKVLITMENSYKGALGYCLSHRLLVSTLALVILLFSLLQFNSIGMNMYFRSRTDDNVNINVAMPLGTAIEETERILFQLEDLIKEEIEGYNSIILTARRSGSGSIQITLPEPTKQIDNPETIINKLTPYTTSIPGARVSFRAGRFMASSTPMEISLTSRSYDAIIETGNEIVHILERHLPEIENPAVNIEEGAPQLIVNIDRDRAAALGVSMSSIASEIRTAMDGSTAATVSMGDRLLSVRVQLREEDRTGIPNLDAISVVSRNGSRISLSNVAEIVESRAPTSIRREKQERVVRVTGGLPAGIAVSEMQKRLEATVKEYLIPHEGVTVSFLGEAAEIQRYYGHYILIIITAIFLVFSVSGQSV

SEQ ID NO: 28841 - DNA, 618 bp, Unknown
  Obtained from environmental sample
  misc_feature (1)..(618): n is a, c, g, or t
atgcctgagatacttcttgccgcaatcaacgccaaatggatacacccctcgcttgccctgcggcttcttaaagcgaaccttggcccgctggaaagccgctgcgatattattgaatttgccctgcgccagcccttatgcgaaaagacagagcccctgctgctggcccggccaaagatactcggcctttcggtatcaatctggaatcataccgctacgctggaactgctaaagaaattgcaggaagcatggatgcttgaggctgttcaaaaacccgtcgtcatcctcggcgggcctgaagtgtcgtatctgccgcaggaagccgagatatttcaatatgcggattattgtatccgcggcgaaggggaaaccgcgtttcggaaattgtgcgaagcaattttaaataaaggtgacgtttttattaaccgtgtatttcatacggttacggaaattaaaagcggttacagcttgtataccgatgaggatctaagcaagaaacttatatatgttgaaacaagcaggggctgtccctttggctgcgaattctgcttaagcgccgtaggctccagcgccggctacgactccagggtacgggaattcccgctgaccgtttttttctga

SEQ ID NO: 28842 - protein, 205 aa, Unknown
  Obtained from environmental sample
  misc_feature (1)..(205): Xaa is any amino acid
MPEILLAAINAKWIHPSLALRLLKANLGPLESRCDIIEFALRQPLCEKTEPLLLARPKILGLSVSIWNHTATLELLKKLQEAWMLEAVQKPVVILGGPEVSYLPQEAEIFQYADYCIRGEGETAFRKLCEAILNKGDVFINRVFHTVTEIKSGYSLYTDEDLSKKLIYVETSRGCPFGCEFCLSAVGSSAGYDSRVREFPLTVFF

SEQ ID NO: 28843 - DNA, 1668 bp, Unknown
  Obtained from environmental sample
  misc_feature (1)..(1668): n is a, c, g, or t
gtgtttcgtctcacggcggcggtctggtcatgggggctatgccgnctttttggcatcaagctctcggtgatctcgacagtccttccggtgatcctggtggcggttggcagcgcgtacggcatacacattgttacccattaccttgaagctgttaaaggaaaagacgaaatgagccgggaagaacacaattccataattttttctttacttggaaaaattgggaaggcggtatttctggcagccataacaacgcttgccggctttatttcttttggttttaccagcgttgtaccaataagagaattcagctatttctccacttttggcgttctggtttcttttttagtcgcggtaaccctgatcccgtcactcttgataatccgggggccccggaccttggcggtaaaagataaaaaagcggatgccgttgattcagccattaccggcgctttagtcaggatagcgggcagaaggacggctgttgtttttgccgtgggaattattattgccctttcggtttggggagtttcaaaaattgtaatcgataatatttttgttgagtattttaaaactacaactgacatatacagatccgatcgttttataagggaaaaattcggcggttcgaaaattgtcagcgttgttgcccaggcggatgataccgagacgctgcttatgccggaagccctcctcgccatggacaatctgggcgcttacctggaggaaaacgtaagtgagattggcaaagtaatgggctttacagatcttgtcaagcggattaaccaggtctttaacgccgacgaaagccccgacggtttaaagccgtcttcggcgtccgcgggtgatgaattcggctttggctttgatgattcttctccggagtcattaggttttggtttcggcgattttgatcagcaaggcggggcggggcagggcagggctgttgacgcctctgttgcctctaaagaagaaacggcttacacccggagcgaatttgtcgccctgctggacagcgcgggaagccaattcaggggaatgaacgccaacgatcttattttggaactaaagcgccggattaattacgaaggcgcttcgtactacgaaattcctgccgaccccaaacgctacggcaaggaaactcaggctgaattgacgcggctgatagctaactacctggttcttctgtcgggaaacacaagcggttatgccaacgatcctcttgaaccgacggcggttaaggcgacggttcaactgcgcaccctgggcatggccgacagcgaggaaatttttaacgagattgacaggtatgtcgccgcgaatttcccgaaggatgtctccgtgaccgtagggggccagacaatggttgagaaatcgcttaacaaccttgtggtgcaatcgcagcttgtttcaatgcttttttcgctcctgtgcgtttttatcataatcgccgtttccaacaaatcgctgatagcgggctgtatcggcataacgcctctttcaatctcgatacttatcaatttcgcggtcatgggctttgcgggaataaagctgaaccttggcacctcgatggtggcggctgtttcggtcggcgtgggcatagactacacgatccactgtctggaggcctacaaaagggagtacagggcctcgggcgagacccggcgataa

SEQ ID NO: 28844 - protein, 555 aa, Unknown
  Obtained from environmental sample
  misc_feature (1)..(555): Xaa is any amino acid
MFRLTAAVWSWGLCRLFGIKLSVISTVLPVILVAVGSAYGIHIVTHYLEAVKGKDEMSREEHNSIIFSLLGKIGKAVFLAAITTLAGFISFGFTSVVPIREFSYFSTFGVLVSFLVAVTLIPSLLIIRGPRTLAVKDKKADAVDSAITGALVRIAGRRTAVVFAVGIIIALSVWGVSKIVIDNIFVEYFKTTTDIYRSDRFIREKFGGSKIVSVVAQADDTETLLMPEALLAMDNLGAYLEENVSEIGKVMGFTDLVKRINQVFNADESPDGLKPSSASAGDEFGFGFDDSSPESLGFGFGDFDQQGGAGQGRAVDASVASKEETAYTRSEFVALLDSAGSQFRGMNANDLILELKRRINYEGASYYEIPADPKRYGKETQAELTRLIANYLVLLSGNTSGYANDPLEPTAVKATVQLRTLGMADSEEIFNEIDRYVAANFPKDVSVTVGGQTMVEKSLNNLVVQSQLVSMLFSLLCVFIIIAVSNKSLIAGCIGITPLSISILINFAVMGFAGIKLNLGTSMVAAVSVGVGIDYTIHCLEAYKREYRASGETRR

SEQ ID NO: 28845 - DNA, 1119 bp, Unknown
  Obtained from environmental sample
  misc_feature (1)..(1119): n is a, c, g, or t
atgataaaaaacctcccgtttttggaaaccgcggttgacgagcaatggcttgctgacaatttttattcaataatgcttcccggccttcccggcctgtccggcctcgccaccataataagttttatctgggcgggcaggctccttgccgtgtccctgcaaagggggcttaaaataattttttccgggaagagaaaacggaatccggcgttggatacccttgtaatcctcgccgttgagctgcccgctttgctcctgtcccttgcggtaatattttcttcacgcgcggccttccgcctgtatgaaactttcaattttattcccaaaactccgttattcgctttcttggtatcaaaacagggatattttgttttaactgcgatgatattgggccttgtcacgtattccgcgtaccgcctgatcccggcgaatccgcccaggcgcgtttcggctttttacggcggcgttttctgcattattttatatgaaattatgtcaatggtattgagaataatgctcgggcagtcaaagtataattttctttacgggacgcttggaaaccttatcacgctccttataaacgtatatttctttttcctgtttttcctgatgggcgggcagttcgcgtacgtttcggattatcttgattcgtatctttttatcaagatgagaaaggcgaggattaagacccgagcagggagattttcaatatcatcaaaggccctggacagcctgtttttatccgtggaaggcagcctgcgaaagtattaccgttttcataaaaaaggggaaaccgtcttttctgaaaaagacaagatagactcgatctattatatactggagggtgaagttgaatcgctggttttatcaggcccgaacaactacacccggaccgggatcatcggccccgattctttctttggcgaaatgggctatatgctttccgaggaccgcgtcaccacgatcagggcgaataccgacgtctcggtccttgcccttcccccccgtattttcgaagccgttcttcagcacgacgccagcctcgacagaacccttatcgagaatttgtacaggacgctgaaggataagaaccagcagttggcgatgaatacaagggaatag

SEQ ID NO: 28846 - protein, 372 aa, Unknown
  Obtained from environmental sample
  DOMAIN (256)...(346): Cyclic nucleotide-binding domain
  misc_feature (1)..(372): Xaa is any amino acid
MIKNLPFLETAVDEQWLADNFYSIMLPGLPGLSGLATIISFIWAGRLLAVSLQRGLKIIFSGKRKRNPALDTLVILAVELPALLLSLAVIFSSRAAFRLYETFNFIPKTPLFAFLVSKQGYFVLTAMILGLVTYSAYRLIPANPPRRVSAFYGGVFCIILYEIMSMVLRIMLGQSKYNFLYGTLGNLITLLINVYFFFLFFLMGGQFAYVSDYLDSYLFIKMRKARIKTRAGRFSISSKALDSLFLSVEGSLRKYYRFHKKGETVFSEKDKIDSIYYILEGEVESLVLSGPNNYTRTGIIGPDSFFGEMGYMLSEDRVTTIRANTDVSVLALPPRIFEAVLQHDASLDRTLIENLYRTLKDKNQQLAMNTRE

SEQ ID NO: 28847 - DNA, 852 bp, Unknown
  Obtained from environmental sample
  misc_feature (1)..(852): n is a, c, g, or t
atgataagaaatttttatcctaaatataaagaccacaagatagcggtaatttccccctgcatcgccaaacggcgggaatatgacgaaacaggtctgggcgattacaacgttacaatgattgaactaaaaaaccttctggacagccagaaaataagcctctcctcatttccaaaagtagaatatacaggactgagcgcggaacgtgcggccgggtttccaattcccggagggcttttggataccgccgagcgttttaaaccgggcatcagacggcgcacagaaaagattgaaggggttcataacatctatccttacttgaatgaaatatcaaaaattctgaacatcaatgccaaacttccgttattggttgactgcctgaattgcgaaaaaggctgtatcggcgggcccggcacggggaacgccgaaaagccacttgccgagcttaaggaaccggtactaaaacgcatggatgagctggaagaaaagcaacattctctaatcggaaatgacgcatacaaaaaataccacaatgctttgggcaagtactggaagaaagggctgtataaccggagctaccgcaatctttccgagaacaatacaatcaagcatccgagcgaaactgaaataactgaaattttccacactatgaaaaaattcagaaaggaagacatatacaactgtacctgctgcggttacggaagctgcaaggcgatggcaacggctatttacaacaacctgaacaaacatgaaaattgcgcccattatattctcgccttgctcaaggagattcaggaacacatagccaacgcttcaaaccttattggaaatataacgattattttcaggaattga

SEQ ID NO: 28848 - protein, 283 aa, Unknown
  Obtained from environmental sample
  misc_feature (1)..(283): Xaa is any amino acid
MIRNFYPKYKDHKIAVISPCIAKRREYDETGLGDYNVTMIELKNLLDSQKISLSSFPKVEYTGLSAERAAGFPIPGGLLDTAERFKPGIRRRTEKIEGVHNIYPYLNEISKILNINAKLPLLVDCLNCEKGCIGGPGTGNAEKPLAELKEPVLKRMDELEEKQHSLIGNDAYKKYHNALGKYWKKGLYNRSYRNLSENNTIKHPSETEITEIFHTMKKFRKEDIYNCTCCGYGSCKAMATAIYNNLNKHENCAHYILALLKEIQEHIANASNLIGNITIIFRN

SEQ ID NO: 28849 - DNA, 771 bp, Unknown
  Obtained from environmental sample
  misc_feature (1)..(771): n is a, c, g, or t
ttgcgcccattatattctcgccttgctcaaggagattcaggaacacatagccaacgcttcaaaccttattggaaatataacgattattttcaggaattgaacgatactataggctcacaggcagaggcagttgataattcagcgacggagactgaagaaataataacctcgattaaaagcacatcggaagtctcccacaaacagcaagaatctttgcacggattaatagaagttgccgaacagagcaaagaatctatggaaaaaaccattcaatcaattcatgaaatctctcaatctgttgaaggtataagctctgcaatccgcataatttcttcgatagcggcaaataccaatttattgtcaatgaatgctgcgattgaagccgcccacgccggagatgccggaaggggctttgcggtagtcgccggagaaatacgccgcctttcggaaaccaccagagaaaattcagtaagcatttcccgtacacttaaaaatattattaacggaatatccgacacgacaaaacaatccggcgtaacagatgcacgaatagcccaaatgtccaaagagataagcgggtttgccgaaaccatgtctgtttttatgaacacatttaatgaattatcagcaaaaagcgaaaacattacagcctcccttgtaagcctaaaagagcagagttcggcggttaaaacaagttatgctcaaatgattgaaatgacagataaacttgccaaagcgttgaaagacttgtccgaattgtcaaaaagataa

SEQ ID NO: 28850 - protein, 256 aa, Unknown
  Obtained from environmental sample
  DOMAIN (38)...(252): Methyl-accepting chemotaxis protein (MCP) signaling domain
  misc_feature (1)..(256): Xaa is any amino acid
MRPLYSRLAQGDSGTHSQRFKPYWKYNDYFQELNDTIGSQAEAVDNSATETEEIITSIKSTSEVSHKQQESLHGLIEVAEQSKESMEKTIQSIHEISQSVEGISSAIRIISSIAANTNLLSMNAAIEAAHAGDAGRGFAVVAGEIRRLSETTRENSVSISRTLKNIINGISDTTKQSGVTDARIAQMSKEISGFAETMSVFMNTFNELSAKSENITASLVSLKEQSSAVKTSYAQMIEMTDKLAKALKDLSELSKR

SEQ ID NO: 28851 - DNA, 774 bp, Unknown
  Obtained from environmental sample
  misc_feature (1)..(774): n is a, c, g, or t
ttgtcggagcaacaacctaaacagcccgcgcagccgcaggattcggcggcgcaggggggcgccaagcctgccgagaagagcggtctcctgcggtttttcagggagatggggtcggcgcttgtcatggcgcttatcgccatcgtctacgtgatacaggccttccagatacccacggggtctatggaggacagccttttggtgggcgattttctgctggggctgaagttcatctacggcgcgccgctgctcccgtactcgcgggagctggggatcacgcgcaggctgccggcggtggccaagccgaagccgggcgacgtggtgatcttcaagtacccgggggcggacgccaaggactacataaagcgcatggtggccgggccgggcgacgtcgttcagttcgcgggccacaaaaagctcatcgtcaacggcactgagctcatcctgccgccgcacggcaagtatacggggggcaacagggctgacccgcgcatcctgaacttcgccccgctacgcataccggccaagggcgacgtgttctgccccgataccatgccgatccgggagttcttgttcttcaagacgctggtgcatcaggagaacccgacaaagagggtgtatatgcactttgacctatacgtcgacggcgagctttcgaacagcgcaaccctcaacttcaacggggcgaggctctcgttggacgacttgcangacggncaaattatctacaagaacgagatgacgcggcgtactgaggctttcgattcaaccgcatag

SEQ ID NO: 28852 - protein, 257 aa, Unknown
  Obtained from environmental sample
  DOMAIN (55)...(144): Peptidase S24-like
  misc_feature (1)..(257): Xaa is any amino acid
MSEQQPKQPAQPQDSAAQGGAKPAEKSGLLRFFREMGSALVMALIAIVYVIQAFQIPTGSMEDSLLVGDFLLGLKFIYGAPLLPYSRELGITRRLPAVAKPKPGDVVIFKYPGADAKDYIKRMVAGPGDVVQFAGHKKLIVNGTELILPPHGKYTGGNRADPRILNFAPLRIPAKGDVFCPDTMPIREFLFFKTLVHQENPTKRVYMHFDLYVDGELSNSATLNFNGARLSLDDLXDGQIIYKNEMTRRTEAFDSTA

SEQ ID NO: 28853 - DNA, 933 bp, Unknown
  Obtained from environmental sample
  misc_feature (1)..(933): n is a, c, g, or t
ttgctggttacgcaaagcgaaatttttctgcctattaaggataatacaaacgcggcaaaaatcgccctctccaaaaacggctctcttcttagggcgcttataaccccatttactgtagaagcggttgataatgacggaaagactatccttcatttggcaagcattgcgggaaatgttcttgcggtgcatgacatactggaaataacgtcatcgggcgcggttgtaaacaaagccgacaacgataaaaagaacgctctggattacgcgctcgcaaggccggattccagaaatcacatagaaatcgcggaaaaattgatattggcgggcggaaattccgacagcccgattttttattaccttgcgccatccgccagaagcgctaattacaacatacgccgcagcgacggtcttgcccctattcattacgccgtaagggaaaatcaccagggacttatcagtttcctgcttgaaaagaaagttgacatcaatattaagacggcttccggctcgaccgccctgcatgaagcggcaagaacaggaaatattcaattaatgaagatgcttatggatcttggagccgatcctaacgccgttgacgctaagggcaacgctccccttcatgtcggagtacctgcaaatgttcataaagaagctataaaccttcttcttgaaatgaaggcaaatccgaatcttcgcgacgagcacggcgacactccccttcacattctgattatcttaaaccggcctgtcgatttggttcagacgcttttgggcggcggcgctgatgtgtttatcaggaacattcanggaaaaactccgctgtatatcgctatagaagaaaaaagaaaagaaataatcccctcttttatgtcttacggttcagagatttttgcggctgaaaatacgggggtaactccttcgcgcttgcggtaa

SEQ ID NO: 28854 - protein, 310 aa, Unknown
  Obtained from environmental sample
  DOMAIN (235)...(268): Ankyrin repeat
  misc_feature (1)..(310): Xaa is any amino acid
MLVTQSEIFLPIKDNTNAAKIALSKNGSLLRALITPFTVEAVDNDGKTILHLASIAGNVLAVHDILEITSSGAVVNKADNDKKNALDYALARPDSRNHIEIAEKLILAGGNSDSPIFYYLAPSARSANYNIRRSDGLAPIHYAVRENHQGLISFLLEKKVDINIKTASGSTALHEAARTGNIQLMKMLMDLGADPNAVDAKGNAPLHVGVPANVHKEAINLLLEMKANPNLRDEHGDTPLHILIILNRPVDLVQTLLGGGADVFIRNIXGKTPLYIAIEEKRKEIIPSFMSYGSEIFAAENTGVTPSRLR

SEQ ID NO: 28855 - DNA, 975 bp, Unknown
  Obtained from environmental sample
  misc_feature (1)..(975): n is a, c, g, or t
ttggtttttttacggagggattcaagcccggcttttatgaaaaccgtatcggaaaaaaaatatttatacgcggaagagcttttgtcttatgtagcggccaacgccataaaagacgaagggcgggagagtttagttttcctcccgatggaaaatttcaggataatagacccctttattaacgccggtgaactcaagtttcaggcgatgagctcagggatgctcaggatcgaccaggtggataaaacccctgtcccgctcgcgtttggcgaaaccatgagccgcgtccttccggcggggagttacattatcgacttaacctacagaaacggctacaaggaaacgcggacagtagagctgcacagaaaggaaagccgctgggtgattttcaattattccgtgccgtatttagcgggggatttttccgctttgtatggcggaaggctcccccagggtgggattaacatttccgagcttaaccccgccagttaccagaaagtaaaccgcgaagcgatggagggcatgggaatggctccctattatgtggcttttcttggcggagaaaaattttaccgtgatggggattacgacaaggcaattgccgaatacaaccgctgcatctccttaaaagccgattacgcggaagccttcgcttcacgcggcaacgcttaccggagaaagggcgatgtgaacagggcaatagaagattacagcagggctatcagtctgaaaagttctttcgcggaagtttacaattaccgtggttttttatatgcacaaaggggagaatatagaagggccatagaggactacacccaggcgatccgttacaagggcgattacgccgacgcttattttaaccgtgcccatgcccacggagaactgggtaactgggactcgtccatagcagactatacccaggtaattaagcttgaacccaaaaattgggccgccacagccagcctcggccgattctga

SEQ ID NO: 28856 - protein, 324 aa, Unknown
  Obtained from environmental sample
  DOMAIN (213)...(246): Tetratricopeptide repeat
  misc_feature (1)..(324): Xaa is any amino acid
MVFLRRDSSPAFMKTVSEKKYLYAEELLSYVAANAIKDEGRESLVFLPMENFRIIDPFINAGELKFQAMSSGMLRIDQVDKTPVPLAFGETMSRVLPAGSYIIDLTYRNGYKETRTVELHRKESRWVIFNYSVPYLAGDFSALYGGRLPQGGINISELNPASYQKVNREAMEGMGMAPYYVAFLGGEKFYRDGDYDKAIAEYNRCISLKADYAEAFASRGNAYRRKGDVNRAIEDYSRAISLKSSFAEVYNYRGFLYAQRGEYRRAIEDYTQAIRYKGDYADAYFNRAHAHGELGNWDSSIADYTQVIKLEPKNWAATASLGRF

SEQ ID NO: 28857 - DNA, 945 bp, Unknown
  Obtained from environmental sample
  misc_feature (1)..(945): n is a, c, g, or t
atggtaggggtgcgcgttgtaggagaattaaattcaaaaatatcggacaggacgtttatcgattacataagaatttccgaggctcatcaggcgcgaaaattatcgcagatagcggaagaaatttacagcaaacgcgataagataaaaatgatccttatcgcgggcccttcaagttcgggaaaaacaacaagcgctaaaaggctttctatcgagcttatggtattgggccttaaacccatcgccgtaagtcttgacgattattacaaaggaacggattccacgccgagggacgagaacggagaaccagactatgaatgtcttgaagcgctggacgtgccttaccttaacgaacagttacaggcgctttacagaggcgaagaaatatcccttcccgtttatgattttaaaaccggcgagcgaaagacgacaggcggtaaaaaaatcaaattggacagccggaacgtgcttattgtcgagggcatacacggtcttaacgacgctcttacctacagcatagaccgcgatacaaaattcaagatttatatttccgcgcttactcagcttaatcttgacgatcacaacagaatccccaccagcgacaacaggcttatgcgccgcatggttcgtgattcccaattcaggggaatgcaggcggcgggaaccatgaaaatgtggcccaaagtgcaggcgggtgagcgcaagtacattttcccgtttcagggcactgccgacgccacatttaactccgccctcgattacgagctttcggtcttcaaatactttgccgacccgctgttaaaagccgtaaaaccgggaatgtatgaatacgccgaagccacaagactgctttcgtttttggaaaactttacgccgattccgccgcaatatgtgcccggcacgagtatcttgcgcgaatttatcggcgggagcgagtttaagtactaa

SEQ ID NO: 28858 - protein, 314 aa, Unknown
  Obtained from environmental sample
  DOMAIN (50)...(256): Phosphoribulokinase / Uridine kinase family
  misc_feature (1)..(314): Xaa is any amino acid
MVGVRVVGELNSKISDRTFIDYIRISEAHQARKLSQIAEEIYSKRDKIKMILIAGPSSSGKTTSAKRLSIELMVLGLKPIAVSLDDYYKGTDSTPRDENGEPDYECLEALDVPYLNEQLQALYRGEEISLPVYDFKTGERKTTGGKKIKLDSRNVLIVEGIHGLNDALTYSIDRDTKFKIYISALTQLNLDDHNRIPTSDNRLMRRMVRDSQFRGMQAAGTMKMWPKVQAGERKYIFPFQGTADATFNSALDYELSVFKYFADPLLKAVKPGMYEYAEATRLLSFLENFTPIPPQYVPGTSILREFIGGSEFKY

SEQ ID NO: 28859 - DNA, 615 bp, Unknown
  Obtained from environmental sample
  misc_feature (1)..(615): n is a, c, g, or t
ttggatgaaaatattatagaaacgcttgtaaaagacggcgctccggttgacagtgggggggtgggaacaagaatggtaacgggcgggaatgtcgcggcttttaccggcgtttacaaattaaccgcccgtttggaaggaaaaaccgctattcaagaggggaaccttcgcgcttcgcactcggttgaggttcctgtaatgaaaatttcagataacccggagaagaccacaaacccaggcgtaaagcaggtttggcgtatttgggacagcaagggagaggccgtcgccgacctgctaggcattaataacgatgacgatgcgccgaaagtagggcagtgctatcctttctggcatccttccgccgactacaggcactttaaccacaaaatcgaagccgccgaagccatgttaaaggtgcggatagaaaacggtgccattaccgcgcaactgccgtcgttagacgaaatcaagtcctatgcaagcgccaaccttgaccgtttcgacgcaacttacaagaggcttttaaatccgcatatttataaagtttcgataacggaaaacctgcgtaagttaaaacttgagttgatagagaagaatttaacaagaagacgagattaa

SEQ ID NO: 28860 - protein, 204 aa, Unknown
  Obtained from environmental sample
  misc_feature (1)..(204): Xaa is any amino acid
MDENIIETLVKDGAPVDSGGVGTRMVTGGNVAAFTGVYKLTARLEGKTAIQEGNLRASHSVEVPVMKISDNPEKTTNPGVKQVWRIWDSKGEAVADLLGINNDDDAPKVGQCYPFWHPSADYRHFNHKIEAAEAMLKVRIENGAITAQLPSLDEIKSYASANLDRFDATYKRLLNPHIYKVSITENLRKLKLELIEKNLTRRRD

SEQ ID NO: 28861 - DNA, 1767 bp, Unknown
  Obtained from environmental sample
  misc_feature (1)..(1767): n is a, c, g, or t
atggcgagcagtcgccgagtcctcttatacgtacagcgggagtctgacttcgtgctggagaagaaggtcttcgccggcctgcgcggcgagatgcggctgccgttcatcagcgacaactcttttatggcggcgagcctgctctaccaaagcgcttcgaccaccgccggcgacctgccgcagctgggcaacgaaccgttcagcaaaatgcacctcagcttcaacacaagcctagactttcagccggagtggatgactaaggcggtaaactatatccccctcatcaagtccgaatccgagtcgtcggcgaaggtggactttgagatggtgcacagccgtatgaaccctaacacctccgtggataagggcgcctacatagacgacttcgagaggacgaaggacgggtactcgctgagcatgcgccacccggtctggcacccgtcgcactacccgttcaaatattccggcggcgttgagggcatagccgacagtatgctgaacaagctcaggattcccgtttgggatttttactggtacacgcccaacgcttacgacgacgcgaggaagatcaaccgcttcgaggtgtggcggcgcgacccgaacaacagccgctacaactcctccgacacctacatagacgtgctgcgcctacacgctacgccggcgtcgcgcgatcatccgttagacgttcaggaccgtttcagaaattcatacgcgtctatcaccacctcgttcggccgcagcgggctgaacatggagaaccaccgtttccttgaactcgtgataaaccccagaggccccggaccgctaggcagaaagggcaagctgatgattcagataggcacgttcagccacgaccaagtgcgcgacggcggtccgccgaacgggcgtttcgacttggaagacccgacctaccaaaacaaaccggcgcagctctccatgtacgacaaggggctgaacgggcgcgaccccgccgacaaattttacgttataccgaacgccgtatccggcgcttccgggtgggacacgatctcgcgtaaccaaaacaccgatttattggtgcagccccgcagccgcgacaacccaagcggcgacctcttccgcaagtacgacaaggacaacttgaataatttccgatttgtcaacggaacgtgggcgaacagcgcctacgacgacgaaaacatagacggcgacggcatgccgagaatcggcatagaagaaaaatactactcctacgagatcaacctcgacttggacaactcgccttacatcgacagaacctcccgcgtcagggacgatctgggttggagatactaccgcattccgatcaaagacatcctcgacgggatatcggtggccaaggactccgtaggcaaaccggattgggcgaaggtgcgcggcatgaggctcgtgtggcacgacctcgacacgaacatgctgataagcgagcacgagctcattctcgccgggatcgagctgtcggggaactactgggagccgtccgccggttccgagaatattgtggaagccaccagcatcagcaactacgaggacatgaactacttcaacagcgtttacggcaccatcgtcaagcccaaatccggcgaggtgacgccggaagagaagtctttgcgcctcaacttcactaatatgaacgccggcgacacggctaccgtgcgcaggttgcagggcgggagcccgcagaacatttcgggctacgactcgatctccataatggtttatcccaggagtcttacggggaggatttga

SEQ ID NO: 28862 - protein, 588 aa, Unknown
  Obtained from environmental sample
  misc_feature (1)..(588): Xaa is any amino acid
MASSRRVLLYVQRESDFVLEKKVFAGLRGEMRLPFISDNSFMAASLLYQSASTTAGDLPQLGNEPFSKMHLSFNTSLDFQPEWMTKAVNYIPLIKSESESSAKVDFEMVHSRMNPNTSVDKGAYIDDFERTKDGYSLSMRHPVWHPSHYPFKYSGGVEGIADSMLNKLRIPVWDFYWYTPNAYDDARKINRFEVWRRDPNNSRYNSSDTYIDVLRLHATPASRDHPLDVQDRFRNSYASITTSFGRSGLNMENHRFLELVINPRGPGPLGRKGKLMIQIGTFSHDQVRDGGPPNGRFDLEDPTYQNKPAQLSMYDKGLNGRDPADKFYVIPNAVSGASGWDTISRNQNTDLLVQPRSRDNPSGDLFRKYDKDNLNNFRFVNGTWANSAYDDENIDGDGMPRIGIEEKYYSYEINLDLDNSPYIDRTSRVRDDLGWRYYRIPIKDILDGISVAKDSVGKPDWAKVRGMRLVWHDLDTNMLISEHELILAGIELSGNYWEPSAGSENIVEATSISNYEDMNYFNSVYGTIVKPKSGEVTPEEKSLRLNFTNMNAGDTATVRRLQGGSPQNISGYDSISIMVYPRSLTGRI

SEQ ID NO: 28863 - DNA, 825 bp, Unknown
  Obtained from environmental sample
  misc_feature (1)..(825): n is a, c, g, or t
gtgcagtgcggtaagtcgggtgagcagaagtctgacgctacggttgagaagaagcgtgagatcacggtgatttcacgtgaggagagttccgggacgcgcggggcgttcgacgagttaatgaaggtcacggacggcaagacgaatatgctctttgccgaggcggtgatcgtgagttccaccgacgaggtggcctcaaaggtcgaggtggacaaggaggctatcggctacacctccatcggcgcgctcaacaagagggtgaaggcgctcagagtagacggcgttgaggcgttggagtccaacgtcaagaacggtacctacaagatctcccgcccgttcgtggtcgcgtttcgctccggagaaaagctcccgattgcctcagacttcatcaacttcatcgcctcgcaagaagggcaggttattgttactaaggccgggtacatagagatagacaatccgctcaactacactgccacgccgaaactcaagggtaaactgacgctctccggctcgacttcggtagagaaagtcatggagaagttgaaagagaagtacgtggaactcaatcccgacgtcaaggtggagatcaactacaacggttcttccgccgggatcaaggactgcataagcaagaagagcgatatcgccatgagttcccgtgagcttaaggcggaggaaaaggagcagttgacaggtactactttcgcgcttgacggtattgcggttattgtcaacgtggaaaacgtactgaacgccataacgtccgagaatatcaccaagatattcaagggcgaggtgcggtattggaacgacttagtcgggcagtga

SEQ ID NO: 28864 - protein, 274 aa, Unknown
  Obtained from environmental sample
  misc_feature (1)..(274): Xaa is any amino acid
MQCGKSGEQKSDATVEKKREITVISREESSGTRGAFDELMKVTDGKTNMLFAEAVIVSSTDEVASKVEVDKEAIGYTSIGALNKRVKALRVDGVEALESNVKNGTYKISRPFVVAFRSGEKLPIASDFINFIASQEGQVIVTKAGYIEIDNPLNYTATPKLKGKLTLSGSTSVEKVMEKLKEKYVELNPDVKVEINYNGSSAGIKDCISKKSDIAMSSRELKAEEKEQLTGTTFALDGIAVIVNVENVLNAITSENITKIFKGEVRYWNDLVGQ

SEQ ID NO: 28865 - DNA, 357 bp, Unknown
  Obtained from environmental sample
  misc_feature (1)..(357): n is a, c, g, or t
gtgtttgatcagtggtgtaaggattttaacgaagtacgtcctcatgaagcgctgggaatgaaagtgcccgccgacatatataaaaaatctgaaagaaaatatccaggtgaaaatgttgaacacaggtacgggaaaggttttaaagtccgtattgttaacgacaggggatttatgaatttaaatcaaaaacgggtgtttgtcggaaatccgtttgccggatataatgttggcgtaaaagaatttgtggagaagtcgacagaagtatggtttgggaattatttgttaggtgtaattaacaatgacactggactcatagagcccaatttcgctataatgcaactaacaaaaaaatcctga

SEQ ID NO: 28866 - protein, 118 aa, Unknown
  Obtained from environmental sample
  misc_feature (1)..(118): Xaa is any amino acid
MFDQWCKDFNEVRPHEALGMKVPADIYKKSERKYPGENVEHRYGKGFKVRIVNDRGFMNLNQKRVFVGNPFAGYNVGVKEFVEKSTEVWFGNYLLGVINNDTGLIEPNFAIMQLTKKS

SEQ ID NO: 28867 - DNA, 387 bp, Unknown
  Obtained from environmental sample
  misc_feature (1)..(387): n is a, c, g, or t
ttgtttcgtgaacaaaaaaacggcgatgtcgtacgaaaaacggttggatatgcccgttttgagggccaaaacgcgctacacgccctcgctgaagtgtaccggtatttgaacccgctgttaaactatttttatccgacgctcagactcatcgccaaagaaaaactcccttcaggcaggtataaaaagatttacgagaaagaacctaaaccgccttaccagcggcttcttgaatctcccgacatcagtgatgaatgcaaggaggaacttctgcgcagaaaggccgtattgaatccggttgacttaaagcgcgctttagacaaggcaagagatcagctcttgaaactttccgtcatagaggctattgttccttctgataaagtttcttga

SEQ ID NO: 28868 - protein, 128 aa, Unknown
  Obtained from environmental sample
  misc_feature (1)..(128): Xaa is any amino acid
MFREQKNGDVVRKTVGYARFEGQNALHALAEVYRYLNPLLNYFYPTLRLIAKEKLPSGRYKKIYEKEPKPPYQRLLESPDISDECKEELLRRKAVLNPVDLKRALDKARDQLLKLSVIEAIVPSDKVS

SEQ ID NO: 28869 - DNA, 936 bp, Unknown
  Obtained from environmental sample
  misc_feature (1)..(936): n is a, c, g, or t
gtgggagatttgcaagcgttccaaagggcaagcaagaaagacaagaagaaaatccttgacgagtatgccccgctgcttgggtacaaccgcgattatttggccaacctgctaactaactgggagaaaacacggtatgccatctctgacgggaaacctgtcaaatatatcgccaaaccagccgtaaaaggccggaaaagcgcttgcaaaggcaaaaaaacaggaaggccggaaaaatatcataaggcctttgtcgaagttcttaaagccgtatgggagctttttgattttcaatgcgggaaactcctttcgcccctggtcaaggggatgatgagctttctggttcttgagtttaacttaagcgaagagttgcaggcattgtttctttcggtaagccctgcaaccatagacaggaaattaaagaaacacaaagaacgctaccgccttaagggcatgcataccactaagccggggagccttttgaaaagccatattccggtacgggtttgttttgactggaatgaaaggaggcccggatacttcgagcttgatactgtcagccactgcggggcccttgcttcaggccagttttgtcaaacgctgaccatcaccgacgttggttccggctggactgaagaatgcgcccttttgaataacgcgcaccgctgggttaaggaacaaatctccaataccaaggataccttgccctttcccatgctcggcatagacagcgacaatggcggcgagttcatcaaccaccagctccttgactggtgcgtccagaacggcattaagtttacccgcagccgcccctacaaaaaaaatgacaattgtttcgtgaacaaaaaaacggcgatgtcgtacgaaaaacggttggatatgcccgttttgagggccaaaacgcgctacacgccctcgctgaagtgtaccggtatttga

SEQ ID NO: 28870 - protein, 311 aa, Unknown
  Obtained from environmental sample
  misc_feature (1)..(311): Xaa is any amino acid
MGDLQAFQRASKKDKKKILDEYAPLLGYNRDYLANLLTNWEKTRYAISDGKPVKYIAKPAVKGRKSACKGKKTGRPEKYHKAFVEVLKAVWELFDFQCGKLLSPLVKGMMSFLVLEFNLSEELQALFLSVSPATIDRKLKKHKERYRLKGMHTTKPGSLLKSHIPVRVCFDWNERRPGYFELDTVSHCGALASGQFCQTLTITDVGSGWTEECALLNNAHRWVKEQISNTKDTLPFPMLGIDSDNGGEFINHQLLDWCVQNGIKFTRSRPYKKNDNCFVNKKTAMSYEKRLDMPVLRAKTRYTPSLKCTGI

SEQ ID NO: 28871 - DNA, 576 bp, Unknown
  Obtained from environmental sample
  misc_feature (1)..(576): n is a, c, g, or t
atgggaattttagacacgcttaaagcagccgcgacagatgcgctaaaaaccgccgcggaagaggcccttaaaaacgcagcgaacgctacatcggcatccgctaaagccgatgcattggtaggatcaaataccgcgactactatctcacccacctggtctgcctcctcgtctaacgtagcggcatccgttaaggcggcggcaataaccgccaaggcggcggcggtattggcgagatcaaacacctcaagcgatacttcaaacacctggtctgcctcctcgtctaatgtggcggcgtccgttaacgcggcggcaatagccgccagggcggcggcagtattggcgggttcaaacacctcaagcgatacgttaaacacctggtctggttcgccggttaacgtgacgatgtccgtttgcaatgcggcaacagccgccagggcggcggcggcattggcgggacatatatcgccaaatgaactgtcgcacgcccaggtggtggcaatcatcgaagccagagtaagggcgaaaggcaatccttccactggcaggtttcgattgtcgatcttatgtcagctttag

SEQ ID NO: 28872 - protein, 191 aa, Unknown
  Obtained from environmental sample
  misc_feature (1)..(191): Xaa is any amino acid
MGILDTLKAAATDALKTAAEEALKNAANATSASAKADALVGSNTATTISPTWSASSSNVAASVKAAAITAKAAAVLARSNTSSDTSNTWSASSSNVAASVNAAAIAARAAAVLAGSNTSSDTLNTWSGSPVNVTMSVCNAATAARAAAALAGHISPNELSHAQVVAIIEARVRAKGNPSTGRFRLSILCQL

SEQ ID NO: 28873 - DNA, 624 bp, Unknown
  Obtained from environmental sample
  misc_feature (1)..(624): n is a, c, g, or t
gtgatcgcgaggttcccgcgtttcccgtccgatctggtcgaaactcttgcccgtttccccccggacaccctcaggctggaaataggcatacagacgcttaaccctgaggtaagcgcactcatcggaaggccctcaaaaccggagcaggaactggaaacactcaggctcctggctgaaaagaccaatgccattatgcacgttgaccttatcgccggacttcctggcgaaggcatggaatcttttggaaaaggctttgacgctctgtgggccgcgcttgcgcgtggcagtaacaacaacagcagcattgagatacaactgggcatattaaaacttctgcccggcgcgcctattgcccgtcacaaagaagcttttggcatgaggtttaaccctcagccgccctatgagattattgaaacctccaccattcccgtgtccggccttgaccgtataaaaaatttcgcccgcttttgggagttaatcgtcaaccgcggtcttttggacataggcccatccccggtttttgatcgtttcatggcgctttccgattctcttctagcccgctttggccgcaactggggcatagcgaaagaggaactgcaaaaacaaataataaataataggtaa

SEQ ID NO: 28874 - protein, 207 aa, Unknown
  Obtained from environmental sample
  misc_feature (1)..(207): Xaa is any amino acid
MIARFPRFPSDLVETLARFPPDTLRLEIGIQTLNPEVSALIGRPSKPEQELETLRLLAEKTNAIMHVDLIAGLPGEGMESFGKGFDALWAALARGSNNNSSIEIQLGILKLLPGAPIARHKEAFGMRFNPQPPYEIIETSTIPVSGLDRIKNFARFWELIVNRGLLDIGPSPVFDRFMALSDSLLARFGRNWGIAKEELQKQIINNR

SEQ ID NO: 28875 - DNA, 1068 bp, Unknown
  Obtained from environmental sample
  misc_feature (1)..(1068): n is a, c, g, or t
atgatttatcccaattcgatgatttttggcggtttgcgggaaattttgtacccgggttcgcttaccagctatattctgaacgaaaaggtatacgcggtgccggagacaatcacctttaacgccgttgtataccgtgaagatattatgggccggttaaatatcgctccgcctgatacatggaaagatgtagccgaaatgatggcggagctgcaacgtttcaacatgagcttttatatgcccattgcctcaggcgtcgggtataaatggtattatcaaacctctcccctcatttaccagaacaacggctttctgtaccgccccgacggtttaggctcggcaataaacgaagccaacgcggtaaaagccctgacttttctgggggatttgtttacaacttatgccattgccgagcaggttcccgtatttttcaactcattccgctatggccaaaccccggtgggtattatcgaaccggaaacttatatactcctgcgcaacggcgctcctgagttgttgggccaatggagtcttgcgccttacccgggcactgtacaggaggacggaagtatttcccgctggtttatcaccaacggtgccggaggcagcgttatctttgaagatacagatcaggcggaaaattgctgggaatttcttaaatggtatttaagcgaggaaacgcagacaaattttgctttctctctttatacaaattacagaatattacatttgtcttccaattttaaagccttgcggaatttacccattgatgaaaaagatttgcaggttattctggagtctgtcttatggctaagggatgtgccgcgaagccctggtcaatatttactggagaggggcctttctgatatctggaacactatggttttcgatgggactccggctcaggtcgctattgacaagaaagtgatagaaatacaacgggaatttaaaaagaaaatgacggaatttggctacctggacagcatggggcagcagataaaaccctatgttgttcatgaggtagactgggttattgagcagatagaaagggccggggcgcaagataaataa

SEQ ID NO: 28876 - protein, 355 aa, Unknown
  Obtained from environmental sample
  misc_feature (1)..(355): Xaa is any amino acid
MIYPNSMIFGGLREILYPGSLTSYILNEKVYAVPETITFNAVVYREDIMGRLNIAPPDTWKDVAEMMAELQRFNMSFYMPIASGVGYKWYYQTSPLIYQNNGFLYRPDGLGSAINEANAVKALTFLGDLFTTYAIAEQVPVFFNSFRYGQTPVGIIEPETYILLRNGAPELLGQWSLAPYPGTVQEDGSISRWFITNGAGGSVIFEDTDQAENCWEFLKWYLSEETQTNFAFSLYTNYRILHLSSNFKALRNLPIDEKDLQVILESVLWLRDVPRSPGQYLLERGLSDIWNTMVFDGTPAQVAIDKKVIEIQREFKKKMTEFGYLDSMGQQIKPYVVHEVDWVIEQIERAGAQDK

SEQ ID NO: 28877 - DNA, 627 bp, Unknown
  Obtained from environmental sample
  misc_feature (1)..(627): n is a, c, g, or t
ttgtccggtggaattggttctcgagctttaatgaaaataaaatacaacgcccccgcggtgctaacctttacttttatcagcgccgctgttcttgttctttcacagacggtttcccgctcattgacaacgcaatggtttatggttccgggaaaatcggggttttccgtttccagcccaaggtgctgggttacgcttgtgacccatgtactggggcacgcgaactggtcgcatctggtttccaatttctcgtttatactcctgattggccccattcttgaggaaatttacggctccttttcgcttttaataatgatttttattaccgctctggtaacggggatactcaatgtcctttttttcccttcgagtcttttgggcgccagcggagtggtttttatgatgatacttttggcttcattcaccaattttaacaagggggagattccccttacttttatacttgttctgatcctgtacctgggaagggagctgtttaattcctttggaaacactccggaatcaagcggaaatatttctcaattcgcccatgttgtgggaggatttataggaagcctgtttgggttttttagaactaccaggcagccgcaattgcggccacaggtatag

SEQ ID NO: 28878 - protein, 208 aa, Unknown
  Obtained from environmental sample
  DOMAIN (56)...(202): Rhomboid family
  misc_feature (1)..(208): Xaa is any amino acid
MSGGIGSRALMKIKYNAPAVLTFTFISAAVLVLSQTVSRSLTTQWFMVPGKSGFSVSSPRCWVTLVTHVLGHANWSHLVSNFSFILLIGPILEEIYGSFSLLIMIFITALVTGILNVLFFPSSLLGASGVVFMMILLASFTNFNKGEIPLTFILVLILYLGRELFNSFGNTPESSGNISQFAHVVGGFIGSLFGFFRTTRQPQLRPQV

SEQ ID NO: 28879 - DNA, 630 bp, Unknown
  Obtained from environmental sample
  misc_feature (1)..(630): n is a, c, g, or t
ttgtttattatcttttttatgagaaaagaatttctcccttacgatgttgtaagaaacaacggtattaaaatggcgcataagatttacaaggatgggttctatcccgatgtgatctatgtgtcgctccgtggcggcgtctaccttgggaatattatcagcgagtacttcaaaattttacagcgcagggcaaggccggtgtactatgccgctgtcgttgcccgttcctataccggagtaaaggaatccgaagaagtgaaggtagagggctggacttacccgaccgaatcactaagaaccggtgacaaaatacttctgattgacgatatattcgatacgggcaggactattaatcaccttgcgaatctcatcatggagacgggaattctccgcaaggatcttaaaattgtggttcacgattacaagtacttttacgacagggcggaacaattgccaattcagccggactattggtgcagaaggcacgacctttccgtaaaagaagaggatatgtggattcactattccagccatgagctaatcggcctctctcttgaggaattggaaacgtattatttttcccgcgatcctgagctgcgggaagcgctggcaataataaccatgggaaactaa

SEQ ID NO: 28880 - protein, 209 aa, Unknown
  Obtained from environmental sample
  DOMAIN (19)...(149): Phosphoribosyl transferase domain
  misc_feature (1)..(209): Xaa is any amino acid
MFIIFFMRKEFLPYDVVRNNGIKMAHKIYKDGFYPDVIYVSLRGGVYLGNIISEYFKILQRRARPVYYAAVVARSYTGVKESEEVKVEGWTYPTESLRTGDKILLIDDIFDTGRTINHLANLIMETGILRKDLKIVVHDYKYFYDRAEQLPIQPDYWCRRHDLSVKEEDMWIHYSSHELIGLSLEELETYYFSRDPELREALAIITMGN

SEQ ID NO: 28881 - DNA, 480 bp, Unknown
  Obtained from environmental sample
  misc_feature (1)..(480): n is a, c, g, or t
atgaaacatagaagaggatttaacccgcttgagcggatggcggcgcaccgcaaagccctgcaccgcaacatggtgacaagcctgttcaggtacgagcgcgtcagaaccaccaaggcgaaagccctggcggtccgcagaaccgcggaaaaaatgataacccgcgccaaggttgacaatgtccataacaggcgcattgtttccggccgtctgtacaatgaaggcattgtggcgaagctgtttaccgttatcgcgccaaggatgaaggaccggaaaggcggttatacgaggatactcaagatcggccagcggctcggagacgccgcgcagatggtgattttggaattggtggactataagcttgaccttgaaggcggagaaaagaaagccaagaagaaagaggccaaggcgaaagacaaaaaagaagccgacaagaaagaggccgaggcgaaagacaaaaaagaaaaagaagagaagaaataa

SEQ ID NO: 28882 - protein, 159 aa, Unknown
  Obtained from environmental sample
  DOMAIN (20)...(116): Ribosomal protein L17
  misc_feature (1)..(159): Xaa is any amino acid
MKHRRGFNPLERMAAHRKALHRNMVTSLFRYERVRTTKAKALAVRRTAEKMITRAKVDNVHNRRIVSGRLYNEGIVAKLFTVIAPRMKDRKGGYTRILKIGQRLGDAAQMVILELVDYKLDLEGGEKKAKKKEAKAKDKKEADKKEAEAKDKKEKEEKK

SEQ ID NO: 28883 - DNA, 1062 bp, Unknown
  Obtained from environmental sample
  misc_feature (1)..(1062): n is a, c, g, or t
atgaaagttaccaaaaagcccttcgggcttctttccaacgggaaaaaggttttcctgtataccctgaaagcgggggatttaactctgagcctttccagttttggcgcggcatggacgagccttttggtcccgtcccataagggcgaaaaagtggatctgttgctggggttttcaggtctggacggttatctgcataacggcccttacttgggcgtcacggtggggcgctttgccaaccgcatcgggggcggcagcttcacccttaacggccatcactaccggcttgagaaaaatgacggggagaataccctgcatagcgggcggcgggcttttgacaagatgctctgggaatccgaatctttcgaggaaaaaggcggcgtttttgtccgtttcgagcttgacagcccggacggcgattgcggcttccccggaaacgtcagggcggccgtcacttacggccttacaaaatcaaacgagttagtcgcaatttacgaggcaaaagccgacgctccgaccccggttaaccttaccaaccacgcttatttcaacctggcgggggaggggaatggaaatatcctgtcgcacgaagtccggctggattcatcttcttaccttgaagttgacgaggcgcttatccccaccggtcgcctgcttccggtgcatgacagcccttttgatttcaggcagaggaaaccgattaaacaggaccttacatccgaatacggcggctcgggcggcccttcggctccggagggttacgaccactgttttaccgttgacggcgatccgggaaaactccggccctgcgccgaagtcatggagcctggcagcggcctttcaatgaaagtctttaccactcagcccgcagtccagttctacacgggcaatatgcttacaggcattcccggtaaagcgggctcgctgtatgccaaacatacaggcttttgcctggaaacccagcattttcccgattctcccaataaaccggatttcccttcgtgtataatcggacccaacaaggattatggcgaaaagtcggtatttgcgtttgaattagactaa

SEQ ID NO: 28884 - protein, 353 aa, Unknown
  Obtained from environmental sample
  DOMAIN (18)...(349): Aldose 1-epimerase
  misc_feature (1)..(353): Xaa is any amino acid
MKVTKKPFGLLSNGKKVFLYTLKAGDLTLSLSSFGAAWTSLLVPSHKGEKVDLLLGFSGLDGYLHNGPYLGVTVGRFANRIGGGSFTLNGHHYRLEKNDGENTLHSGRRAFDKMLWESESFEEKGGVFVRFELDSPDGDCGFPGNVRAAVTYGLTKSNELVAIYEAKADAPTPVNLTNHAYFNLAGEGNGNILSHEVRLDSSSYLEVDEALIPTGRLLPVHDSPFDFRQRKPIKQDLTSEYGGSGGPSAPEGYDHCFTVDGDPGKLRPCAEVMEPGSGLSMKVFTTQPAVQFYTGNMLTGIPGKAGSLYAKHTGFCLETQHFPDSPNKPDFPSCIIGPNKDYGEKSVFAFELD

SEQ ID NO: 28885 - DNA, 486 bp, Unknown
  Obtained from environmental sample
  misc_feature (1)..(486): n is a, c, g, or t
atgcgcctgacgctgaccagtttccagtttgttactgttaacatggaatattttaacgccgccatcgtaatgatgcggataatcctgccgattttcctgtgggttgtggcgaactggagcctgaccaccctgatggacggcaaggggcgtatgcttgatatttatatggccgtcgcctacgccctggccccctcggtaatcatcaacaccgtcatgatcgtactcagccggcttatcacttatgacgaaggggccatttacctggtgctggcgggcttttcggtcctgtggactgccattctgcttctcgcgggcatgatgatggtgcatgattacagcctgaccaaaaccgtgctttccagcctgctcaccattgtcggaatgggggtgatggtgtttatttttgtggtttttttcagccttatcagcgacgcggtggcgtattttgtttccttgtataaggaaatattatttagagtattgtaa

SEQ ID NO: 28886 - protein, 161 aa, Unknown
  Obtained from environmental sample
  misc_feature (1)..(161): Xaa is any amino acid
MRLTLTSFQFVTVNMEYFNAAIVMMRIILPIFLWVVANWSLTTLMDGKGRMLDIYMAVAYALAPSVIINTVMIVLSRLITYDEGAIYLVLAGFSVLWTAILLLAGMMMVHDYSLTKTVLSSLLTIVGMGVMVFIFVVFFSLISDAVAYFVSLYKEILFRVL

SEQ ID NO: 28887 - DNA, 771 bp, Unknown
  Obtained from environmental sample
  misc_feature (1)..(771): n is a, c, g, or t
atggagttgtttatacccaccgaatacaacaacctctgccttgacagggacggctttatttatgtcaccaacgcaagcgggcaggcggatccggtcaggcggctcaacgcaatggggcaggatattttgatccgtaacggctatgaggatccggtcggcgacctggctttcggtaacgcggggggtatatccgggccctcaaggtttattgacgtggcggcgctggataacgattcttatgcctgctttgatcgcgtgcgcgggcgaatttttgtgtacgattttcagggaaatttgttatatgcttttggcggcctgggaaaccgcgagggatgtttcttacagcctgttgcccttgcacaaatgggccattccctgtatgccctggattcccgatctgctgccattacccgctttgatatgacagtttacggggcgatgataaacagcgcccttgacgaataccgggctggccgttacgaagcctccgctgaggtttgggaagaagtactcaagatgaacggcaattatgaccttgcctatatcggcataggcagggcagcgctgcggcagggcgaatatcaaaaggcgatgaagtactacaaactcaaacattaccgcgaaggctacggcaaggcttttcaattataccgcaagcaatttatggaagagaacctctggaaaatgctgctggttttggcagtcattttactgctgccgccgcttatcaagaccgcgctgaaaatcgcgaaggaggtcagggaagcgtga

SEQ ID NO: 28888 - protein, 256 aa, Unknown
  Obtained from environmental sample
  misc_feature (1)..(256): Xaa is any amino acid
MELFIPTEYNNLCLDRDGFIYVTNASGQADPVRRLNAMGQDILIRNGYEDPVGDLAFGNAGGISGPSRFIDVAALDNDSYACFDRVRGRIFVYDFQGNLLYAFGGLGNREGCFLQPVALAQMGHSLYALDSRSAAITRFDMTVYGAMINSALDEYRAGRYEASAEVWEEVLKMNGNYDLAYIGIGRAALRQGEYQKAMKYYKLKHYREGYGKAFQLYRKQFMEENLWKMLLVLAVILLLPPLIKTALKIAKEVREA

SEQ ID NO: 28889 - DNA, 1023 bp, Unknown
  Obtained from environmental sample
  misc_feature (1)..(1023): n is a, c, g, or t
atggcaatgtttcccagtttttcccgaaagctatgccttttcgtcctcttgttttctgccctgaccgcaggcgcggaaactaccggtataacgcctgtcgtcagcggaaccaattctgccagagaactgccaccgctttttccggcggctttttttaccgagtatctttcagcccttgacgcaacagacgccgggcggccctactgggtgccaacagaagtggaaacccaaataactcccccctcccattgggagtctattttgcttaacagcgacatactcgctttctacggtcaccccagctcanaaaacatgggcatcctgggacgcttctcnaaggaagagctaaacgaaaaactttgtgccctggcagatgagtaccaaaaggtaggcggtcgaaatgtactcaaggctttttacatcatctatggcacggtgtggccgggcggggatattggtataattggcgaagcactgctaacggaatacatcgaatttgcccttgaaaatgacatgcttgtctttatcgatcaccagataggcaagtatactccgcaagattcaatcaaaaaattgctgccctggctaaggtatccgaatgtccacctcgcccttgatccggaatggcgaactacaaagccaatgcaggaaatagggacagtaacggccagtgagataaaccaggtacagcgtattatggaaaactacatcatcgagaacgaaattcccggcgagcggcttttggtaattcaccagtttaactaccgcatgatttccaaccgcgaaaaagtggaaagcaatttcagcagggtccgcctggttcactgcgctgacgggttcggcccccctaacgtaaaaagggcttcttacgcttataacgcgcaggccgccaacatgcccgtcaaggcttttaagcttttctttgatttcggcattccgggcgccggcatcgactatccccttttaagcccgaaagaagtgttaagccttaacccgcggccttatataattatgtaccagtag

SEQ ID NO: 28890 - protein, 340 aa, Unknown
  Obtained from environmental sample
  SIGNAL (1)...(25)
  misc_feature (1)..(340): Xaa is any amino acid
MAMFPSFSRKLCLFVLLFSALTAGAETTGITPVVSGTNSARELPPLFPAAFFTEYLSALDATDAGRPYWVPTEVETQITPPSHWESILLNSDILAFYGHPSSXNMGILGRFSKEELNEKLCALADEYQKVGGRNVLKAFYIIYGTVWPGGDIGIIGEALLTEYIEFALENDMLVFIDHQIGKYTPQDSIKKLLPWLRYPNVHLALDPEWRTTKPMQEIGTVTASEINQVQRIMENYIIENEIPGERLLVIHQFNYRMISNREKVESNFSRVRLVHCADGFGPPNVKRASYAYNAQAANMPVKAFKLFFDFGIPGAGIDYPLLSPKEVLSLNPRPYIIMYQ

SEQ ID NO: 28891 - DNA, 612 bp, Unknown
  Obtained from environmental sample
  misc_feature (1)..(612): n is a, c, g, or t
atgattttttttgataaaggaaagccgttggtcagtaataagccaatgaaaatgaagcctgatttttctctgtttttacttcagcttttcatattgataattgcgtctgcggctctggcggtggtttttataaagacatctacgccggaaaacactgcggatatttgcatctatactgctgttttcattgtcgtatttattttgacattctgcatacgcaaaaataacgaatgggaacgtgccattgttctccgcttcggtaaatttcaaaaggttaggggaccggggctgtttttccttctgcccatcgccgaccgtgtggcccaaacggtcgatatccgaatcagggtgtcggatttttccgcgcagaaaactttaacgggcgattccgttaccgttgatgttgacgctatatgtttctggctggtttgggatcctcaaaaagcggttcttgaagttgaaaattattttgacgctgtagtgtactcgtccaagaccgcattgcgtaacgcggtttcaagtcatgatcttacaactttccttgagcgcagtgatgtgattgaaaaacaattcaagaagaggttgataaaaaaactactgattgggggataa

SEQ ID NO: 28892 - protein, 203 aa, Unknown
  Obtained from environmental sample
  DOMAIN (71)...(203): SPFH domain / Band 7 family
  misc_feature (1)..(203): Xaa is any amino acid
MIFFDKGKPLVSNKPMKMKPDFSLFLLQLFILIIASAALAVVFIKTSTPENTADICIYTAVFIVVFILTFCIRKNNEWERAIVLRFGKFQKVRGPGLFFLLPIADRVAQTVDIRIRVSDFSAQKTLTGDSVTVDVDAICFWLVWDPQKAVLEVENYFDAVVYSSKTALRNAVSSHDLTTFLERSDVIEKQFKKRLIKKLLIGG

SEQ ID NO: 28893 - DNA, 624 bp, Unknown
  Obtained from environmental sample
  misc_feature (1)..(624): n is a, c, g, or t
atggtaggggtcacaagttcaaatcttgtatcgtccattatgccttacatagcaatggcaagaaagtggcggccacgctcgtttagcgagatggtgggtcaagagcatattgcgcaaacactcaaaaatgccataaccacgggcaatattcatcacgcttttttgttttctggaacaaggggagttggcaaaacaacttcagcacgaattttggctgcaatgctgaattgcacagcggcaagcgagcaaaaaccctgtgggcagtgcgaaagctgcaaagccataacagcaggcttgtctatggacgttatggaaatggatgcggcaagcaacaacggcgttgacgatatgcgcgaagttcttgaaggcacgcagtatccacctatgaatagcaaatatagggttttgataatagacgaagttcacgctctttcaaaaccggcttggtattccatgttaaaaacattggaagagccgccttcgtatttggtttttatatttgccaccacagacccaaacaaaatccctgccacaattttatcccgggtgctttgctttgattttaaaggctctcttctttgcaaatttcaagcgactcgctttatatgcgagcaagagacataa

SEQ ID NO: 28894 - protein, 207 aa, Unknown
  Obtained from environmental sample
  misc_feature (1)..(207): Xaa is any amino acid
MVGVTSSNLVSSIMPYIAMARKWRPRSFSEMVGQEHIAQTLKNAITTGNIHHAFLFSGTRGVGKTTSARILAAMLNCTAASEQKPCGQCESCKAITAGLSMDVMEMDAASNNGVDDMREVLEGTQYPPMNSKYRVLIIDEVHALSKPAWYSMLKTLEEPPSYLVFIFATTDPNKIPATILSRVLCFDFKGSLLCKFQATRFICEQET

SEQ ID NO: 28895 - DNA, 843 bp, Unknown
  Obtained from environmental sample
  misc_feature (1)..(843): n is a, c, g, or t
atgtctcctaaaaattcattgcctatgaaaattgaattttcaggcgacacttatttggttcccaaaaaatggagccaccaccttgtccgttttgattctgtaaccggaatgatcgaatacattgtagacggcaacagcgaaacaatcgtgtacgcgacagccacgggacgcgaaaacagcgaggtttttacgccggttgtcggaacagcgggcgcttttattctcggcggccgttataagggaatgatggatgaatttaaaatccacggcgtttgcgcggggcgttcttccgttcaaaaatacgcgaccgccggcggcagggcggagacaacgcatattgatttgggagacataaacagcgcagtactcagggttgaagttacaggcggaaggacaagccttaaagggacaaggatcaacaatgaattccgcgaaaacggaaggttccgcttttccgatgattccgaaatgtgtttttttatccgctcaggcgaaaacccttggcgtttgaacgagaaaaaatggacggcttttattcccggaaccaatatcaaagaaacaatcagaggccgttatgtgcaaatagcggtagatttttatccgtccggcgatggggagacgactccctatcttgacgaggtgcgtattgtttatcagccgaacgagccgcccctgcctccgactaattttaccgccgcggcagttgacggcggcgtaatactgcgctggaaaaaaagtccggacgcttcagccgccgggtatttgatttattacagctcccgtcgcggggaacttttcggctctgacgcggtgttgggggccttctcccatagacgcgggtaa

SEQ ID NO: 28896 - protein, 280 aa, Unknown
  Obtained from environmental sample
  misc_feature (1)..(280): Xaa is any amino acid
MSPKNSLPMKIEFSGDTYLVPKKWSHHLVRFDSVTGMIEYIVDGNSETIVYATATGRENSEVFTPVVGTAGAFILGGRYKGMMDEFKIHGVCAGRSSVQKYATAGGRAETTHIDLGDINSAVLRVEVTGGRTSLKGTRINNEFRENGRFRFSDDSEMCFFIRSGENPWRLNEKKWTAFIPGTNIKETIRGRYVQIAVDFYPSGDGETTPYLDEVRIVYQPNEPPLPPTNFTAAAVDGGVILRWKKSPDASAAGYLIYYSSRRGELFGSDAVLGAFSHRRG

SEQ ID NO: 28897 - DNA, 642 bp, Unknown
  Obtained from environmental sample
  misc_feature (1)..(642): n is a, c, g, or t
ttgaatacgagnggctttaaaccaatccgcattgacgccgttgtagtttcccatcagcacgatcatgacgtatcatacaaggaaatcgagtcaactattatagaaaaaattattaaaccggtgcttgaacctacacaccttttggataaaaaaacaaaatactacattaaccccacaggccgttttgttgtcggcgggcccttcggcgacacggggcttacgggcagaaagatcatcgtagacacctacggcggcatgggtcgtcacggcggcggcgccttctccggcaaagacccaaccaaagtagaccgctcggcggcatacgcggcgcgttatgtggcaaaaaacgtagtcgccgccaaattggcggaacgctgtgaaatccagcttgcctacgcgattggagtacccttccctgtctctatcatggtagacaccttcggcacgggcaaagtccccgaacagaaaatcgaaaaagccgtagaaaaagtctttgacctatcacctgccggtattattaagacattggacttaaggaaaccgatcttccaaaagacggcgtcttacggacacttcggcaggccggaattcccgtgggagaagacggataaagtagaggaactgaagaaagttattggttaa

SEQ ID NO: 28898 - protein, 213 aa, Unknown
  Obtained from environmental sample
  DOMAIN (1)...(62): S-adenosylmethionine synthetase, central domain
  misc_feature (1)..(213): Xaa is any amino acid
MNTXGFKPIRIDAVVVSHQHDHDVSYKEIESTIIEKIIKPVLEPTHLLDKKTKYYINPTGRFVVGGPFGDTGLTGRKIIVDTYGGMGRHGGGAFSGKDPTKVDRSAAYAARYVAKNVVAAKLAERCEIQLAYAIGVPFPVSIMVDTFGTGKVPEQKIEKAVEKVFDLSPAGIIKTLDLRKPIFQKTASYGHFGRPEFPWEKTDKVEELKKVIG

SEQ ID NO: 28899 - DNA, 1317 bp, Unknown
  Obtained from environmental sample
  misc_feature (1)..(1317): n is a, c, g, or t
atggccacaaaaatggataacacatcaccgaccaatttctctaacaaaacgcacggctcccccgcgcccgtgggcgccgatacctatgccagcgcattgcacaaagcactcgaaatctttatttcatatacggagcgcacttttgaggacgtaatgtcaaacggcctgcacacaatcgctgacgtgacggacatagacaggctcctcgtattccgcgcccgctcaagagaacgcgctgccccaggagaagtctatcgctgggacagggccgagggagggaccaggcctattgacgaggagctgaaggaattgcccctcaccatgccactgaggcgctggattgcggccatgcgggaagattgctgcgtttccctccggcgcagcgagtttacgggggaggaagccgattttctggggccgcgcggcgtgatgtcaatcctgatagtgccggtttttatcgagggtgaaatatggggggtcgtcacctttcacgacaacaaatacgagcgggattttgacgaaggctgcaccgccatgctgcgctcggtcgcccgcctgtgcgtctcaacgatcatacgcgatgaaaaaacaaaaaaccttgagcgggcgatggaaaccctcaaacgccgcgaaatgataacaagcgcgctcaacaaggcttccatcatttttctttcggagaacgagaggcaactttccgacataatgcatgcaggtgtcagcctgatcgccgacatggccaagtttgacaggctgattctttaccgcaaccacacgagcaacgaaaagcggtatatgtctcaggtttaccgctgggacagagatttggggggaagcacggaattagtggatatgcacataaatgtatcctacgaggaggttctgccgagatgggaaacccatctggcaagcggtaatttcgtgaatagcccttccagactactgcccgaagccgagagacgtctattgcaagaatacggcatcatttcggttatgcagatacctgtgtttattgcaaacagcttctggggattcgcgatttttggagacacgcacaccgaacggtattttgatacagacatcatcgagatgttgcgttcagcggcttttttatttgccaatgcttttattcgcgttgatatggattatgacgcgcacacaggtgtttacaataggcaatactttgatgaaaatctaaaacatcatataaaacatctttcacgtgcaggcgatttgttgagtctgatgataattgatattgacttcttcaaacaatacaatgacacttacggccatatgaaggcgacaaatgtctga

SEQ ID NO: 28900 - protein, 438 aa, Unknown
  Obtained from environmental sample
  DOMAIN (231)...(376): GAF domain
  misc_feature (1)..(438): Xaa is any amino acid
MATKMDNTSPTNFSNKTHGSPAPVGADTYASALHKALEIFISYTERTFEDVMSNGLHTIADVTDIDRLLVFRARSRERAAPGEVYRWDRAEGGTRPIDEELKELPLTMPLRRWIAAMREDCCVSLRRSEFTGEEADFLGPRGVMSILIVPVFIEGEIWGVVTFHDNKYERDFDEGCTAMLRSVARLCVSTIIRDEKTKNLERAMETLKRREMITSALNKASIIFLSENERQLSDIMHAGVSLIADMAKFDRLILYRNHTSNEKRYMSQVYRWDRDLGGSTELVDMHINVSYEEVLPRWETHLASGNFVNSPSRLLPEAERRLLQEYGIISVMQIPVFIANSFWGFAIFGDTHTERYFDTDIIEMLRSAAFLFANAFIRVDMDYDAHTGVYNRQYFDENLKHHIKHLSRAGDLLSLMIIDIDFFKQYNDTYGHMKATNV

SEQ ID NO: 28901 - DNA, 588 bp, Unknown
  Obtained from environmental sample
  misc_feature (1)..(588): n is a, c, g, or t
atggccgagcagcatggggcggacggagaggtgatcgatatatccctcacgaccattcgggtgcagaattgggacaagacgatcgtttccataccggcctacgagtttgtctcttcctcgtttaaaaattggcgcggcatgagcgaaagcggaggcaggcgcataaagcgctccatgcgcttcaggataagcaccgtccacttcctaaccgatgaggagaccgaacgcttgcgcaagataaagttactgacgccgtacattgaccaaaaattagcggatatgagcaaattcaaccaagaggagttctccggttgcgatatgtctgtcatggcgaacgggcggcgtttgacgaacatcggcgcgtttagggcgtactgcgacgcgtacctgcacaaacacccgggcataaatcagaacatgacgataatagtgagacacctggaaccgacggaggcggggttgccgcttgagatatacgtgtttacgagcgacacgcggtgggcggagtacgaggacgtgcaagcggacatattcgaccacctgctatcgcttgttccggagtttgggttggaaatttatcagcggtaa

SEQ ID NO: 28902 - protein, 195 aa, Unknown
  Obtained from environmental sample
  DOMAIN (1)...(193): Mechanosensitive ion channel
  misc_feature (1)..(195): Xaa is any amino acid
MAEQHGADGEVIDISLTTIRVQNWDKTIVSIPAYEFVSSSFKNWRGMSESGGRRIKRSMRFRISTVHFLTDEETERLRKIKLLTPYIDQKLADMSKFNQEEFSGCDMSVMANGRRLTNIGAFRAYCDAYLHKHPGINQNMTIIVRHLEPTEAGLPLEIYVFTSDTRWAEYEDVQADIFDHLLSLVPEFGLEIYQR

SEQ ID NO: 28903 - DNA, 819 bp, Unknown
  Obtained from environmental sample
  misc_feature (1)..(819): n is a, c, g, or t
ttggacgcgctgggatactacaacggcaaatggggtcccctgaacgaaatcaccgtgccgatgaacgacagaggctgctacttcggagacggcgtgtacgatgccgcctgcgcggctaacggggtgacctttgccctggatgagcacattgaccgttttttcaacagcgcagagctcctggaaataaaaatcaatttaacaaaaggggaactgaaaaaaaccctcaatgaaatgtgttccaaagtggataagggagtgtacctggtttattggcaggtaacccgcggaacaggccagcgaaaccatgtatttcctgaaggcccctcaaatctctggattatgataaagccttatcccttatgcgatctttataaaaaaataaagctcatcacaatggaagatacccgttttctccactgcaacattaagaccattaaccttattccaaatgtcattgcatcccagcgggcgctggaagcgggctgttacgaaacggtatttcaccggggcgaaacagtaaccgagtgcgcccacagcaatgttcacatccttaaaaacggcaggtttatcacccatcaggcggacaatctgatcctcccgggcattgcccgcagccgtatattgcaagcctgcgacaggcttaacattccggttgacgaacgggagtttaccctttcggaattgtttgacgcggacgaggcgattgtgtccagcagcggtgatttttgcgtcagcgccgaaatggtcgacggaaaaagcgtgggagggaaagcgccggaactgctaaaaaaattcaggacctcggccaatctgtcatga

SEQ ID NO: 28904 - protein, 272 aa, Unknown
  Obtained from environmental sample
  DOMAIN (8)...(266): Aminotransferase class IV
  misc_feature (1)..(272): Xaa is any amino acid
MDALGYYNGKWGPLNEITVPMNDRGCYFGDGVYDAACAANGVTFALDEHIDRFFNSAELLEIKINLTKGELKKTLNEMCSKVDKGVYLVYWQVTRGTGQRNHVFPEGPSNLWIMIKPYPLCDLYKKIKLITMEDTRFLHCNIKTINLIPNVIASQRALEAGCYETVFHRGETVTECAHSNVHILKNGRFITHQADNLILPGIARSRILQACDRLNIPVDEREFTLSELFDADEAIVSSSGDFCVSAEMVDGKSVGGKAPELLKKFRTSANLS

SEQ ID NO: 28905 - DNA, 687 bp, Unknown
  Obtained from environmental sample
  misc_feature (1)..(687): n is a, c, g, or t
atgcaatacaccctgcataaaggctttggctcggaatacataaaactggaacctaccgaattatgctttcacattttggatgggctaccaaagagcaaaggaacatatttgcgcttgggcgaaaaattgcgtgaatggctgcaccccgcaaaagatgaccgactgctctcttgctactgcggagctgccattgaaagcatacaactctgcaagagttttaacgatgttcactgccttgatgtacgggaatgggcaaagcaatcttttacgcaaaatgttcaagtcttgaaaattaaaaatgcccgcttttaccattgcaaattggaagagacttgggtaaaaaaattcttcgcaggcgaaataaacaaaggcaaatggactatcatcctaaaccctccgcagggcgaactattaacgcaaaccctgacgcaggcaatagcaaaaaccgaaccccaaagagtggttcatataacaggcaatttggagaacgctgcaaaagagacaaagcggtggcgaaattgcggttatgttttgagaaagataatgcccatagaatggcatccaaatgttaaacgtttggagctggctatgctgtttgtgccggacagagcggggttgcttgggcgtaagctccctatccctaagaaacctaaacagaattttgcgccgaggtttaagcagagataa

SEQ ID NO: 28906 - protein, 228 aa, Unknown
  Obtained from environmental sample
  misc_feature (1)..(228): Xaa is any amino acid
MQYTLHKGFGSEYIKLEPTELCFHILDGLPKSKGTYLRLGEKLREWLHPAKDDRLLSCYCGAAIESIQLCKSFNDVHCLDVREWAKQSFTQNVQVLKIKNARFYHCKLEETWVKKFFAGEINKGKWTIILNPPQGELLTQTLTQAIAKTEPQRVVHITGNLENAAKETKRWRNCGYVLRKIMPIEWHPNVKRLELAMLFVPDRAGLLGRKLPIPKKPKQNFAPRFKQR

SEQ ID NO: 28907 - DNA, 909 bp, Unknown
  Obtained from environmental sample
  misc_feature (1)..(909): n is a, c, g, or t
atgctggaaaattccaaagcgcaggtggctgtcatggagcgcttggcaagtaacgacctgaccgccgccgttgtccccagatctgatttggactccatgaacatcgccataaagaagatgctcggcaacctgaacgccgccatgagcgagataaacgacgcctccgccagattcaaggatgtgtcaaatcagatttccagcggatcccagagtttggccgagacgtcgaacgaacaagcgagttctcttgaggagatatcgtcgagccttgaggagacctcctcaatgaccaagcagaacgccggcaactccgatcaggcgaagaaattggtcgaccaagtggtttacgacctgagcgaagtctctaccgccatggatcgcatggcggaggccatacggcagatcaagaagtcgtccgacaataccgccatgatcataaagacgatagacagtatcgctttccaaaccaatctgttggccctgaacgccgccgtggaagccgcccgcgccggagatgcgggtaaaggttttgcggtggtggccggcgaggtgcgcaacctcgcgaagcgtagcgccgacgcggcaaaagataccgccaacctcattaaggtgtcggccgaacacgccgagaacggcgtggctatcacgcgagacgtggagagagccttaagccaaagcgtggagcacgccggcaaggtcggcggccttatcgccgagatcgcgagcgcgtgcaacgatcaagctttaggcatagagcaggtaaacaaagctctcgcccaaatgaacatcgttactcagcaaacgaccgccaactccgaagaatcggcaagcgccgcgtcggaactcagcgatagggcggcggaattggctaagctggtgggagagttcaagttaaataaggtcagttga

SEQ ID NO: 28908 - protein, 302 aa, Unknown
  Obtained from environmental sample
  DOMAIN (77)...(299): Methyl-accepting chemotaxis protein (MCP) signaling domain
  misc_feature (1)..(302): Xaa is any amino acid
MLENSKAQVAVMERLASNDLTAAVVPRSDLDSMNIAIKKMLGNLNAAMSEINDASARFKDVSNQISSGSQSLAETSNEQASSLEEISSSLEETSSMTKQNAGNSDQAKKLVDQVVYDLSEVSTAMDRMAEAIRQIKKSSDNTAMIIKTIDSIAFQTNLLALNAAVEAARAGDAGKGFAVVAGEVRNLAKRSADAAKDTANLIKVSAEHAENGVAITRDVERALSQSVEHAGKVGGLIAEIASACNDQALGIEQVNKALAQMNIVTQQTTANSEESASAASELSDRAAELAKLVGEFKLNKVS

SEQ ID NO: 28909 - DNA, 390 bp, Unknown
  Obtained from environmental sample
  misc_feature (1)..(390): n is a, c, g, or t
ttgcacgcgctcgcgatctcggcgataaggccgccgaccttgccggcgtgctccacgctttggcttaaggctctctccacgtctcgcgtgatagccacgccgttctcggcgtgttcggccgacaccttaatgaggttggcggtatcttttgccgcgtcggcgctacgcttcgcgaggttgcgcacctcgccggccaccaccgcaaaacctttacccgcatctccggcgcgggcggcttccacggcggcgttcagggccaacagattggtttggaaagcgatactgtctatcgtctttatgatcatggcggtattgtcggacgacttcttgatctgccgtatggcctccgccatgcgatccatggcggtagagacttcgctcaggtcgtaa

SEQ ID NO: 28910 - protein, 129 aa, Unknown
  Obtained from environmental sample
  misc_feature (1)..(129): Xaa is any amino acid
MHALAISAIRPPTLPACSTLWLKALSTSRVIATPFSACSADTLMRLAVSFAASALRFARLRTSPATTAKPLPASPARAASTAAFRANRLVWKAILSIVFMIMAVLSDDFLICRMASAMRSMAVETSLRS

SEQ ID NO: 28911 - DNA, 714 bp, Unknown
  Obtained from environmental sample
  misc_feature (1)..(714): n is a, c, g, or t
gtgaacggcgccgattacggcgcggcggatatgctggcaggggaagccgtcattgacggcaccatcgtcacccaagccgtgcagggcggcatatacggctaccgctaccggctgatattcaccatcgaaacggcactaggggaaacgctgacgctggacggcgatttcttggtggggaacacagggccgggcagccgcgacctgaccacgcttcaggccgtcaaggactggcttgggctgaaaaatgacgtggacaatgccatgctacagcgtctaattacatcggaaagcatggcgattgaaaggtatatcgggcgcccggtgttgccggaaacgcggacagacacgatcaccgggtatggcaccataaccattgttgccccggccagccccattcagagcatagaaaaggtgctggtagatggcgcagaagtcaaggccattcacgaccggcttgcaatttggcgggctgacaatcgcccatggccgcaaagggccagaatccaattgacttacacagccggatatgattccattccaagcgacatcgagcaggcttgcatcgaactggtagcgttgcgctataaagagcgcgaccacattggccggacttccgtaagtctaggcggcgaaacgaccgcattcgtcacacgcgccatgccgctgtccacagaaacgcgcctggccccatatcgcaaggtggcgccatgctag

SEQ ID NO: 28912 - protein, 237 aa, Unknown
  Obtained from environmental sample
  misc_feature (1)..(237): Xaa is any amino acid
MNGADYGAADMLAGEAVIDGTIVTQAVQGGIYGYRYRLIFTIETALGETLTLDGDFLVGNTGPGSRDLTTLQAVKDWLGLKNDVDNAMLQRLITSESMAIERYIGRPVLPETRTDTITGYGTITIVAPASPIQSIEKVLVDGAEVKAIHDRLAIWRADNRPWPQRARIQLTYTAGYDSIPSDIEQACIELVALRYKERDHIGRTSVSLGGETTAFVTRAMPLSTETRLAPYRKVAPC

SEQ ID NO: 28913 - DNA, 642 bp, Unknown
  Obtained from environmental sample
  misc_feature (1)..(642): n is a, c, g, or t
gtgccgccgccgggttatttgcagggtgtgcgcgcgttatgcgacaaatacggcatattgctgatacttgacgaaatccaaacggggatgggacgtaccggttcgtattttcgctgcgaagcggagaatgttgtgcctgatattatgacatacggcaaggcatttggcggcggtattatgcctataacgggcataattgcgcgtccgcacctatgggtggatgatttgataaaaaatccgtggctgcttggcagtccgacattcggcggcaatccgcttgcgtgttcagccgctttagccgcgctcaattatatgattacgcatgacattcccgctcaggtaaaactaaaaggcgagtttatgctggaagaactttccaaactgaaagagaaatatcagaccgtcgtaaaagacgcgcgcggcatagggcttttgctggccgtggagtttccggaggcggaaataggttacgcatttgccaaagcaatgtttgcgcggcgcgttatgaccgccggaacgctgaataactccgcgacaatccgcattgagccgccgctgacaatattgcagtctgagcttgaaaccgtgctgacacgcatggacgaagcgctcaccgacataaaaaaggagtttaacctttaa

SEQ ID NO: 28914 - protein, 213 aa, Unknown
  Obtained from environmental sample
  DOMAIN (1)...(152): Aminotransferase class-III
  misc_feature (1)..(213): Xaa is any amino acid
MPPPGYLQGVRALCDKYGILLILDEIQTGMGRTGSYFRCEAENVVPDIMTYGKAFGGGIMPITGIIARPHLWVDDLIKNPWLLGSPTFGGNPLACSAALAALNYMITHDIPAQVKLKGEFMLEELSKLKEKYQTVVKDARGIGLLLAVEFPEAEIGYAFAKAMFARRVMTAGTLNNSATIRIEPPLTILQSELETVLTRMDEALTDIKKEFNL

SEQ ID NO: 28915 - DNA, 429 bp, Unknown
  Obtained from environmental sample
  misc_feature (1)..(429): n is a, c, g, or t
gtgtcctgcagcagcaggcggctgccggcggagcatacctcgccctggttgcaaaatatggcgaataacgcccagtcaactccgatgtcaatatccacatcatcgaaaatgacgcagggcgatttgccgcccaattccaaaccgacgcctttaagcgtgtccgcggcggttcgcataatcgacttccctgtatccgtgccgccggtgaacactaccttgcctattccgggatgcctcacgattgcgtcgcccacgtctgtaccgccgcccataaccaaattagcggcgcctttcggcaaactcacggactcaaacaactcaaacaggcgcactgaactcagcggcgtaaggcttgacggcttaaaaaccgccgtatttcccgccgcaaggcagggcgctattttccatgcggccatcatcagcggatag

SEQ ID NO: 28916 - protein, 142 aa, Unknown
  Obtained from environmental sample
  misc_feature (1)..(142): Xaa is any amino acid
MSCSSRRLPAEHTSPWLQNMANNAQSTPMSISTSSKMTQGDLPPNSKPTPLSVSAAVRIIDFPVSVPPVNTTLPIPGCLTIASPTSVPPPITKLAAPFGKLTDSNNSNRRTELSGVRLDGLKTAVFPAARQGAIFHAAIISG

SEQ ID NO: 28917 - DNA, 1692 bp, Unknown
  Obtained from environmental sample
  misc_feature (1)..(1692): n is a, c, g, or t
atgctggtgccaggcacagccgctactccagcaccagctgctacgccggctcctgctactgcacctaaagctccagctgccgcgccagccccgactgctgctccggctgctgccgcacctaaggctcctgccgctgcgcctgctccggctgctgttgctccggccccagctgctgctccggctgctgccgcacctaaggctcctgccgctgcgcctgctccggctgctgttgctccggccccagctgctgctccagctgctgccgcacctaaggctcctgccgctgcgcctgctccggctgctgttgctccggccccagctgctgctccggctgctgccgcacctaaggctcctgccgctgcgcctgctccggctgctactccagccccggctgctacgccggctgctgccgcacctaaggctccagctgctactccagcccctgccgctactccagccccggctgctacgcctgctgctgcgccagccgctcacgcaccaaccccagctcctgccgctactccagctcctgctgctgcgccagccgctcacgcaccaaccccagctcctgccgctactccagctcctgctgctgcgccagctgctcatgcaccaaccccagctcctgccgctactccagccccagctgctaccgtagctcctgctcctgctgctccagttgcaactccagctccagttgcaacacaaggaactgcccaagctcaagctgcagcaccagcggataccaatgttgtgaaacctaaacccgaaaagagaaagaaaaagagagtggaatttgccacggttgacttccccgccgactttgaaattgaggcgagaaaagttatgcccgtttcctctgacggttggccagctgataatttggatgaatggtggggcagagcaaacttgaaggttgaaactcaatccgagtatttcaagggtaaagtgcatctgcgtatgtaccctggtgaattcaaagacagagctagtaccgtaaagagagatactgctggtaatattattccttcttcggaagctcgtgacctatttatgatttacgaagcatgggcttggcacagaggcgattacttcaatttcaaaataggccgttggagcaacacaacacgttttggaagccaaacctttggtggttatatagatgccaaaaaggataataattgggacccaagcacctctctggacggtttaggcaaaaacgacgtgcgcagacaagcagggtttatgagcacttatgatccggaaaattctgttcaatttggcttccataactttgcggaaaatatatctttggacctatccttgataagcatggataaacacctgaataaaggtgacttgcgcatcaatttacgttttgaagatcttgccaacgtgagtggcttaaatgttggtcttggctatcgctccaatctgttcgatgaaatttacagcaaatacggcgatgtaacccataccatagctcttggcggaagcatacctattttatccggcgtaggcttcttgaagaacatgaatttatttgccgaagctgcccttgtaggtttggacgatcaaaatggcgaagaaccaaaagaaaatgccgactgctcaaaagttggcagtgaatgccgctctgatagagggaaaaccaatgattctagcaaacccatacttttaggctggaattag

SEQ ID NO: 28918 - protein, 563 aa, Unknown
  Obtained from environmental sample
  SIGNAL (1)...(21)
  misc_feature (1)..(563): Xaa is any amino acid
MLVPGTAATPAPAATPAPATAPKAPAAAPAPTAAPAAAAPKAPAAAPAPAAVAPAPAAAPAAAAPKAPAAAPAPAAVAPAPAAAPAAAAPKAPAAAPAPAAVAPAPAAAPAAAAPKAPAAAPAPAATPAPAATPAAAAPKAPAATPAPAATPAPAATPAAAPAAHAPTPAPAATPAPAAAPAAHAPTPAPAATPAPAAAPAAHAPTPAPAATPAPAATVAPAPAAPVATPAPVATQGTAQAQAAAPADTNVVKPKPEKRKKKRVEFATVDFPADFEIEARKVMPVSSDGWPADNLDEWWGRANLKVETQSEYFKGKVHLRMYPGEFKDRASTVKRDTAGNIIPSSEARDLFMIYEAWAWHRGDYFNFKIGRWSNTTRFGSQTFGGYIDAKKDNNWDPSTSLDGLGKNDVRRQAGFMSTYDPENSVQFGFHNFAENISLDLSLISMDKHLNKGDLRINLRFEDLANVSGLNVGLGYRSNLFDEIYSKYGDVTHTIALGGSIPILSGVGFLKNMNLFAEAALVGLDDQNGEEPKENADCSKVGSECRSDRGKTNDSSKPILLGWN

SEQ ID NO: 28919 - DNA, 669 bp, Unknown
  Obtained from environmental sample
  misc_feature (1)..(669): n is a, c, g, or t
atggccgaggtatgctggtgccaggcacagccgctactccagcaccagctgctacgccggctcctgctactgcacctaaagctccagctgccgcgccagccccgactgctgctccggctgctgccgcacctaaggctcctgccgctgcgcctgctccggctgctgttgctccggccccagctgctgctccggctgctgccgcacctaaggctcctgccgctgcgcctgctccggctgctgttgctccggccccagctgctgctccagctgctgccgcacctaaggctcctgccgctgcgcctgctccggctgctgttgctccggccccagctgctgctccggctgctgccgcacctaaggctcctgccgctgcgcctgctccggctgctactccagccccggctgctacgccggctgctgccgcacctaaggctccagctgctactccagcccctgccgctactccagccccggctgctacgcctgctgctgcgccagccgctcacgcaccaaccccagctcctgccgctactccagctcctgctgctgcgccagccgctcacgcaccaaccccagctcctgccgctactccagctcctgctgctgcgccagctgctcatgcaccaaccccagctcctgccgctactccagccccagctgctaccgtag

SEQ ID NO: 28920 - protein, 222 aa, Unknown
  Obtained from environmental sample
  misc_feature (1)..(222): Xaa is any amino acid
MAEVCWCQAQPLLQHQLLRRLLLLHLKLQLPRQPRLLLRLLPHLRLLPLRLLRLLLLRPQLLLRLLPHLRLLPLRLLRLLLLRPQLLLQLLPHLRLLPLRLLRLLLLRPQLLLRLLPHLRLLPLRLLRLLLQPRLLRRLLPHLRLQLLLQPLPLLQPRLLRLLLRQPLTHQPQLLPLLQLLLLRQPLTHQPQLLPLLQLLLLRQLLMHQPQLLPLLQPQLLP

SEQ ID NO: 28921 - DNA, 753 bp, Unknown
  Obtained from environmental sample
  misc_feature (1)..(753): n is a, c, g, or t
atgcgggcggtagacgttcttaacgtaacaaaaaaattccctgtctatgatgacttgcctgataatgaacagataaaagacggctatttctacgccctttgtgacatttcattttcgttagaaaacggcgagtgcgcaataatcgcgggggcgaacggttctgggaaaagcgtgttaatgtccattatcgcgggtctagaagaggcttcgtcaggctccgttaagacaagctccaaagcggggcttgtgtttcaggagcccgactcgcagatactcggtgagactccggcggaagatatagccttcggcccgcgcaatatgaagttatcaaaaaatgaaataaaagcgcgggtaaaatcagccctcctgcttacaggtcttgaacaacgcgcggacttccccgcccgctccctttcaggcggcgaaaaacggcggcttgccgccgccggagttttggcaatggacgcgcagattataatttttgacgagccttacgccaacatggactatcccggcgttgttcaggtaaacaggcttttccaaaaattaaccgcggacggcaaaactgtcattattcttacccatgagctggaaaaatgtttggctctttcaaaacgtttcattgtattatgtaagggaaaaaaagtttttgacggcgaatctttcgacgtactttcccatgatcttgaggcgtggggcattcataatccgttgaaaaattccgcccaaaaaccgggagaccttttatggtga

SEQ ID NO: 28922 - protein, 250 aa, Unknown
  Obtained from environmental sample
  DOMAIN (43)...(213): ABC transporter
  misc_feature (1)..(250): Xaa is any amino acid
MRAVDVLNVTKKFPVYDDLPDNEQIKDGYFYALCDISFSLENGECAIIAGANGSGKSVLMSIIAGLEEASSGSVKTSSKAGLVFQEPDSQILGETPAEDIAFGPRNMKLSKNEIKARVKSALLLTGLEQRADFPARSLSGGEKRRLAAAGVLAMDAQIIIFDEPYANMDYPGVVQVNRLFQKLTADGKTVIILTHELEKCLALSKRFIVLCKGKKVFDGESFDVLSHDLEAWGIHNPLKNSAQKPGDLLW

SEQ ID NO: 28923 - DNA, 579 bp, Unknown
  Obtained from environmental sample
  misc_feature (1)..(579): n is a, c, g, or t
atgtataaaatcaacaggccttcgcggaatcgtttagtgttcgcggctgttttcgcggctcttatcgccgtttctaactttttccaaattcctactcccataggcgtgcctatagtgcttaaaaatatgtttgtagtcctttccgggacaattcttggaagtttttacggcggtttcgcggtacttgttttaatcgcggcggggcttataggcatacccgtttttgtaattccgggcggcatcggtgtctttaacactccgcttggcggctatataatcgggtattttgccgcaagcttgttcgcggggcttgtttgcggacttccgaaaataagcgagaaaaaaatcaaagccgttccgtttataaggatttgtattgggtcttttttggggtttgcgctaattttaatatgcggttctctttacatgatgtttcttaattcaatgacaatcaaagcggcttttctggccggtactgcgcccttcatttttgccgacttacttaaattcgcgatcagtattcctttggctctttcgctccggcctatagcggcaaggtatattaacaatgaagtgtaa

SEQ ID NO: 28924 - protein, 192 aa, Unknown
  Obtained from environmental sample
  SIGNAL (1)...(25)
  DOMAIN (24)...(184): BioY family
  misc_feature (1)..(192): Xaa is any amino acid
MYKINRPSRNRLVFAAVFAALIAVSNFFQIPTPIGVPIVLKNMFVVLSGTILGSFYGGFAVLVLIAAGLIGIPVFVIPGGIGVFNTPLGGYIIGYFAASLFAGLVCGLPKISEKKIKAVPFIRICIGSFLGFALILICGSLYMMFLNSMTIKAAFLAGTAPFIFADLLKFAISIPLALSLRPIAARYINNEV

SEQ ID NO: 28925 - DNA, 543 bp, Unknown
  Obtained from environmental sample
  misc_feature (1)..(543): n is a, c, g, or t
ttgctatacaacgccgcggctaactggaggtatactatgagaaagtatacgctttttttcgtctgctgtttggtgtcgctcattgcggcagtaaccgtttctgcacaagggtttacaggtcccggcgctaatccgccgtcgccccctggccccggttcatatcctccgcctccgcctcccactacgccgccccccggcggtcccggtgcatacccgcctcctccgcctccggggtggcagggaaactcagggcagtatgggttcaccggtccttcccaaactgtttctgtagctcaagcgcagtcttctggtcatagaactcctgtgataataaagggaaatatcattcaggctataggcggcgatatgtatacattccgtgattcttccggtgaaattgtcattcgaataggcccacgcgaatggcagtactacggcaccactatcagtccgtctgataccatcgaaatcagcggtgaagtatgcaacgggagggggtgggagccagtacatgtacacgcacgctttatgaggaaaatatag

SEQ ID NO: 28926 - protein, 180 aa, Unknown
  Obtained from environmental sample
  DOMAIN (13)...(179): Domain unknown function (DUF388)
  misc_feature (1)..(180): Xaa is any amino acid
MLYNAAANWRYTMRKYTLFFVCCLVSLIAAVTVSAQGFTGPGANPPSPPGPGSYPPPPPPTTPPPGGPGAYPPPPPPGWQGNSGQYGFTGPSQTVSVAQAQSSGHRTPVIIKGNIIQAIGGDMYTFRDSSGEIVIRIGPREWQYYGTTISPSDTIEISGEVCNGRGWEPVHVHARFMRKI

SEQ ID NO: 28927 - DNA, 699 bp, Unknown
  Obtained from environmental sample
  misc_feature (1)..(699): n is a, c, g, or t
atgaaggcggttattgaaatgcgcggaattaagcgtgaataccgtatggaaagcaaacaggtggaaaaagacggcgcggaggcaatagtggtacgcgccctgcgcggagtggatttctccgccgaagccggcgagtttatttccgtcatggggccttccggttcaggcaaatcaactctgatgaatattctcggctgccttgacaaaccaagcgccggaacctatacccttgacggcattgaaacctccagctccaattcggacactttcgcattcatcagaaaccggaaaatcggttttgtatttcaatcttttaatttactggcgcggactaccgcgctggaaaatgtggaacttccccttttttaccgcaaacatgagaaggccgaaaaaaagatgaatacaaaaatacgcaaagaacgcgcaatgagggcgctaaaagtagtcgggctggaaaaacgtatggatcattttccgtcacagctttcaggcggacagcagcaaagggtcgccatcgcgcgggcaatggtaaacgatccggcgttcattcttgccgatgagccgacaggcaacctcgataccggaatgacgcttgaaatcatggggctttttcaggagcttaaccggcaggggaagacgatcatcatggtaacgcacgagccggaactcgccgcatacacaaagcgaatcattacttga

SEQ ID NO: 28928 - protein, 232 aa, Unknown
  Obtained from environmental sample
  DOMAIN (44)...(232): ABC transporter
  misc_feature (1)..(232): Xaa is any amino acid
MKAVIEMRGIKREYRMESKQVEKDGAEAIVVRALRGVDFSAEAGEFISVMGPSGSGKSTLMNILGCLDKPSAGTYTLDGIETSSSNSDTFAFIRNRKIGFVFQSFNLLARTTALENVELPLFYRKHEKAEKKMNTKIRKERAMRALKVVGLEKRMDHFPSQLSGGQQQRVAIARAMVNDPAFILADEPTGNLDTGMTLEIMGLFQELNRQGKTIIMVTHEPELAAYTKRIIT

SEQ ID NO: 28929 - DNA, 1128 bp, Unknown
  Obtained from environmental sample
  misc_feature (1)..(1128): n is a, c, g, or t
ttgtctagtgatcctatttacagcgcccagcttgaggctttaaaagaaaagaaaaaaaatatgaggctaggcggtggagccgaggctattgagaaacagcgcaaaaaaggcaagctctcggtttgggagagaatagaatacttctttgacgctggaacttttgtggaagttggcgcatatatagaactcagaaatgaattttttgggctaggcaaaaaaaagacccctggcgatggcgtggtgaccggctttgggcttgtgaatggccgcttggtttatgcggctgctcaggactttaccgttttaggtgggtcgcttggtgaaatgcacggaaaaaaaatcgcaagccttatggatatggctctgcaaaacggagccccctttgtgtctctgaacgattccggcggtgcaagggttcaagaaggcataggcgctctttgcggctacggcgatatctttatgaggaataccagggcaagcggcgttatcccgcagatatccttgataatgggaccttgtgcaggtggcgcggtctatagccccggcataacggactttgtggttatggtaaaagatacctcctatatgttcataacaggtccggaagtcatcagaaccgtgacaggcgagaccgtgagcatggaggctctaggcggcccggaaatgcactccggcaagagcggggtagtgacctacgttggggaaaatgaccaagatgctctggactgggtgaagaggcttctttcctacctacctggcagcaatgcggaaacccctccttctgtgaactctgtgcctcagattgaaatgccagcggatatagaagagcttgtccctgccaatgtgaacaacccctacgatatgtctgaggttgtgaagaatattttggacataaattcctttttggaattgcaggaaaattatgcccgcaatgttataataggctttgggcgtttgggtgggacttctgtaggcattgtagcgaataacccacgggaatccgctggttgcttggatgtgaatgtcagtgacaaggctgcgcgctttgtgcgtttttgctatgcttttaacatccctctcataaacgcttgtagatgttccgggattcttgtctgtctcataccctga

SEQ ID NO: 28930 - protein, 375 aa, Unknown
  Obtained from environmental sample
  DOMAIN (28)...(374): Carboxyl transferase domain
  misc_feature (1)..(375): Xaa is any amino acid
MSSDPIYSAQLEALKEKKKNMRLGGGAEAIEKQRKKGKLSVWERIEYFFDAGTFVEVGAYIELRNEFFGLGKKKTPGDGVVTGFGLVNGRLVYAAAQDFTVLGGSLGEMHGKKIASLMDMALQNGAPFVSLNDSGGARVQEGIGALCGYGDIFMRNTRASGVIPQISLIMGPCAGGAVYSPGITDFVVMVKDTSYMFITGPEVIRTVTGETVSMEALGGPEMHSGKSGVVTYVGENDQDALDWVKRLLSYLPGSNAETPPSVNSVPQIEMPADIEELVPANVNNPYDMSEVVKNILDINSFLELQENYARNVIIGFGRLGGTSVGIVANNPRESAGCLDVNVSDKAARFVRFCYAFNIPLINACRCSGILVCLIP

SEQ ID NO: 28931 - DNA, 630 bp, Unknown
  Obtained from environmental sample
  misc_feature (1)..(630): n is a, c, g, or t
atgcctgaatattttcagaagagcgaatttgaggggagggcgattttagtaaaaaaacttaaaatactgccgtttgaatttgtcgttaggggatatatgttcggtaatatgtgggaagcatattccaagggaagggaattctgcggtcaaaaaatagaaggcgattataaattggctgaaaaacttgatatccccctatttaccccttcaacaaaagcgcacgtagggcacgacgaatatatttctattcaatatctcgccgataagattggccaccacctgacaaaaagaatagaaaaaatctcctttgaactttataacacttgttataattacgcccacagcaaagatattatcatcgccgacactaaatttgaatttggatttgatgaaaacaacgacctcattcttgcggacgaaatatttactcccgattcaagcaggttctggagcctttccgattatcaggtaggaacttcaccaaagagtttcgacaagcaatttgtacgcgactggcttcttaacaacaaaattgacggcgagatgcaatttgataatgtaccagacgatgtgttaagcaaaacatcagatatatatgccgaatgcctgcggaggctggttaatgcctga

SEQ ID NO: 28932 - protein, 209 aa, Unknown
  Obtained from environmental sample
  DOMAIN (1)...(191): SAICAR synthetase
  misc_feature (1)..(209): Xaa is any amino acid
MPEYFQKSEFEGRAILVKKLKILPFEFVVRGYMFGNMWEAYSKGREFCGQKIEGDYKLAEKLDIPLFTPSTKAHVGHDEYISIQYLADKIGHHLTKRIEKISFELYNTCYNYAHSKDIIIADTKFEFGFDENNDLILADEIFTPDSSRFWSLSDYQVGTSPKSFDKQFVRDWLLNNKIDGEMQFDNVPDDVLSKTSDIYAECLRRLVNA

SEQ ID NO: 28933 - DNA, 633 bp, Unknown
  Obtained from environmental sample
  misc_feature (1)..(633): n is a, c, g, or t
atggcgaggatcatcgacatcacgattgaccagcagacttacttcgggctgcggtgcgaggacatcgagcgggttcaggctatgcctgattttcttgatgctgcggtaaaaaacgccgcctacgctttgcgtgatacgatagacacttataccgccgggatacttaatgccggggcggggattgcgttgggcgcaactgtacctatcgcaagtaccgattatcttcacctattcagtcttatcgggcaaaagcttgacgagcagaatgtgccgagggctgggcgctggattgtgattccgccttttgtagccgccgctattgcggaaaaaatcattgccttgcaaataccgaatccggcggtagtggctgacgcctttatcagcagagcttacgggtttgatatttttatgtcaaataacctcccgcaaggcggtgctgggaattattctgttcttgccggaaccgcagattgtggaacccaccttgtccagatagacaaaacggaatcaatccgcaacccggagcagttcggcgatctggttcgtggccttgcggtgtatacaagtaaggtattattgccggccgcattgataaaagctgttgtaaagccgcctacggaaactattgcttag

SEQ ID NO: 28934 - protein, 210 aa, Unknown
  Obtained from environmental sample
  misc_feature (1)..(210): Xaa is any amino acid
MARIIDITIDQQTYFGLRCEDIERVQAMPDFLDAAVKNAAYALRDTIDTYTAGILNAGAGIALGATVPIASTDYLHLFSLIGQKLDEQNVPRAGRWIVIPPFVAAAIAEKIIALQIPNPAVVADAFISRAYGFDIFMSNNLPQGGAGNYSVLAGTADCGTHLVQIDKTESIRNPEQFGDLVRGLAVYTSKVLLPAALIKAVVKPPTETIA

SEQ ID NO: 28935 - DNA, 435 bp, Unknown
  Obtained from environmental sample
  misc_feature (1)..(435): n is a, c, g, or t
ttgaaattggaggggaaaatgaaacaaacgcactcatgggaaattacagacgagttctgggcaatagccgaacctttgattcctaaaaaaaccagagaccctgataaagcgtaccaaagaaaaccgggtggaggccgccatccaatggaaccacgaaaggtacttcaggccattttctttgtattacgtaccggtatccagtggaacgccttgcccaaatccctaggctcttcaagcaccgttcatcggcatttcatgttttggtcccagacgggtttttttaaggccctgtgggcctgcggaattagaacgtatgatgaagtcaaaggcataaactggacatgggtaagcggagacggctgtatgaccaaggctccattcgcacaagaaacagtcggggctaatccaaccgaccgggggaaaaaaaggaagtaa

SEQ ID NO: 28936 - protein, 144 aa, Unknown
  Obtained from environmental sample
  misc_feature (1)..(144): Xaa is any amino acid
MKLEGKMKQTHSWEITDEFWAIAEPLIPKKTRDPDKAYQRKPGGGRHPMEPRKVLQAIFFVLRTGIQWNALPKSLGSSSTVHRHFMFWSQTGFFKALWACGIRTYDEVKGINWTWVSGDGCMTKAPFAQETVGANPTDRGKKRK

SEQ ID NO: 28937 - DNA, 774 bp, Unknown
  Obtained from environmental sample
  misc_feature (1)..(774): n is a, c, g, or t
gtgagcagcaaattcaccagcgcgaaacttgattattttttcaggagttttctcgatattgaaggtttcgccggtgcggataattccatgaacggtgttcaggttgataatgacggcggagaaatcgataaaatagcttttggcgtggacgcctgcctggaaacctttgagcgcgcggcggaattgggcgcgggtatgctctttgtccaccacgggcttttttggggatctccccttcgccttgccgggaatcaccggcagcgggtaaagtgtctgctggatcacaatatctgcctgtacgcggtacacctgccgctggatcagcatcccaggatgggaaacaatgccggtctggcggaacttttggggcttgagggtattgagcctttttgcgaatatcacggcaagaaaataggttgcaagggagctttcccccagccgctttccgttgaccaggcggcaaagaaaatcgccttttcggatcgcccgccgttgggggtctacccctttgggaaaaaggaaaatacaagctgcgccgttgtttcaggcggtgcggcaaaagaggctttgcaggcccttgatcaaggcgttgacctgtatgtaacaggcgagatgtcccatcagatgtatcatgaatgtcttgaggggaaacttaatatgatagccggcgggcattattccaccgaggtttggggtgtccgcgctgttatgcgccattgcgccgaagagttgcacattgatacggtgtttatagacaacccgaccggtttataa

SEQ ID NO: 28938 - protein, 257 aa, Unknown
  Obtained from environmental sample
  DOMAIN (20)...(253): NIF3 (NGG1p interacting factor 3)
  misc_feature (1)..(257): Xaa is any amino acid
MSSKFTSAKLDYFFRSFLDIEGFAGADNSMNGVQVDNDGGEIDKIAFGVDACLETFERAAELGAGMLFVHHGLFWGSPLRLAGNHRQRVKCLLDHNICLYAVHLPLDQHPRMGNNAGLAELLGLEGIEPFCEYHGKKIGCKGAFPQPLSVDQAAKKIAFSDRPPLGVYPFGKKENTSCAVVSGGAAKEALQALDQGVDLYVTGEMSHQMYHECLEGKLNMIAGGHYSTEVWGVRAVMRHCAEELHIDTVFIDNPTGL

SEQ ID NO: 28939 - DNA, 426 bp, Unknown
  Obtained from environmental sample
  misc_feature (1)..(426): n is a, c, g, or t
atgacatcaaattttaacgaactttatctggaaaatgtttccagagtttgcggcgatatgctgaattatgcagtaaatgtttgcaaagaagatggcgatggatttttgcgaaaattcattgaaagtggaatagcaaaggaatttgaaataggtaatccaaaatacattgttggtaaaagcggaattgaaattgctatggatattcttgggcaactcaattgcaaggaaaattatttgagcaacacaacaaaagaatactgggctgcttatgttttggcaaaattcaaattcaataccgaattgtcttttgaagaaattttaaagcatttgcctttttcaaaaatcttagaattataccaccccttgcacgaggcagatataactaaattttttgaggtggcaaagcagcattttcgctcaaaataa

SEQ ID NO: 28940 - protein, 141 aa, Unknown
  Obtained from environmental sample
  misc_feature (1)..(141): Xaa is any amino acid
MTSNFNELYLENVSRVCGDMLNYAVNVCKEDGDGFLRKFIESGIAKEFEIGNPKYIVGKSGIEIAMDILGQLNCKENYLSNTTKEYWAAYVLAKFKFNTELSFEEILKHLPFSKILELYHPLHEADITKFFEVAKQHFRSK

SEQ ID NO: 28941 - DNA, 870 bp, Unknown
  Obtained from environmental sample
  misc_feature (1)..(870): n is a, c, g, or t
atgaaggaaagttttgattttaagaaaatgttgcaaatagcgtctgactctgatttacccgttttgcttacgggcgaatctggcacaggcaaggaactcgcggcaagggagttgcacgctctcagcaaaagaaataaccgagcttttgttgcggttaattgcggagccatttcggctggcatcgcagagtcccttttttgcgggcacgttaaaggtgcctttacaggggcaaacagcgatagaacaggttttgtgcgagcggcaagcggcggcactctttttttggatgaagtggcggagctttccccagacattcaaaaaactcttctgcgtacgttgcaagagaagatggttatgcctgttggcagccaaaaagaggtaaaggtggatttcaggctggtgtgtgcaactcacagaaatttgcccgcccttttggaaaaagggcttttcaggcaggatttatatttccggctggcttccttaaccataaacatccctcctttgagagagcgaaatgatatgcgaagcatagccgaatctctttggaagggtgatgagcctttgagcgagcgtaatttaagggctttgcaaaattattcgtggccaggcaatataaggcagttgaaaaatgttttggaacgctatgctctttttaaaaaccacggttattctcttgaatttttgctaaaatccgaatcggaacaatgcggttttaatttgaatgaaccaccgccgcctcaatacaaaccgaatttatgcgaaatcagcgaagagatagagcgttgcgaaggaaacaaggctagggctgcaaaaaaacttgggattagcagaggaagtttgtattataaattgaggaaaggaatttactaa

SEQ ID NO: 28942 - protein, 289 aa, Unknown
  Obtained from environmental sample
  DOMAIN (20)...(218): ATPase family associated with various cellular activities (AAA)
  misc_feature (1)..(289): Xaa is any amino acid
MKESFDFKKMLQIASDSDLPVLLTGESGTGKELAARELHALSKRNNRAFVAVNCGAISAGIAESLFCGHVKGAFTGANSDRTGFVRAASGGTLFLDEVAELSPDIQKTLLRTLQEKMVMPVGSQKEVKVDFRLVCATHRNLPALLEKGLFRQDLYFRLASLTINIPPLRERNDMRSIAESLWKGDEPLSERNLRALQNYSWPGNIRQLKNVLERYALFKNHGYSLEFLLKSESEQCGFNLNEPPPPQYKPNLCEISEEIERCEGNKARAAKKLGISRGSLYYKLRKGIY

SEQ ID NO: 28943 - DNA, 1089 bp, Unknown
  Obtained from environmental sample
  misc_feature (1)..(1089): n is a, c, g, or t
atgaaagaggagagcaaagcagtaacaaggtatgtaggaatagaccttggcaagcggacctacgaagtagcgattgtaggggcgaacgggaaagtcacggtgagcaacgggaggacaaccgtagaagggcggcaaaagctgtaccagaaactgaaagcggaggacaaggtagccttggaagccgggaacctgtcgttcataatggcgaaggagctggaaacggcggtgggctgccagatacgggtattaaacccctcgcatttggcgttgatctacgggtcgatgaagaagacggacaaggaagacgcgctaaagctggcgcatatccttgaggactacaaggacgagcggctacctgtggtaccgataccgagcgacgaggagatgaggcggcggaagatggtgggcagctaccgtagggagcaggggatgaggaaccaagcgataaaccggctgcacgggctgtttctggcgcaggggataacgtacgtggtgaaaagcatgctggcgacagctgaggcgcgggcaaagacggtaaaagcactgaccgggcttgagcgggaagaagcggatcatttattggcatgcttaaagttgtacgaggagcggatagcagcagtggaaaagctgatggagaaggaagcggaaggggacgaagagatagagcggctgcagagcgtacctggggtagggccaaaggtatcgtttgcgtttgtggcgcatgtggcggcagagaggtttgaaaacgggtcgcaggtaagcaactatataggattagtgccgcgggtgtatatgtccggggagactgtgaggtacgggcggataacgaaacgcgggaatgggtttcttagggcgctgctggtgcaagggtcgtgggcgcttatacggtcaaaggctgggggaagcctgaaggaacggtacgaatacatgacgaaggagaaggggataagcaagaagaaagcgatagtggcgatagcgcggcggctggcggaattgttgtatgccctcatgagggatgggacgagctacgaagtgagaaaattcaaactgggaagtgaagaagggaaaaaattagccaagatagcgtaa

SEQ ID NO: 28944 - protein, 362 aa, Unknown
  Obtained from environmental sample
  DOMAIN (197)...(307): Transposase IS116/IS110/IS902 family
  misc_feature (1)..(362): Xaa is any amino acid
MKEESKAVTRYVGIDLGKRTYEVAIVGANGKVTVSNGRTTVEGRQKLYQKLKAEDKVALEAGNLSFIMAKELETAVGCQIRVLNPSHLALIYGSMKKTDKEDALKLAHILEDYKDERLPVVPIPSDEEMRRRKMVGSYRREQGMRNQAINRLHGLFLAQGITYVVKSMLATAEARAKTVKALTGLEREEADHLLACLKLYEERIAAVEKLMEKEAEGDEEIERLQSVPGVGPKVSFAFVAHVAAERFENGSQVSNYIGLVPRVYMSGETVRYGRITKRGNGFLRALLVQGSWALIRSKAGGSLKERYEYMTKEKGISKKKAIVAIARRLAELLYALMRDGTSYEVRKFKLGSEEGKKLAKIA

SEQ ID NO: 28945 - DNA, 501 bp, Unknown
  Obtained from environmental sample
  misc_feature (1)..(501): n is a, c, g, or t
ttggccctaccccaggtacgctctgcagccgctctatctcttcgtccccttccgcttccttctccatcagcttttccactgctgctatccgctcctcgtacaactttaagcatgccaataaatgatccgcttcttcccgctcaagcccggtcagtgcttttaccgtctttgcccgcgcctcagctgtcgccagcatgcttttcaccacgtacgttatcccctgcgccagaaacagcccgtgcagccggtttatcgcttggttcctcatcccctgctccctacggtagctgcccaccatcttccgccgcctcatctcctcgtcgctcggtatcggtaccacaggtagccgctcgtccttgtagtcctcaaggatatgcgccagctttagcgcgtcttccttgtccgtcttcttcatcgacccgtagatcaacgccaaatgcgaggggtttaatacccgtatctggcagcccaccgccgtttccagctccttcgccattatga

SEQ ID NO: 28946 - protein, 166 aa, Unknown
  Obtained from environmental sample
  misc_feature (1)..(166): Xaa is any amino acid
MALPQVRSAAALSLRPLPLPSPSAFPLLLSAPRTTLSMPINDPLLPAQARSVLLPSLPAPQLSPACFSPRTLSPAPETARAAGLSLGSSSPAPYGSCPPSSAASSPRRSVSVPQVAARPCSPQGYAPALARLPCPSSSSTRRSTPNARGLIPVSGSPPPFPAPSPL

SEQ ID NO: 28947 - DNA, 483 bp, Unknown
  Obtained from environmental sample
  misc_feature (1)..(483): n is a, c, g, or t
atggataacttgctggaaataatgcagcgtctccgttctgcggagggttgcccttgggatagagagcagaattttaacagtttgttgccttaccttttagaagaatcttatgaatatatagatgctgttcaaagcgaaaacctgaaaaatatggtagaagaacttggcgatgtgcttttacaagtggtgtttcactctcaaatagccaaggaagagggcaaattcacaatagacgatgttataaagggaatttgcgaaaaaatggttaggcggcatcctcatgtttttggtacggaaaatttgggaacttccaaggaggttcttaaaaaatgggaagagataaagagcgaggaaaagaaggaaaaaccagcctctgccatggacaaggtgcctaggtcaatggtggctctttcccgcgcccaagagctttcaaggcgggcggcaaaagttggttttgattggaatgattccaagccagtttag

SEQ ID NO: 28948 - protein, 160 aa, Unknown
  Obtained from environmental sample
  DOMAIN (23)...(96): MazG nucleotide pyrophosphohydrolase domain
  misc_feature (1)..(160): Xaa is any amino acid
MDNLLEIMQRLRSAEGCPWDREQNFNSLLPYLLEESYEYIDAVQSENLKNMVEELGDVLLQVVFHSQIAKEEGKFTIDDVIKGICEKMVRRHPHVFGTENLGTSKEVLKKWEEIKSEEKKEKPASAMDKVPRSMVALSRAQELSRRAAKVGFDWNDSKPV

SEQ ID NO: 28949 - DNA, 1227 bp, Unknown
  Obtained from environmental sample
  misc_feature (1)..(1227): n is a, c, g, or t
atgtccttacatgaattggcgcaggtgcaaagtccgcagggagcctcccttgcgcaggttattcgcatagatagcggcatgatagatttgcaggtttttgcaggcagccgtggtgtttccacggattcgcaggtgcgctttttaggacgccctatgcaggttccttttagcgaatctctgctcgggcgtgtgttttctggcgcaggcgagccacgcgacaatggcccaaacataaatgaaaatatgatcgacatcggcggcccttccgttaatccgtccaagaggattatcccaaagagcatggtgcgcactggtatcccgatgatcgatgtgttcaacacattggtcgttagccaaaagttgcccattttctcaatagctggcgaaccttacaacgaacttctagctcgtatagctttgcaagccgaagtggacatcattgtactcggcggcatgggcttaaagtacgatgattatctattcttccgcgacttcttggaagaacgcggagcgttaagccgtactgtttcttttatgcacaccgctagcgaccccattgtggaatgcttgcttgttcccgatgttgctttggctgttgctgaacagttcgcaacgcagggcaaaaaggtgttggtgcttttaacagatatgaccaactttgccgatgctatgaaagaaattgccatcactatggaacaggtgccatctaatcgtggttaccctggcgatttatattcacagctcgcaagccgctacgaaaaagcggtggattttgaaggttccggttcaataaccattttggcggtcaccacaatgcctggcgatgatgtaactcaccctgttcccgataacaccggctatataaccgaggatcagttctatttgcgcaaaggcagaattgagccatttggctctcttagccgcctaaaacagcaggttaacggcgatacccgcgaagatcatcgcacaataatgaacaccatgattcaactttattccagctacaaagaaacccttgaaaaacagtccatgggtttccgcatgagcaactgggatgcaaagctcttgaaatacggtgttcgttttgaaaaagagatgatggatttatccgttaacattcctttggaagcagctttggatctcggttggaaaatccttgcagattgctttaaacccgaagaaacgggcattcccagcaagctgataggaaagttctggccaaagtaa

SEQ ID NO: 28950 - protein, 408 aa, Unknown
  Obtained from environmental sample
  DOMAIN (104)...(307): ATP synthase alpha/beta family, nucleotide-binding domain
  misc_feature (1)..(408): Xaa is any amino acid
MSLHELAQVQSPQGASLAQVIRIDSGMIDLQVFAGSRGVSTDSQVRFLGRPMQVPFSESLLGRVFSGAGEPRDNGPNINENMIDIGGPSVNPSKRIIPKSMVRTGIPMIDVFNTLVVSQKLPIFSIAGEPYNELLARIALQAEVDIIVLGGMGLKYDDYLFFRDFLEERGALSRTVSFMHTASDPIVECLLVPDVALAVAEQFATQGKKVLVLLTDMTNFADAMKEIAITMEQVPSNRGYPGDLYSQLASRYEKAVDFEGSGSITILAVTTMPGDDVTHPVPDNTGYITEDQFYLRKGRIEPFGSLSRLKQQVNGDTREDHRTIMNTMIQLYSSYKETLEKQSMGFRMSNWDAKLLKYGVRFEKEMMDLSVNIPLEAALDLGWKILADCFKPEETGIPSKLIGKFWPK

SEQ ID NO: 28951 - DNA, 1557 bp, Unknown
  Obtained from environmental sample
  misc_feature (1)..(1557): n is a, c, g, or t
gtggtctatcagggagaaaaactcagcgcatccctttccgcttcctggcttgccgggggcgggctttcaggcgcgccttatacatggtatctgacgcgggaacccgcttctgtggttccgggcggaacagaaggcccctggcgctattggaattttgggcctgaatccgacgacgagcgatcttttgtcgggcgtggagaagggactcttggccctgacggaaaagcgggcattagcaatgatacatccgatgagggcattgaaggcgcggtctaccgctaccggcttgaaacctcggtacaggacgcggcccgccaggagatatccgcccgcgcctctgttttggttcatcccgcttctttttacattgccgcgcgccttgattcgggaacaataaaaaccgcagcaacaggcggcgccgcggccgcaaacccttccgcctatttcctcagcgcggggcagccggcgactttaagctgggcgcttgtttcacctaacggagacgaagagcggaatcagagcggcgacttgtcagtacagcttgtccgccacgaatggaaacaggcgcggcaacagggaacaggcggcaggatcaacctggtgtgggagcgggttgaggaagttgccgaacagagaaatgtaaaaattacgagcggaaacaattccggcgtgttcaattttacaccggacaagagcggcctctgggaactcaggctttccggccgcgatcaaaagcagagaattgccgcgacccgctcccgcttttacgtgagcggcgcgggatgggtacgttgggattccgatgacgtggataccataaccctgaccaccgaccgccaaagctacgcgcccggtgagacggcgaaaataatggtgcgctcgccgctggaaaaaggcaaatacctgttaacgctggaacgcgaaaaggtcatttcccagaagatcattgagcttaacggttccgccttgactatagacatacccattgaggaatcgtatgtgccgataatttacgccgcgcttagttcctatacggtgcgttccgccgttcctcagaacagctactacgaaccagacctggacaaacccaagggtatcttcggcgttacggcgatttatattgacaatgaaagccgccattaccagatcgagattgataccggcaggaacacctaccgcgcggcggaagaagcggaagtaaagataaaggtcttgctgaacggcaagccggcgccgaatacggaagtaagttttctggcagttgaccgcggggtggttgacctcattgactaccatgttcccgacccgcttgcttccttttacgccccctggcatttccccctgggagtgcgcggcgcggacagccgttcgctcttgatcgatccggtgacgtataacatttccgatctgcagggcggtgacagtgatgatgacggcaagggagaagacggcgcgagcagttttaatgacgatatgaaagaacgcaaggactggaggccgaccgcggtttttgaaccgtaccttgtcaccggttcggacgggaccgttacccgttaa

SEQ ID NO: 28952 - protein, 518 aa, Unknown
  Obtained from environmental sample
  SIGNAL (1)...(24)
  DOMAIN (269)...(431): Alpha-2-macroglobulin family N-terminal region
  misc_feature (1)..(518): Xaa is any amino acid
MVYQGEKLSASLSASWLAGGGLSGAPYTWYLTREPASVVPGGTEGPWRYWNFGPESDDERSFVGRGEGTLGPDGKAGISNDTSDEGIEGAVYRYRLETSVQDAARQEISARASVLVHPASFYIAARLDSGTIKTAATGGAAAANPSAYFLSAGQPATLSWALVSPNGDEERNQSGDLSVQLVRHEWKQARQQGTGGRINLVWERVEEVAEQRNVKITSGNNSGVFNFTPDKSGLWELRLSGRDQKQRIAATRSRFYVSGAGWVRWDSDDVDTITLTTDRQSYAPGETAKIMVRSPLEKGKYLLTLEREKVISQKIIELNGSALTIDIPIEESYVPIIYAALSSYTVRSAVPQNSYYEPDLDKPKGIFGVTAIYIDNESRHYQIEIDTGRNTYRAAEEAEVKIKVLLNGKPAPNTEVSFLAVDRGVVDLIDYHVPDPLASFYAPWHFPLGVRGADSRSLLIDPVTYNISDLQGGDSDDDGKGEDGASSFNDDMKERKDWRPTAVFEPYLVTGSDGTVTR

SEQ ID NO: 28953 - DNA, 663 bp, Unknown
  Obtained from environmental sample
  misc_feature (1)..(663): n is a, c, g, or t
atggccggccactacgggcacgtagggccgcgcttcctacagggtttggtcaatgaagtgcggggcaacgaagaagcccttgtcgccaagctgcaagagacttcggacaagtggcttggtggtgtcaggtcggaactttcggctgacacgagcaaccaggttcaccgcgtcgccaagaggttcggcttggtggcggcggccggcgaactggcaatatcttgggggctgctgccgcttggcgagggcgaggccttcgaggcggccacgctcgtttggggtgactacctcaaggggcgcgggaacacgattgatgccgaggacatgaaaaccatgctggcgattctgaacgcctgccgccgcgacagcgaccgctttgtgtgggggactgatttttccgccgcgaaggggtgcctcggtcgtcgggagaaacgcggaaacgatgagagtggcgttgaactctacgacttcctgttcaccagaactgggcttatggaagtctgcggcttcagtgacaccaagcccatactggcagtcctgaaaaagtatgggtggctgcctgacgagggcacgaccagcgaagtcgggaagcaggacggcaaatcaatacgcctataccgcgtcactcacgatgccttggctaagttcgaggcgagcctgacctaa

SEQ ID NO: 28954 - protein, 220 aa, Unknown
  Obtained from environmental sample
  misc_feature (1)..(220): Xaa is any amino acid
MAGHYGHVGPRFLQGLVNEVRGNEEALVAKLQETSDKWLGGVRSELSADTSNQVHRVAKRFGLVAAAGELAISWGLLPLGEGEAFEAATLVWGDYLKGRGNTIDAEDMKTMLAILNACRRDSDRFVWGTDFSAAKGCLGRREKRGNDESGVELYDFLFTRTGLMEVCGFSDTKPILAVLKKYGWLPDEGTTSEVGKQDGKSIRLYRVTHDALAKFEASLT

SEQ ID NO: 28955 - DNA, 843 bp, Unknown
  Obtained from environmental sample
  misc_feature (1)..(843): n is a, c, g, or t
ttgggagtgggtcaatcatacatagaccctttgccagaaatgacatgcaacgacaccactggggcaattactggcacatcagaaactggatatgcaattgctcaaataggcgatcaagtatggttagcagaaaatttgaaagaggacttagtaaatatacaaagccaacaaggatggccagcaggtttacaagacactttaatggagatacgcaattcattatggcgtgaagcagatttgaggtcatggctgacacaaaatttagcatcatggctggcagcgcataacatcactaatgtcactagcattcctattagggtcattaacggatgctataacaatgattgtactaattatggcaagtatggtaggttatacgactgggcaactgcaatgtttatagaccaaacatacaatagggaattttacaatcttcctgcaactaattatgagagaggtccatgccctaaaggtttttatcttccccacgacgaagattggcaaaaattagttgattatgcaggtggtgcaaccattgctggcggcaggcttaaatcatccaacaaaagcgattggaacaataatggcaacggaatagatgcttatggcttcaatgccaaacctggtggttattatagtgagattaaagctgcggaaaatcaaagtcattactatgaaaaagacagcagggctatgtggtggtctatcacagatgttgcaggtggtgctaacgcatattactggacagccatctcttcagacacagaaattcgtaactttcagcaagataaactctggcacaaagcttatgtccgctgtttgctttatttacagaaggagtaa

SEQ ID NO: 28956 - protein, 280 aa, Unknown
  Obtained from environmental sample
  misc_feature (1)..(280): Xaa is any amino acid
MGVGQSYIDPLPEMTCNDTTGAITGTSETGYAIAQIGDQVWLAENLKEDLVNIQSQQGWPAGLQDTLMEIRNSLWREADLRSWLTQNLASWLAAHNITNVTSIPIRVINGCYNNDCTNYGKYGRLYDWATAMFIDQTYNREFYNLPATNYERGPCPKGFYLPHDEDWQKLVDYAGGATIAGGRLKSSNKSDWNNNGNGIDAYGFNAKPGGYYSEIKAAENQSHYYEKDSRAMWWSITDVAGGANAYYWTAISSDTEIRNFQQDKLWHKAYVRCLLYLQKE

SEQ ID NO: 28957 - DNA, 366 bp, Unknown
  Obtained from environmental sample
  misc_feature (1)..(366): n is a, c, g, or t
atggctttccaaatttgcgctagaatggctttccgcgaggctttccaaaaagctggtgcccaagtgctagagccaattatgaaagttgaggttcaaaccccaaccgaattccaaggcagcgtggttggcaatctttcccagcgccgcggcacaattcaggcaaccagcgaacagcagagctacaccacaataaccgcagaagttcccctttccgaaatgtttggttacgccaccgatttgcgctcaatgacccaaggaaaagcagaattcactatggaattctccaaatactcccctgtgcctcgcggcattcaggaagagttgattaagaagtatggggataaggctaaagcggctggtaggtag

SEQ ID NO: 28958 - protein, 121 aa, Unknown
  Obtained from environmental sample
  DOMAIN (21)...(108): Elongation factor G C-terminus
  misc_feature (1)..(121): Xaa is any amino acid
MAFQICARMAFREAFQKAGAQVLEPIMKVEVQTPTEFQGSVVGNLSQRRGTIQATSEQQSYTTITAEVPLSEMFGYATDLRSMTQGKAEFTMEFSKYSPVPRGIQEELIKKYGDKAKAAGR

SEQ ID NO: 28959 - DNA, 336 bp, Unknown
  Obtained from environmental sample
  misc_feature (1)..(336): n is a, c, g, or t
atgtatcagtatcggcacgagctgggtatagcaataacagtattgcatttccctcctggaaccagcaagtggaataagattgaacataggctgtttgcgttcataagcaaaaactggcgcggcaggccgttaatctcattggcattgatcgtcaatctgattggatcgacaaagataggcgatggaaataaagttgagtgtgtcattgacaggcacaaatacaagcccggcgtggaaatatcagacgaagaatttgatgctataaatattaagcatcataaatttcatggagaatggaattataagattatgcctcacataaaaaataagttgtaa

SEQ ID NO: 28960 - protein, 111 aa, Unknown
  Obtained from environmental sample
  misc_feature (1)..(111): Xaa is any amino acid
MYQYRHELGIAITVLHFPPGTSKWNKIEHRLFAFISKNWRGRPLISLALIVNLIGSTKIGDGNKVECVIDRHKYKPGVEISDEEFDAINIKHHKFHGEWNYKIMPHIKNKL

SEQ ID NO: 28961 - DNA, 420 bp, Unknown
  Obtained from environmental sample
  misc_feature (1)..(420): n is a, c, g, or t
ttgaagatgtcgcatcaggagatcaaggaggagcataagcagatggagggagacccgcaggtaaaggcgcgcatccggtcgttgcagagggagatggcgcggcgcaagatgatggatcaggtgccgcaggcgtctgtggtggtgacgaacccgacgcacttggcgatagcgctcacctacgatcctgaaaagaaccccaacgccgcgcctatggttgtggccaaggggaaagacctgttggcgctcaggataaaaaagatagcgcaagagaacgacgttcccatacacgaagataaggaattggcgcgggcgatgtacgacaaggtggaggtggggctggaaataccgtacgaattctttacggcggtggcggaggtaatggcctatatttacaagctcaaagggaagaaggtggggtag

SEQ ID NO: 28962 - protein, 139 aa, Unknown
  Obtained from environmental sample
  DOMAIN (1)...(131): FlhB HrpN YscU SpaS Family
  misc_feature (1)..(139): Xaa is any amino acid
MKMSHQEIKEEHKQMEGDPQVKARIRSLQREMARRKMMDQVPQASVVVTNPTHLAIALTYDPEKNPNAAPMVVAKGKDLLALRIKKIAQENDVPIHEDKELARAMYDKVEVGLEIPYEFFTAVAEVMAYIYKLKGKKVG

SEQ ID NO: 28963 - DNA, 324 bp, Unknown
  Obtained from environmental sample
  misc_feature (1)..(324): n is a, c, g, or t
atgggccaggttcaggcatcgtccgaggccatgacccacggcgctgtgtaccgttcctgttccggggcaaactgtgtaatgcacatccattgcggggttattttcaacgggatgattcgggacggctgtcccgctacggcaaaaaatgccgcttacggaacgcctgaaatcgcccttgctcttgccggatgcgtacaggaattgggtgcggacgaaggagccgttgttcttgccggacatgatgaagggataatcgtatggggtaccacggtggaaagggctttgaaaataattcaaggtttgaatgataaatacggaggatga

SEQ ID NO: 28964 - protein, 107 aa, Unknown
  Obtained from environmental sample
  misc_feature (1)..(107): Xaa is any amino acid
MGQVQASSEAMTHGAVYRSCSGANCVMHIHCGVIFNGMIRDGCPATAKNAAYGTPEIALALAGCVQELGADEGAVVLAGHDEGIIVWGTTVERALKIIQGLNDKYGG

SEQ ID NO: 28965 - DNA, 768 bp, Unknown
  Obtained from environmental sample
  misc_feature (1)..(768): n is a, c, g, or t
atgataaatacggaggatgatatggcagtcattggaataatcggcggaagcggtctggataatcctgatattctttccaatccccgcgatgaaaaagttactacccaatatggtgaaccttcatcgccattgaaacatggaattattgacggcgttgacgtggttctgctggcgcgtcacgggcgggaacataccattccccccactcaggtaaattaccgcgccaatattgccgctctcaaagcggcaggttgtacccacattgtcgcgagtacggcggtaggctctctcagagaagaaatccgccgcggcgatctggtcattatcgatcaattcattgattttaccaaacagcgaaaaatgacgtttcacgaatcttttgccccacacaatcccgttcattgctccttggcggatccttacgacagccgccttcggcagatccttattgatgagtgcaagagcaggggatacccctttcacgatcacggcgttgttgtaaccattgaaggcccccgtttttcaacacgcgccgagtccctgatgttccgtactttgggggcagacattatcaatatgtccatcgctaccgagacagtccttgctaatgagattggcattccctacgcggcagtcgccatgagcaccgattatgattgctggaaaagcgatgaagaaccggtaagctgggaagctattttgaaggtcttttccgaaaacgccgccaaagtaacaaccttgcttaaaggcattgtttccaaaatataa

SEQ ID NO: 28966 - protein, 255 aa, Unknown
  Obtained from environmental sample
  DOMAIN (8)...(255): Phosphorylase family 2
  misc_feature (1)..(255): Xaa is any amino acid
MINTEDDMAVIGIIGGSGLDNPDILSNPRDEKVTTQYGEPSSPLKHGIIDGVDVVLLARHGREHTIPPTQVNYRANIAALKAAGCTHIVASTAVGSLREEIRRGDLVIIDQFIDFTKQRKMTFHESFAPHNPVHCSLADPYDSRLRQILIDECKSRGYPFHDHGVVVTIEGPRFSTRAESLMFRTLGADIINMSIATETVLANEIGIPYAAVAMSTDYDCWKSDEEPVSWEAILKVFSENAAKVTTLLKGIVSKI

SEQ ID NO: 28967 - DNA, 369 bp, Unknown
  Obtained from environmental sample
  misc_feature (1)..(369): n is a, c, g, or t
ttgattaccggaacatccgcggcgggagcggcagccggaatggacgttaatcaattaaccgatgtttttaatgaatcagtcggagaaatagttcaaacgctggtaaacaatggttattcacaaactcaggaatatgatgccgataataccgcgctttctttaatggccggcgccggttataatccgcgggggcttattgatatgcttaaagaacttaacgccatccagagcaaaaccgcaggagggtttaacaaaacccacccaaatcctgatcagcgtattgccaacgcggaaaaatcagtcggtaaatacaatgttaccgataaccgcgcaattagacaggcaaggtttaatgcggctgtaaaataa

SEQ ID NO: 28968 - protein, 122 aa, Unknown
  Obtained from environmental sample
  misc_feature (1)..(122): Xaa is any amino acid
MITGTSAAGAAAGMDVNQLTDVFNESVGEIVQTLVNNGYSQTQEYDADNTALSLMAGAGYNPRGLIDMLKELNAIQSKTAGGFNKTHPNPDQRIANAEKSVGKYNVTDNRAIRQARFNAAVK

SEQ ID NO: 28969 - DNA, 1167 bp, Unknown
  Obtained from environmental sample
  misc_feature (1)..(1167): n is a, c, g, or t
gtggtagcggtaatactgctcacattgttttctcaccgcatttccatttctgtcggcgggattatctttcttacggttataatcatcgtaggttcatttggcgcataccattggagcgggctgtggcttccgatgataacttttatcgccggtatcctcgcttcatttataaccgcaactctttacaattacgcgacagagggcagtcagaaacgttttataaaatcggctttttcccaatacctgtcgccaaaagttattgatcaaattatacaagacccctcccagttaaaacttggcggtgaaaaacgggagatgacagcaatctttaccgatgtacgcgccttttccacaatttccgaagcgttaggtgatcccgcaaaattggtagaactgctcaatttttacctgacaagaatgagcaacattgtgcttgataatcagggaacaatcgacaagtacgaaggagacgcgattatcgctttctttggcgcaccggttcacatggctaaccatgccgcgcttgcctgccgcgccgcaataatgatgaaaagaaccgaaagagaagtaaaccgcgacgcactcagcggcggacttattacccgtaaagtaatggaagcgcttgccggaaaaggagcgacaaaaagcgttgacgatccttatcctctttttacacggcttggaattaacaccggcgacatggttgtaggaaacatgggtacgcccaacaaaatggactatacgattatggggaacgctgttaatcttgcggcgcggcttgagggggttaaacaagcagtacaacacgggcggaattctgataagcgaatatacccgccagcatatcggggacgaattatattaaggccgttaagcagggtgcgggttgtaggtatcaatacgccgcttcggctttacgaacttctggacattgcaagcgaagcgccgccggatttgctcagcatggtaaaaaactgggaaacggcttttgaattttatgaaaagcgggatttttccggggcgcaaaacatttttcagtcgatttataacaaaaatgattccgatttggcggcgaaaaaataccttgacaggtgtacaaaatatatttccgcgccgccggatgaaaaaacatgggataatggggtggataatttaacagaaaagtag

SEQ ID NO: 28970 - protein, 388 aa, Unknown
  Obtained from environmental sample
  DOMAIN (101)...(301): Adenylate and Guanylate cyclase catalytic domain
  misc_feature (1)..(388): Xaa is any amino acid
MVAVILLTLFSHRISISVGGIIFLTVIIIVGSFGAYHWSGLWLPMITFIAGILASFITATLYNYATEGSQKRFIKSAFSQYLSPKVIDQIIQDPSQLKLGGEKREMTAIFTDVRAFSTISEALGDPAKLVELLNFYLTRMSNIVLDNQGTIDKYEGDAIIAFFGAPVHMANHAALACRAAIMMKRTEREVNRDALSGGLITRKVMEALAGKGATKSVDDPYPLFTRLGINTGDMVVGNMGTPNKMDYTIMGNAVNLAARLEGVKQAVQHGRNSDKRIYPPAYRGRIILRPLSRVRVVGINTPLRLYELLDIASEAPPDLLSMVKNWETAFEFYEKRDFSGAQNIFQSIYNKNDSDLAAKKYLDRCTKYISAPPDEKTWDNGVDNLTEK

SEQ ID NO: 28971 - DNA, 471 bp, Unknown
  Obtained from environmental sample
  misc_feature (1)..(471): n is a, c, g, or t
atgagaaaagtatttttaatacttattttagtattgattaccgccggctttgcggcggcgcaggcttccaaaggcggcactatgtatgtggcggtaaaaaccgtcgccttaaaatcttctaccggattctttgcaggtacaaagggaactttaaattacggagatcgtgtaacaattttgcagattaacggcaagaatgcggaagtcaggagcgcggcaaattcctcaataacgggatggactgcaacggcaaacctgtccgcaaagcagattgtatcgggaaacacaaacacagcgtcggcaaaggaagttgccctggcggggaaaggatttaatcaggaagttgaaaactcttataaatcgaagggaaaagcaaactatgctgatgttgacaaggtcgaaacattttccgtaaacgaaacaactcttagaaaattccttgaagacggccgtctttcgatgggagaataa

SEQ ID NO: 28972 - protein, 156 aa, Unknown
  Obtained from environmental sample
  SIGNAL (1)...(20)
  misc_feature (1)..(156): Xaa is any amino acid
MRKVFLILILVLITAGFAAAQASKGGTMYVAVKTVALKSSTGFFAGTKGTLNYGDRVTILQINGKNAEVRSAANSSITGWTATANLSAKQIVSGNTNTASAKEVALAGKGFNQEVENSYKSKGKANYADVDKVETFSVNETTLRKFLEDGRLSMGE

SEQ ID NO: 28973 - DNA, 528 bp, Unknown
  Obtained from environmental sample
  misc_feature (1)..(528): n is a, c, g, or t
gtgcggcccaacaccgcgcttttgaacggcgttgcgaagattgagcgtggcattgtcgtaaacgtaaaatcggaaagctctgcccctgcaatttacgctgcgggcgactgcactcaaacgaatgatatttcaagcgggcaggaaaaaatcatggcgctcctgcctaacgcttatatgcagggcgagtgtgcgggaatcaacatggcaggcggcgacaagatcttcgacaaggcaatccccatgaacgcaatcgggttttttggcctgcacattatcacggcaggcagttatgcgggagatgtacacgccgaaaccggcaacggcaattacaggcgcttgttttacagcgacaacaaacttaacgggtatatccttatcggcaacgtggaaaaagccggtatctatacaagccttatacgcgagcgaacgccgcttgacacaatcgacttcgccctcgtttgcgagaagccggggcttatggcgttcaggaaagaggaaagaatggtaaaacttggaggagcttcataa

SEQ ID NO: 28974 - protein, 175 aa, Unknown
  Obtained from environmental sample
  misc_feature (1)..(175): Xaa is any amino acid
MRPNTALLNGVAKIERGIVVNVKSESSAPAIYAAGDCTQTNDISSGQEKIMALLPNAYMQGECAGINMAGGDKIFDKAIPMNAIGFFGLHIITAGSYAGDVHAETGNGNYRRLFYSDNKLNGYILIGNVEKAGIYTSLIRERTPLDTIDFALVCEKPGLMAFRKEERMVKLGGAS

SEQ ID NO: 28975 - DNA, 693 bp, Unknown
  Obtained from environmental sample
  misc_feature (1)..(693): n is a, c, g, or t
atgattaatccttttttcaaaacgcctgacctttttgatccggtgtggaatttactttcaagctccatgaaagacgataatgaattccgcctccgtgtccgggaatccgccaggaggactttggagacaaaacttcgttatctaaaaggaagtcaggctgttccttttattccggatataaagaaggttgaaaacggcctgcctgatcctgaaggcagcgctttctttctggaacttgcggcgcgcagcgttaccattgtgaaacaaatacctttgtcgggtgaaaggcagagggcttcggtttttcccttaaatcctgaaaatgccggaaaagtcctgctgaccggccaatacctcgattttttcaaagtgggcagagccgcttttcccggggcgatttcctactggtactccgaagtttttaatatagacgaactgctgacttatgccagagccgccgacacggttgtcttctgcctttccgatactgaaggcttgcgaatattgcggcggcttgagccgttaaaaaaaaggataattgtgctgtcggtactgaaccctgtctaccttgaaaacattccctggatagacggggctgtagccgtgtacagcgactcttttgaatctcttgcggcgggcttttcggctatcattggaagaatccccgccgagggaagacttccttatgactga

SEQ ID NO: 28976 - protein, 230 aa, Unknown
  Obtained from environmental sample
  misc_feature (1)..(230): Xaa is any amino acid
MINPFFKTPDLFDPVWNLLSSSMKDDNEFRLRVRESARRTLETKLRYLKGSQAVPFIPDIKKVENGLPDPEGSAFFLELAARSVTIVKQIPLSGERQRASVFPLNPENAGKVLLTGQYLDFFKVGRAAFPGAISYWYSEVFNIDELLTYARAADTVVFCLSDTEGLRILRRLEPLKKRIIVLSVLNPVYLENIPWIDGAVAVYSDSFESLAAGFSAIIGRIPAEGRLPYD

SEQ ID NO: 28977 - DNA, 768 bp, Unknown
  Obtained from environmental sample
  misc_feature (1)..(768): n is a, c, g, or t
gtgcatgagtgcctgcggcagatttttaaaaagcaactcttccgtatggatacttggtttgcagaaaggccccccttcagcgcttggtatacattccggacagactctgctgcccggtgtatgcgatcaaaaaaaggtccccagccgcgttttctccgaggcatattcggcggcaaggttctcctccattcattgcagggacgtaaagaagacgccctggttatggagaaggcccttgaagaaatggggctgtatccctcagaaaaaaaagattacgacattatgtgccttgaccacgctcccttatcctgtcattcaaccgcccccgttaacctggttatacgaaagcccgcgccgcaggacatggacgagcttgccaccctgcacgccggttacgaacaggaagaggttttgcccgccgcgtcggagtttcgccccgccgcaagccggctgaatattgagcgtatcttcgcggaagagcagatgctcgtggccgaacttgagggccgcctggtagggaaaatcaataccaatgccataagttttacgcgctgtcagattggaggcgtgtatgttcatcccgactaccgtggccttggaatagcgggcagaatgacatttgaatttgcggaaagccttaggtcccagggcagaggcgtatccctctttgtccaaaaaacaaatatcgcggcccgcagggtttatcagcgcgtgggctttgaaatacagggcgattaccggatcgactatttttcaaataataattaa

SEQ ID NO: 28978 - protein, 255 aa, Unknown
  Obtained from environmental sample
  DOMAIN (163)...(248): FR47-like protein
  misc_feature (1)..(255): Xaa is any amino acid
MHECLRQIFKKQLFRMDTWFAERPPFSAWYTFRTDSAARCMRSKKGPQPRFLRGIFGGKVLLHSLQGRKEDALVMEKALEEMGLYPSEKKDYDIMCLDHAPLSCHSTAPVNLVIRKPAPQDMDELATLHAGYEQEEVLPAASEFRPAASRLNIERIFAEEQMLVAELEGRLVGKINTNAISFTRCQIGGVYVHPDYRGLGIAGRMTFEFAESLRSQGRGVSLFVQKTNIAARRVYQRVGFEIQGDYRIDYFSNNN

SEQ ID NO: 28979 - DNA, 1392 bp, Unknown
  Obtained from environmental sample
  misc_feature (1)..(1392): n is a, c, g, or t
atggaaaacagaatgggtgatgagagtatttatttgcggattttggaattgaaaaatgggaatatccaattaactgattctaccaatgcggcacggcttttgaaagaacataaaagggatattcgttattttccggcttggaaaaaatggctggtgtggaacggttcgtattgggaaactgacgagggcggggctttgatacatgaaaaagggcttgcgacggttcggaatatctatgatgaccttttgaaaactaacgactacagggaacggaatgaaattgagaattttgcaaagataagcgaaagtatcaggcggcgtgaggcaatggttaaaacggctcaatatataaaggagttgaataccggcgctgaggagcttgataaaaatccctggctgttgaatgtccgtaacggaactattgacgtattgacaggggattttatggaacacaggcaagaggatatgataaccaaacttgccaatgttgattatgacccttccgctgattgtcctttatggaagcaatttgtccgtgaaattatgaactataaaggtgatttaataacttttctgcaaactgcggtcgggtgggctttgacggggaatattgaggaacaaacgatgtttattttatacggcagcgaggctaacggaaaaactacttttttgaatacgataacttttttattgggtgattacgctctggctactcctaccgaaagttttatgaaaaagaacggggaccaaaacacaaacgacatagcccgattgaggggtactcggtttgttaccactacggaagcggagcaggggcggcggctttcggaaccgttaattaaaaaaattaccggtaatgaccagattacggcgcggtttttgtatggggagtattttaactttacccctacttttaagatttatatggcaacgaaccataaacctgttatcaaggggactgaccacggaatatggcggcgaattatgttaatccccttcactacgactattccaaaggaaaaacaggataaaagccttgaggaaaaacttaaaaatgaggcaagcgggattttgaactggcttttggaagggacgctgcgatggcggcgggagggtttggccgcccctgcggttattcttaacgctactgacgaatatcgtggggaaatggacgttataggaaatttcataaatgaacggtgtatcaaaaaacctgatgttacgatacggattagggaactgtacaaggcttattctgactggtgcgatgataacaaggaacacgccgtaagcgaaagattttttaccatgaggcttaaagaaatgggctttgtacagtgccggacggcagaggctcggtattggtcggggattgggctaccagataaatag

SEQ ID NO: 28980 - protein, 463 aa, Unknown
  Obtained from environmental sample
  DOMAIN (134)...(445): Poxvirus D5 protein-like
  misc_feature (1)..(463): Xaa is any amino acid
MENRMGDESIYLRILELKNGNIQLTDSTNAARLLKEHKRDIRYFPAWKKWLVWNGSYWETDEGGALIHEKGLATVRNIYDDLLKTNDYRERNEIENFAKISESIRRREAMVKTAQYIKELNTGAEELDKNPWLLNVRNGTIDVLTGDFMEHRQEDMITKLANVDYDPSADCPLWKQFVREIMNYKGDLITFLQTAVGWALTGNIEEQTMFILYGSEANGKTTFLNTITFLLGDYALATPTESFMKKNGDQNTNDIARLRGTRFVTTTEAEQGRRLSEPLIKKITGNDQITARFLYGEYFNFTPTFKIYMATNHKPVIKGTDHGIWRRIMLIPFTTTIPKEKQDKSLEEKLKNEASGILNWLLEGTLRWRREGLAAPAVILNATDEYRGEMDVIGNFINERCIKKPDVTIRIRELYKAYSDWCDDNKEHAVSERFFTMRLKEMGFVQCRTAEARYWSGIGLPDK

SEQ ID NO: 28981 - DNA, 915 bp, Unknown
  Obtained from environmental sample
  misc_feature (1)..(915): n is a, c, g, or t
gtgatcgccggaattcatctattagggcatacggaaagccttgccggacgcgtggctatcctcaatatgctcgggctgtcatataaggaaataatcaggaggccaaaagattcaaaaccatttttaccatcgcttaacatgaccaaaaaagctccggcagacaaaccattgacatcgcccgaagtgtataaaataatctggcaaggctctttcccccgcataatcacaaataaaaacgcttcagccgcaagaaaacttttctatgattcgtatatccaaacttacatagaacgcgacgtaaaggatttttataacattgaaagcgaattgaatttttataatttccttgtgtccgcggcggcaagaacagggcagcttcttaattattccgatctcgcgcgcgatgttcacatagatataagaaccgcgaaactatggcttgaaattcttgaacgctcctgccttattcaactgctttatccttacagtacaaacgcggcgaaacgcacgataaagacaccaaaattgtatttcctggatacgggactcgcgtcgcatttgtgttcctgggaaaccgccgacgcgctcagaaacggcgcacagagcggagccatgctggaaacctatgtcttcgccgagattttaaaatcatattggcataacggcggcaatccgaacatctatttctaccgcgataccgatcaaaaagaagtggattttgttattgaaaaaaacatgactctctatcctattgaagtcaaaaagacagctaatcccggcgccgacgattgtaaaagtttcaggaatctgtcagttttcaaaaaaccaatcggcacgggagcggtggtttgtttgtatcagataacaacgtcgattgcgaagaatgttttatcagttccggtgtgggagatatag

SEQ ID NO: 28982 - protein, 304 aa, Unknown
  Obtained from environmental sample
  misc_feature (1)..(304): Xaa is any amino acid
MIAGIHLLGHTESLAGRVAILNMLGLSYKEIIRRPKDSKPFLPSLNMTKKAPADKPLTSPEVYKIIWQGSFPRIITNKNASAARKLFYDSYIQTYIERDVKDFYNIESELNFYNFLVSAAARTGQLLNYSDLARDVHIDIRTAKLWLEILERSCLIQLLYPYSTNAAKRTIKTPKLYFLDTGLASHLCSWETADALRNGAQSGAMLETYVFAEILKSYWHNGGNPNIYFYRDTDQKEVDFVIEKNMTLYPIEVKKTANPGADDCKSFRNLSVFKKPIGTGAVVCLYQITTSIAKNVLSVPVWEI

SEQ ID NO: 28983 - DNA, 945 bp, Unknown
  Obtained from environmental sample
  misc_feature (1)..(945): n is a, c, g, or t
atggcgacgcaaaatatcacgctgagggctacggcgacatcgcctatcacacaaaggtcttggactaatgtcgattacgcgcccgccgcttcgcgcagacactcccgtcagaggtacgacatcaaattgccgtcatccggcaacgggcctttcccgctgttaatatatgtacacggcgggggatttagcggcggtgaatggcaactggcacagaaccaaaacgggcttgttaaaagggcaaacgacagctgcggttacgctgtcgccagcgtcgggtatctccttatgggtcaaagcggttggagcggcggtcaaagggctttccccgaaaatgttgaggacgttttggccgctgtacgccatttaagagccaacgccgctacatatcatattaaccccgataaattcgccgtatcgggtttctcggcgggcgcttacatgaccgctatagtctgcgcgctttctaacgcgacaaaccacggctatgatataacaagcctcggcaatgccggagtttcacacgcggttcagggtgcggcaagttcggcggcgctcacagatttctcgctcttggagacgcatgaggctgcaaacggcggcggaatgctggatcacgacgcctctcccgaaggggcgatgcttggaggaaacttaaaaaacgacaaagatagagaacccatgaaaacatatctcaagatgcagaatccgttgacccacatctcggcgaacacgccgcccatatatatgttgcatggcaccagcgataatttagttccttggcagcagtcggacataatggtgaacaaaatcaatgagtttgttccgaacaaggcaaaattcaacaaagtcagcggaagaagccatgcggactttgagggtaaagatgctgcatcaacggtggagatacttaactttttggatgccgcacttgggattcagaggtaa

SEQ ID NO: 28984 - protein, 314 aa, Unknown
  Obtained from environmental sample
  DOMAIN (67)...(313): Prolyl oligopeptidase family
  misc_feature (1)..(314): Xaa is any amino acid
MATQNITLRATATSPITQRSWTNVDYAPAASRRHSRQRYDIKLPSSGNGPFPLLIYVHGGGFSGGEWQLAQNQNGLVKRANDSCGYAVASVGYLLMGQSGWSGGQRAFPENVEDVLAAVRHLRANAATYHINPDKFAVSGFSAGAYMTAIVCALSNATNHGYDITSLGNAGVSHAVQGAASSAALTDFSLLETHEAANGGGMLDHDASPEGAMLGGNLKNDKDREPMKTYLKMQNPLTHISANTPPIYMLHGTSDNLVPWQQSDIMVNKINEFVPNKAKFNKVSGRSHADFEGKDAASTVEILNFLDAALGIQR

SEQ ID NO: 28985 - DNA, 579 bp, Unknown
  Obtained from environmental sample
  misc_feature (1)..(579): n is a, c, g, or t
ttgatggccgagatgcccatccacgaggcacctaagtccacgcgcaatgcgaaccaatcacgcgaccccgagatgtccagcacgaagaagcacggcagctggcatttcggagccaaatcccacataggcgttgatgcaggaacaggccttgttcacaacgttgagattacgccggccaacgtgcacgacataaaggttgcccacaagcttatacgccccgatgacaagacagccggaggcgatagcggttatgttggcttggagaatcgcgaagagatgaagagcgacccgtttctatctcaagtgaagtgcgagatagtgaagcgtccctcattttggaagaaaaaagagttgagcaagcttgcggaggaatttgacagaaatgaagagcgtaggctcataagcaaaaggcagaaagtggaatatgtgttccatgtcatcaaggatatattcaaattcaaaaagcttccctacaagggcattgccaagaacgcggaacgccttctggcatcatttgccaatgccaatctttatatgcttgccatagcaggccgcaagttctgccaacagacgggttga

SEQ ID NO: 28986 - protein, 192 aa, Unknown
  Obtained from environmental sample
  DOMAIN (4)...(177): Transposase DDE domain
  misc_feature (1)..(192): Xaa is any amino acid
MMAEMPIHEAPKSTRNANQSRDPEMSSTKKHGSWHFGAKSHIGVDAGTGLVHNVEITPANVHDIKVAHKLIRPDDKTAGGDSGYVGLENREEMKSDPFLSQVKCEIVKRPSFWKKKELSKLAEEFDRNEERRLISKRQKVEYVFHVIKDIFKFKKLPYKGIAKNAERLLASFANANLYMLAIAGRKFCQQTG

SEQ ID NO: 28987 - DNA, 1290 bp, Unknown
  Obtained from environmental sample
  misc_feature (1)..(1290): n is a, c, g, or t
atgagaggtataaagatgaagtgttatatttgcaacaaaaaagaagccgattccgcagagcatataattcctaacgctattggtgggaaaataaaagcgagaattttgtgtaaagaatgtaattctaaatgcggggattcttgtgacgccacattagctaaaagtttgttacttttctcccatttgataaatcattcaaggagagggaatattccagacttgccgtgtaaaataacagattctgatggtaaaaaagtttcagttgaacgtgacgctacctcaaaagaatacaattctttgatttatggtaaacacacaaattatggcaattcattagaattttcttatatatcatttgggaaagatggtgagcgaaaacttagaaaagagtataggcaaactttaataaattggggtaaagagcacggttggagcgaagaacgtttaaccgaggagctacaaaaaatagaaacaattatcgctacttctacgaaaaaaatagaacagccacaaattacgatgactcttagttttaatgggaaggaaaaggaagtttatttatcttgtttgaaaaccgctacgaatttttatatccaaaaagggtatgatagacaatatattgaaaatgcaataagaataataaaagaacaatgcgatgatgttttcaaatttgcaaatatatattatcccgaagacttttttccaatagatagcatatatcacactttatatctaaaaggagattcaaaaaacagaaaattattctgtctaatatcatattataatgtatttcagtcgttactccttctaaatgcggattatgatggagcagactttgaggaaaaatactgctatgatatttggaaggaaaaggaagttaatttcactaaatcattagacattgataccgaaacgattcaaaccgtcattgaaaatggacacgaatatttaaaatcagcaatagagcaaatggttaaaatgtttagtatttttatagaacgttttgtagttggtaaagactttactccgactggaacaaaagttctcttgaattcaattcagaaaatatctgaagaattagcacaacaaaatgatttgctagaaaaacagcaatttacaaaaattataacaaacaaattatctctacgccctaaagaattgaatttattaaaagataaagatattaaagaaatagtagttaaaattgaagatttcttttttgaagaatacttgcgacaganaactcgttttattttgttgtcagtaattcaaaaatatctgcggaaataa

SEQ ID NO: 28988 - protein, 429 aa, Unknown
  Obtained from environmental sample
  misc_feature (1)..(429): Xaa is any amino acid
MRGIKMKCYICNKKEADSAEHIIPNAIGGKIKARILCKECNSKCGDSCDATLAKSLLLFSHLINHSRRGNIPDLPCKITDSDGKKVSVERDATSKEYNSLIYGKHTNYGNSLEFSYISFGKDGERKLRKEYRQTLINWGKEHGWSEERLTEELQKIETIIATSTKKIEQPQITMTLSFNGKEKEVYLSCLKTATNFYIQKGYDRQYIENAIRIIKEQCDDVFKFANIYYPEDFFPIDSIYHTLYLKGDSKNRKLFCLISYYNVFQSLLLLNADYDGADFEEKYCYDIWKEKEVNFTKSLDIDTETIQTVIENGHEYLKSAIEQMVKMFSIFIERFVVGKDFTPTGTKVLLNSIQKISEELAQQNDLLEKQQFTKIITNKLSLRPKELNLLKDKDIKEIVVKIEDFFFEEYLRQXTRFILLSVIQKYLRK

SEQ ID NO: 28989 - DNA, 441 bp, Unknown
  Obtained from environmental sample
  misc_feature (1)..(441): n is a, c, g, or t
atgattaacggtattatttacgatttcgaatcaatcaaattgattctgccgtccggcttgagcctcacgttcgaaaaaatatcctacaaggataaaaaagacgatgaggtgatcactggctcaaacagcgttccgatagggatcgggcgcggggaatactccggcgagtgcgaggtcgaatttggcagggcagaatatgaactgatgaacaaatattcggcaactcacggaggattttacaatatgcctccagttccgattatcgtcagttatggacacaacggtcagccgccgataaccgacaccttgcaagtaaaattcaatgaaagggatttctctgccgccaaaggcgacaagaacctgaagattccactcaagggagcgttaactgccccgctgatatcgaacggcgttccggcttatgttccgggactcaattaa

SEQ ID NO: 28990 - protein, 146 aa, Unknown
  Obtained from environmental sample
  misc_feature (1)..(146): Xaa is any amino acid
MINGIIYDFESIKLILPSGLSLTFEKISYKDKKDDEVITGSNSVPIGIGRGEYSGECEVEFGRAEYELMNKYSATHGGFYNMPPVPIIVSYGHNGQPPITDTLQVKFNERDFSAAKGDKNLKIPLKGALTAPLISNGVPAYVPGLN

SEQ ID NO: 28991 - DNA, 621 bp, Unknown
  Obtained from environmental sample
  misc_feature (1)..(621): n is a, c, g, or t
ttgcaagtttgcgcttcgtatatcgaggaggcagatgccaacggtcagatcgatgtgcgcgggcttatcggaacttattgcggaacgctcgcggcgcggaaagtacaggacggccccgatgccgtgaaattcggcgggatcgccgccgcgacagccctgatgccggaaggaatcaacgatggacacatcgagaacctgaagaacgcagggtatgtgaccgcgcgtaagtatgtcggacggaaggggatttatatcacttccggtcagatgatgagcgaagagggttccgattacgaccttgtggaacgccgcagggttatggacaaggcttgccgcaatctgtatgtcgcacagcttccggctgtgaatgatacggtcaccatcagcaaggacggatcgccggaagggatcgaaatgtttgtggcaaagagtcagtccccgcttgacatcatgaaaaccaaccgggaaatctccgatggttatgtgatcgtcccgcccgggcagaatatcctcgcggacaaaaaactccgtaccaaagtgcggattgtccctctcggaaagatgagttacatcgaaaacgagatcgcttacatgaatccagcccttggaggtgcagaatga

SEQ ID NO: 28992 - protein, 206 aa, Unknown
  Obtained from environmental sample
  misc_feature (1)..(206): Xaa is any amino acid
MQVCASYIEEADANGQIDVRGLIGTYCGTLAARKVQDGPDAVKFGGIAAATALMPEGINDGHIENLKNAGYVTARKYVGRKGIYITSGQMMSEEGSDYDLVERRRVMDKACRNLYVAQLPAVNDTVTISKDGSPEGIEMFVAKSQSPLDIMKTNREISDGYVIVPPGQNILADKKLRTKVRIVPLGKMSYIENEIAYMNPALGGAE

SEQ ID NO: 28993 - DNA, 936 bp, Unknown
  Obtained from environmental sample
  misc_feature (1)..(936): n is a, c, g, or t
ttggaaatgtttttggccaacaacgtcaagcgcgtggtagtctgctaccccgaggacgatacgaccggcaaggtattttcggagaccctgagcaaagatgtcaccgaggacccggaagaggctgccaaagaactgttcaaaaagatacgccccggcgagcctgccacggccgactccagccgcaagttgctggagtccatgttcttcgacccacagaagtacgacctctcaaaggtgggccgccataagataaacgccaagctgggccaagccatatctttggatgagcgcacactgaccatagacgatttcattaacaccatctgctacctgctgcgcctgaaaaaatatgacacaacgcgacaggacaggagcgacgaaatagcgcctgtccgcagggatgacattgaccaccttggcaaccgccgcgttcgcagcgttggcgagctgcttgaaaacggcttcagggtcggactccacagggtactaaggtctatcaaagaaaaattttccttggcgcaggatccgaacaacccgctgcaggcgcacgacctcatcaacagcaagccagtgatcgcctctatgaaagaattctttggctccagccagttgtcgcagttcatggatcagactaaccctctgtccgagatcacgcacaagcgcagactctcggcccttggccctggcggcctcagcagggatcgggcgaccttcgaagttcgcgacgtccatacatcgcactatggccgcatttgccccatcgagacgcctgaaggcccaaatatcggccttataagctcgctctcgtgctacgcccgcatcaacgaattcggcttcatagagagtccgtacctcaaagtggagaacgggcgcatcattgactacgccgaaatcacccacgtcggcgactccaatttggctacatggacgttgtaa

SEQ ID NO: 28994 - protein, 311 aa, Unknown
  Obtained from environmental sample
  DOMAIN (206)...(275): RNA polymerase Rpb2, domain 3
  misc_feature (1)..(311): Xaa is any amino acid
MEMFLANNVKRVVVCYPEDDTTGKVFSETLSKDVTEDPEEAAKELFKKIRPGEPATADSSRKLLESMFFDPQKYDLSKVGRHKINAKLGQAISLDERTLTIDDFINTICYLLRLKKYDTTRQDRSDEIAPVRRDDIDHLGNRRVRSVGELLENGFRVGLHRVLRSIKEKFSLAQDPNNPLQAHDLINSKPVIASMKEFFGSSQLSQFMDQTNPLSEITHKRRLSALGPGGLSRDRATFEVRDVHTSHYGRICPIETPEGPNIGLISSLSCYARINEFGFIESPYLKVENGRIIDYAEITHVGDSNLATWTL

SEQ ID NO: 28995 - DNA, 414 bp, Unknown
  Obtained from environmental sample
  misc_feature (1)..(414): n is a, c, g, or t
gtgggtgatttcggcgtagtcaatgatgcgcccgttctccactttgaggtacggactctctatgaagccgaattcgttgatgcgggcgtagcacgagagcgagcttataaggccgatatttgggccttcaggcgtctcgatggggcaaatgcggccatagtgcgatgtatggacgtcgcgaacttcgaaggtcgcccgatccctgctgaggccgccagggccaagggccgagagtctgcgcttgtgcgtgatctcggacagagggttagtctgatccatgaactgcgacaactggctggagccaaagaattctttcatagaggcgatcactggcttgctgttgatgaggtcgtgcgcctgcagcgggttgttcggatcctgcgccaaggaaaatttttctttgatagaccttag

SEQ ID NO: 28996 - protein, 137 aa, Unknown
  Obtained from environmental sample
  misc_feature (1)..(137): Xaa is any amino acid
MGDFGVVNDAPVLHFEVRTLYEAEFVDAGVARERAYKADIWAFRRLDGANAAIVRCMDVANFEGRPIPAEAARAKGRESALVRDLGQRVSLIHELRQLAGAKEFFHRGDHWLAVDEVVRLQRVVRILRQGKFFFDRP

SEQ ID NO: 28997 - DNA, 642 bp, Unknown
  Obtained from environmental sample
  misc_feature (1)..(642): n is a, c, g, or t
ttgacaggaattgccataaccggcggcgaggggccaaaaagcgcggcgctaaaaaagctcacgaagctggcagacctgattgtcgctgcggactccggccttaccgcctgcgaagaggcgggcatcgtgccggactggattgtcggggacatggattccctgggcgacttgtggcggcttgaaaagtacccgcctgaaagggtaatccgccataggagcgacaaggactttagcgacacggagctggctctgtccctgctttgggaaaagggctgcggcgaggtttggcttgcgggaggcggcgggggccggacggatcaccttttggcgattcgctccctttttgagcggcaaaaagcgcctgacaggtggtttaccataggcgaagagatttttcgccttaaagagggagagagccgccgtacaggcgatgcgataggcggtatcgtttcggttttcccgctgggtgcgggatcctggcaggcggaaagcactggccttaagtggccgcttaacggtgttgcctgggaatcggggggctttagcctgagcaatgttgcccaggaagcgccttttgagctacgttcaaaaaagggagaattcatggtaatagtaagcagagtaccatgtacgataaaataa

SEQ ID NO: 28998 - protein, 213 aa, Unknown
  Obtained from environmental sample
  DOMAIN (8)...(130): Thiamin pyrophosphokinase, catalytic domain
  misc_feature (1)..(213): Xaa is any amino acid
MTGIAITGGEGPKSAALKKLTKLADLIVAADSGLTACEEAGIVPDWIVGDMDSLGDLWRLEKYPPERVIRHRSDKDFSDTELALSLLWEKGCGEVWLAGGGGGRTDHLLAIRSLFERQKAPDRWFTIGEEIFRLKEGESRRTGDAIGGIVSVFPLGAGSWQAESTGLKWPLNGVAWESGGFSLSNVAQEAPFELRSKKGEFMVIVSRVPCTIK

SEQ ID NO: 28999 - DNA, 417 bp, Unknown
  Obtained from environmental sample
  misc_feature (1)..(417): n is a, c, g, or t
atgttgagggtcgtgcttgataccaatgtcctggtttctgctttatggactccggatggaaatgcctcaaccattattaacctgatcttgacagatataattgtcccatgttttgaccagcatattttaaatgaataccaggttgttttatcgcgtccacggcttgcatttccggcaggccaggtaaatgagctcttatccgaaataacaaacagaggattatccgttattattttacccagttctattagattaccggatgagtcggatcgcaaattttttgatactgccaaatattgtgaagcatatttaataacaggcaacatcaaacactacccgaaagatccgatgattttaacgccagcccggtttcttgatattgacttaaccgcctttaaggatatactatacccatga

SEQ ID NO: 29000 - protein, 138 aa, Unknown
  Obtained from environmental sample
  misc_feature (1)..(138): Xaa is any amino acid
MLRVVLDTNVLVSALWTPDGNASTIINLILTDIIVPCFDQHILNEYQVVLSRPRLAFPAGQVNELLSEITNRGLSVIILPSSIRLPDESDRKFFDTAKYCEAYLITGNIKHYPKDPMILTPARFLDIDLTAFKDILYP

SEQ ID NO: 29001 - DNA, 804 bp, Unknown
  Obtained from environmental sample
  misc_feature (1)..(804): n is a, c, g, or t
atgatctccggctcctaccacagcgccttcaagggcaagggaatggagttttccgaggtgcggccgtacatagacggcgacgacgtgcgcaccatagattggaacgtaacggcgcgtatgggggcgccgtatataaagaaatacatagaggagcgcgagctaacggtcatgctcgtcgtagacgcctccgcctccggcaacttcggctcaatagataagttcaaaggcgagatggcggttgagctctgctcgctcctcgccttctcggccatccgcaacaacgaccgcgtggggctggtcgtcttcacctccgacgtcgagacgtatatacccccgcgcaaaggcaggaaccacgtcctgagggtcatccgcgaactgctgtacttccgcccgaaaaacaagggcacggacatcggcaacgcgctgaagttcctgaaccgagtgcagacccggacgagcgtagtcttcttggtctccgatttcgtctcggcgggcttcgaggcgccgctgagggtcgcggccaaacggcacgacttggtgaccatatccgtgagcgacccgagggaggagctgatcccgcagatcgggctcgtggaactcgaagacgccgaaactggcgagacggtactcttagacacgcggaaccggagagcgatggagatgtacaagagcgagcgggcggcgcaaagggcgcggctggacgaattgttccgctccacgggcgtcgacgagatcacggtgtccaccgagagcggctacgtcacgcctatcgtgaaattcttccgtaaacgagaaaaactgtag

SEQ ID NO: 29002 - protein, 267 aa, Unknown
  Obtained from environmental sample
  DOMAIN (55)...(209): von Willebrand factor type A domain
  misc_feature (1)..(267): Xaa is any amino acid
MISGSYHSAFKGKGMEFSEVRPYIDGDDVRTIDWNVTARMGAPYIKKYIEERELTVMLVVDASASGNFGSIDKFKGEMAVELCSLLAFSAIRNNDRVGLVVFTSDVETYIPPRKGRNHVLRVIRELLYFRPKNKGTDIGNALKFLNRVQTRTSVVFLVSDFVSAGFEAPLRVAAKRHDLVTISVSDPREELIPQIGLVELEDAETGETVLLDTRNRRAMEMYKSERAAQRARLDELFRSTGVDEITVSTESGYVTPIVKFFRKREKL

SEQ ID NO: 29003 - DNA, 732 bp, Unknown
  Obtained from environmental sample
  misc_feature (1)..(732): n is a, c, g, or t
ttgaatgagcatctttccggcggcggcgtttcatccggtctgctctcttttttgaaaatcggggataggtccgcctcggcgataaaatcaggcggcactacaaggcgcgcggccaagatggtaaccctggatgtggatcaccccgacgtggaaaaatacatctcatggaaagccgaggaagagcataaagtcgcctctatggtaacaggttcggcaatagtgagaaaacaccttgacggaatcaaaaaggcgctcgccagtttccgggggccggataccgacaagttcaatatcgaaaaaaaccacgatttggccggtattctccgggctgcgttaggcgataaaatccccccggcctacctgtaccagcagcttaggcgcctggagcatggcgatgacgaggcgttgtcacaggtgtactccacagcctgggacgacgaggcgtacaacactgtttcgggacagagttccaataacagcctgcgtataaacgatgaatttatgtgggcggtgatgaacgacggggactggaatcttaccagccgcaccggcggcaatgccgtgaaaacggtcaaggcccgcaagctctggacggatatagcccgcagcagttggcagtgcgccgacccgggcctgcaataccacacaacgattaatgactggcatacctgcccggcgggcggggaaatcccgggcgtcgaatccctgttcggaatatatgttcctggatga

SEQ ID NO: 29004 - protein, 243 aa, Unknown
  Obtained from environmental sample
  misc_feature (1)..(243): Xaa is any amino acid
MNEHLSGGGVSSGLLSFLKIGDRSASAIKSGGTTRRAAKMVTLDVDHPDVEKYISWKAEEEHKVASMVTGSAIVRKHLDGIKKALASFRGPDTDKFNIEKNHDLAGILRAALGDKIPPAYLYQQLRRLEHGDDEALSQVYSTAWDDEAYNTVSGQSSNNSLRINDEFMWAVMNDGDWNLTSRTGGNAVKTVKARKLWTDIARSSWQCADPGLQYHTTINDWHTCPAGGEIPGVESLFGIYVPG

SEQ ID NO: 29005 - DNA, 957 bp, Unknown
  Obtained from environmental sample
  misc_feature (1)..(957): n is a, c, g, or t
atgcccggcactccctatgaattgaaatncgggggagatcccgaatgtattcctgaccttgactggcagggtcttaaagattttcaccgcgcatggtattcaccggcaaactgccgtgtctttcttgccggaaatattcccaccgaaaagcagcttgcctttcttgatgaaaaattcttttccgcgcttcctgccggaaataaaaactcccccattccaaaaacggaacgctggcaaagtcccaggtcatttaaagtaccctgcccagccggagccgagcaaaaacctacagtgctggtttcatggctctgcggcgatgttaccgatacggctgaaaccctggcccttaccgccctgtctgaaatccttttgggacatgacggttcccccattacgagagtgctggtagactcaggcctgggcgaagacctttcgcctgtttccggctttgaaagggaacttagggagacttcattctgcgccggtattagaggggtaaattacgaagaccctggacttggcgttgaagaagccgcaaagaaagttgaagcccttatcatgggcgaacttgaacgcctggaagaagaaggtatcccaaaagaagaaatagaagccgctcttttggcgatggaattttccaaccgcgagattcgccgttcaggggggccattttctctggtttggatgagccgttctttaaaggcctggctccacggcgggaacccctgggacaacatgctttttgtctctcctttttccgacttaaaacagcgcatagaaacggacatccgctattttgagaaaatgatccgccgctattttctggataacccgcaccgcgcctttatcatcattaagcctgaagaaagtttttggaagataaagaagccgcgctggccgcccgccttgaagaaattgaaaaatcgctgggaagcgaagataaagaagctatattga

SEQ ID NO: 29006 - protein, 318 aa, Unknown
  Obtained from environmental sample
  DOMAIN (19)...(210): Peptidase M16 inactive domain
  misc_feature (1)..(318): Xaa is any amino acid
MPGTPYELKXGGDPECIPDLDWQGLKDFHRAWYSPANCRVFLAGNIPTEKQLAFLDEKFFSALPAGNKNSPIPKTERWQSPRSFKVPCPAGAEQKPTVLVSWLCGDVTDTAETLALTALSEILLGHDGSPITRVLVDSGLGEDLSPVSGFERELRETSFCAGIRGVNYEDPGLGVEEAAKKVEALIMGELERLEEEGIPKEEIEAALLAMEFSNREIRRSGGPFSLVWMSRSLKAWLHGGNPWDNMLFVSPFSDLKQRIETDIRYFEKMIRRYFLDNPHRAFIIIKPEESFWKIKKPRWPPALKKLKNRWEAKIKKLY

SEQ ID NO: 29007 - DNA, 879 bp, Unknown
  Obtained from environmental sample
  misc_feature (1)..(879): n is a, c, g, or t
ttggccgattggctggcggcgctccagaaatcaaagggccgcctagtgttaagcggcatcgggaaatcgggcatcgtggcccaaaaaatatcggcaacttttgcatccacgggctgccccagcttttttctgcacccagccgatgcactgcacggcgacctagggatggtgacaggggaagacatggcgctgctgctgagcaacagcggggaaagcgaggaaatattgcgcttggttccggctctcaagcgggaaggagtgccaatcgcatgcataacctctaacccaagcagcgcattggcccaagccgcgaaatgggtgtttgcctattcgctgcccgagggagagggctgcccgctaagctacgccccgatggccagcaccaccatgcaggtggtgtggggcgaccttttggcggcggaaaggattgtggccgcaggattcagcgtcgagggatttgccaaaaatcacccagggggcaaattaggaacaaagctgatcaaggccaaagagctcatgcacaccgatttccccaaaatcccccttagcagcggcctagtccagattttgggcgcaatgacatcgggcaagctgggcatggcggcagtgatggatagggggaaattggctggcgtgataagcgatggagacatacgcagagctcttgagcggtctgaggtgtcaggccagcagccgcttgatcttaaagcaagtcaaatcatgacgttaaatccaatagctatagataaagacatgctggcgatagaggccgccaaggtcatggaagacaaaaagatcacgttcattgttgtaactgatggctctaaacccgttggaatattgcacatacacgatcttctggccaacagggtgatatag

SEQ ID NO: 29008 - protein, 292 aa, Unknown
  Obtained from environmental sample
  DOMAIN (6)...(137): SIS domain
  misc_feature (1)..(292): Xaa is any amino acid
MADWLAALQKSKGRLVLSGIGKSGIVAQKISATFASTGCPSFFLHPADALHGDLGMVTGEDMALLLSNSGESEEILRLVPALKREGVPIACITSNPSSALAQAAKWVFAYSLPEGEGCPLSYAPMASTTMQVVWGDLLAAERIVAAGFSVEGFAKNHPGGKLGTKLIKAKELMHTDFPKIPLSSGLVQILGAMTSGKLGMAAVMDRGKLAGVISDGDIRRALERSEVSGQQPLDLKASQIMTLNPIAIDKDMLAIEAAKVMEDKKITFIVVTDGSKPVGILHIHDLLANRVI

SEQ ID NO: 29009 - DNA, 522 bp, Unknown
  Obtained from environmental sample
  misc_feature (1)..(522): n is a, c, g, or t
atgaacataatgtttcttatgggcggcgttcacgctgacacaaataaagaagattacccgttttatcttaccgaaatcaacgaaaggacaattctggaacagcaagtagaatatgtcaaagtgattcagccgcaacgtttgttgttctgcatgaaagaatcggaaataaagcagtttcacacggattccgtgataatgcagctagacccgtccgctaccataataccaataaaagcgcaaacaaaaggcgctgtttgcagcgcattacttggcgtggaatacatagacaataacgaagaattgattttaatggctattgacgacttcatggacgaaaacagcgccgagatcatcgatcagtttcgcagggcaaacgctgacgccggggttgtctcctttaattccgtacaccctcgttattcgttcgcaaaagtagacgaatgtggcacaccggttgaatttgcggaaaaaacgcctatcagcaagaacgcgctggtgtcgtttatatctcggccaatctga

SEQ ID NO: 29010 - protein, 173 aa, Unknown
  Obtained from environmental sample
  misc_feature (1)..(173): Xaa is any amino acid
MNIMFLMGGVHADTNKEDYPFYLTEINERTILEQQVEYVKVIQPQRLLFCMKESEIKQFHTDSVIMQLDPSATIIPIKAQTKGAVCSALLGVEYIDNNEELILMAIDDFMDENSAEIIDQFRRANADAGVVSFNSVHPRYSFAKVDECGTPVEFAEKTPISKNALVSFISRPI

SEQ ID NO: 29011 - DNA, 309 bp, Unknown
  Obtained from environmental sample
  misc_feature (1)..(309): n is a, c, g, or t
gtgtgcagcaattcaatcaggatgacaattgagatgatgatgagttatgcgaaactatcgcggtatttggaattttctatatcaaaccaggacataaaaaacgcgaaaccggatcctgagatgtacctgaacgcaatggaaaagatagggctgagtccggaagaatgcctgatctgcgaagataatgaaaacgggatcaaatcggcaattgccagcgggggccatctgatggtcattagaactgttgacgacgtgaattatgacaatataaaagcccgcatcgctgaaattgaaggggatgggaaatga

SEQ ID NO: 29012 - protein, 102 aa, Unknown
  Obtained from environmental sample
  misc_feature (1)..(102): Xaa is any amino acid
MCSNSIRMTIEMMMSYAKLSRYLEFSISNQDIKNAKPDPEMYLNAMEKIGLSPEECLICEDNENGIKSAIASGGHLMVIRTVDDVNYDNIKARIAEIEGDGK

SEQ ID NO: 29013 - DNA, 615 bp, Unknown
  Obtained from environmental sample
  misc_feature (1)..(615): n is a, c, g, or t
atgattgaacgcaaatcctactcattcaatgagtttcgtttggaactgccggaattgcttgaaatgcaaaaggcttcttacgaacgttttttgcaggccggaattcccgcaaagaacagacggagcgagggacttgaaagcgtatttcgcgatgcctttcctgtgtctgatagcagagggcttttagttttgcgttacagccattacgctttggctatgcccagatattccataaaggaatgcagggaacgtggagtcacttattcccgccagctcatagttcatttggagcttcaaactttcaaagaagacggcgaagacagaaaattgcaagaccaagttgcaaacgatgtgttcttttgcgacttgcccataatgaccgataacggtaccttcataataaatggcgcagaacgagttgtaataagccagctgcatcgctctccaggtgtgagctttgactctgagcaactcccaagcggcaaaatgatttaccaaagccgaattatacccaacagaggttcttggcttgaattcaacacagagaacgatgttctctatatgctgatagaccgcaaaaagaagttgctgcaactctcggccgatctgtcatga

SEQ ID NO: 29014 - protein, 204 aa, Unknown
  Obtained from environmental sample
  DOMAIN (18)...(200): RNA polymerase beta subunit
  misc_feature (1)..(204): Xaa is any amino acid
MIERKSYSFNEFRLELPELLEMQKASYERFLQAGIPAKNRRSEGLESVFRDAFPVSDSRGLLVLRYSHYALAMPRYSIKECRERGVTYSRQLIVHLELQTFKEDGEDRKLQDQVANDVFFCDLPIMTDNGTFIINGAERVVISQLHRSPGVSFDSEQLPSGKMIYQSRIIPNRGSWLEFNTENDVLYMLIDRKKKLLQLSADLS

SEQ ID NO: 29015 - DNA, 606 bp, Unknown
  Obtained from environmental sample
  misc_feature (1)..(606): n is a, c, g, or t
atgaaagaattgacaattcgccagaaagaagtgctgacctttattgctgattacaaaaataaacattcatatcctccgacaataagggaaatcgcggagcatttttccatgtccgttaagggcgcgcatgatcatatcacggccctaaaaagaaagggacagcttaaacacgaagaaaagcgtcctcgcacgctggagcttaccaattccagaaaagacgatcattcttcaattatagacgttccccttcttgggagcgtcgccgccggcgttccgcttttagcggaagaaaattttgaaaaaaacatacccatacacagttctttccttagaaaaaacaaaaaatattttgctttaaaagttaaaggcgattctatgtcgggagcgggcattttggacggggatctcgcgattatcgaaaaactaagcgttgtccataacggcgagatcgccgtcgctgtccttaatgacgctgtaacattgaaacgtttttacaaggaaagctcaagagtcaggctgcagccggaaaatccttcctacaaagccacatacagcaaggatgtaaagattctgggccgccttgccggcgttatccgttcttattaa

SEQ ID NO: 29016 - protein, 201 aa, Unknown
  Obtained from environmental sample
  DOMAIN (120)...(193): Peptidase S24-like
  misc_feature (1)..(201): Xaa is any amino acid
MKELTIRQKEVLTFIADYKNKHSYPPTIREIAEHFSMSVKGAHDHITALKRKGQLKHEEKRPRTLELTNSRKDDHSSIIDVPLLGSVAAGVPLLAEENFEKNIPIHSSFLRKNKKYFALKVKGDSMSGAGILDGDLAIIEKLSVVHNGEIAVAVLNDAVTLKRFYKESSRVRLQPENPSYKATYSKDVKILGRLAGVIRSY

SEQ ID NO: 29017 - DNA, 633 bp, Unknown
  Obtained from environmental sample
  misc_feature (1)..(633): n is a, c, g, or t
ttgttatttatatgcgcaaaaatccccgccggcagggtattcgcgcattaccgattcatgctgtttctcattgcgttggttgtaattttgcaaacgggcttcggcagcggcctaataacagggttaatgataggctgccgtatcataagccttgtcattatactcccgcttttgaccatgactacgtcaaccggggatattgcttttggcattaccaaactggggttcaactataaaaccgcctatattattacttccgcttttaatatactgcccttattccaggaagacgcaaggcaattaattgacgcgcgcaggcttcgcaacatcgccccacgaggagggcgcggcgctctccggggcgggaaaagaaacgtgttcacgcggtttggcgagtacgcaaaaatcgcgcttccgctgatgataaaggcgatgcggcgggcggcggcagtcggactggctatggacgcaagagccttcggagcataccgcgccagaacctggcattccggaacatggccgcgtgaaaccggaatgtcgttagttgattttacggccattgccgctgggttcgtttacgcggcaaatgtaattacagcgaatcatatcgtgaanttatgcannatactataa

SEQ ID NO: 29018 - protein, 210 aa, Unknown
  Obtained from environmental sample
  misc_feature (1)..(210): Xaa is any amino acid
MLFICAKIPAGRVFAHYRFMLFLIALVVILQTGFGSGLITGLMIGCRIISLVIILPLLTMTTSTGDIAFGITKLGFNYKTAYIITSAFNILPLFQEDARQLIDARRLRNIAPRGGRGALRGGKRNVFTRFGEYAKIALPLMIKAMRRAAAVGLAMDARAFGAYRARTWHSGTWPRETGMSLVDFTAIAAGFVYAANVITANHIVXLCXIL

SEQ ID NO: 29019 - DNA, 942 bp, Unknown
  Obtained from environmental sample
  misc_feature (1)..(942): n is a, c, g, or t
atgatagaccctccccaggtttcggaattcgccggtgtatggcgggagcgagggcatccgttgncgcgttttcctgtcaatctgaggaagcggcggaagcggtattcgagtggcggaaccatgaataacggtacggaggcgattcgggtttccaacctgcgtcattggtatgaaccgggcaggattatacttgaagggataaacctgtcgatcgcggacggcgaatttacggcgataatcggacaaaacggatcaggcaaaacaacgctgataaaaaacatcagcggccttctgcgcccgaggcagggggaaattttcatccggggaaaaaacacagccggggcggatatcgctgaaatcgccaaagaagccggatacgtaatgcaggatcatgacaaccagctctttgaacaaacgttattcgatgaagtggcgttttctctgaagcacacaggttcaaaagaagaaatcacggagaaggtggaagaagcgcttgaaaccgtcggcctcctggacaagaaagatgtctttccccccgccttgccccgcgccgaccgtacaaaggccgtctttgcggccgttctggcattgggcacgggaatactgcttctggacgaacccattgccggccaggacagccggggcagccgcatgattatggacataatagcggggcttcacaaaaggggaaaaacaattattttaattacgcataacatcggcattgccgcgcaatacgcccacaggataatcgtaatgaagaacgcgcgtatcctgatggacggccccccgcctgaaatattcgggcatagggaaaaactcgccgaagcggggatacttgctccgcagattacaaggctctcgcaagagcttcgcgcccgtatcccgctgaaaaagacgcttaactcccgaagagtggcggagatgctctcggccatctga

SEQ ID NO: 29020 - protein, 313 aa, Unknown
  Obtained from environmental sample
  DOMAIN (74)...(256): ABC transporter
  misc_feature (1)..(313): Xaa is any amino acid
MIDPPQVSEFAGVWRERGHPLXRFPVNLRKRRKRYSSGGTMNNGTEAIRVSNLRHWYEPGRIILEGINLSIADGEFTAIIGQNGSGKTTLIKNISGLLRPRQGEIFIRGKNTAGADIAEIAKEAGYVMQDHDNQLFEQTLFDEVAFSLKHTGSKEEITEKVEEALETVGLLDKKDVFPPALPRADRTKAVFAAVLALGTGILLLDEPIAGQDSRGSRMIMDIIAGLHKRGKTIILITHNIGIAAQYAHRIIVMKNARILMDGPPPEIFGHREKLAEAGILAPQITRLSQELRARIPLKKTLNSRRVAEMLSAI

SEQ ID NO: 29021 - DNA, 390 bp, Unknown
  Obtained from environmental sample
  misc_feature (1)..(390): n is a, c, g, or t
atgaaatgggacaaaaaggacatttcccccgaacaggtaaaggaaatctctgtaaaatacggctgtgatctgctcaccgcctcaattctcgctcgcagaggcttttgcaccggcgattcaatccgctactttctggaagatgatcttacgtcccttcgcaacccctttgccatggacggaatggaagacgccgtagaacgtattctggcggcgaaagatgaaggcgaaaaagtactggtcttcggcgacagcgatgttgacggcattacgggaaccgcgctccttgcgggctaccttgaaagtataggcatggacgtaacttggcgtatccccacaggcgatgaatcttacgggctttctcttgacgccgtgaaaattggccgcaaatga

SEQ ID NO: 29022 - protein, 129 aa, Unknown
  Obtained from environmental sample
  misc_feature (1)..(129): Xaa is any amino acid
MKWDKKDISPEQVKEISVKYGCDLLTASILARRGFCTGDSIRYFLEDDLTSLRNPFAMDGMEDAVERILAAKDEGEKVLVFGDSDVDGITGTALLAGYLESIGMDVTWRIPTGDESYGLSLDAVKIGRK

SEQ ID NO: 29023 - DNA, 654 bp, Unknown
  Obtained from environmental sample
  misc_feature (1)..(654): n is a, c, g, or t
gtggactttgaagtgacgaacaattcaggggacgtagggaacctgtttgagatggccgggagggcgaaagaaatactggaagcggaggagcttaccgtgcttgcggacaaagggtactacgacagcgaggacatagccgcctgcgagaggaacggggtagcctgcattgttgcgaagaggaagagcggcggggcagcgaaagcggaagggtttaggaaggaaagcttttgctacgacgcaaaggaagacgcatacacgtgtccgtgcggaaataagatgaagcgcatgcgggaagggaagaagaacaggggcaaggaatacagggtatatgccaattatgaagcgtgcaggaaatgcggcaggaaaagcgaatgcacgaagtataatttccgtgagatgtggaggctggagtgccaggatatagtcgacatagcggacgagaggacaagaaacaacaaggggctgtaccggcagcggcaggaaataatagagcatgtttttggaaccgtcaaagcggtatggggctataggcaatacctttgccgtgggaaagagaaagttgctgcggaaacggcgctggcctatatggcatataacatgaggaggacgtttaacatatacaaggaatccaggctaatgccgacatttggatag

SEQ ID NO: 29024 - protein, 217 aa, Unknown
  Obtained from environmental sample
  misc_feature (1)..(217): Xaa is any amino acid
MDFEVTNNSGDVGNLFEMAGRAKEILEAEELTVLADKGYYDSEDIAACERNGVACIVAKRKSGGAAKAEGFRKESFCYDAKEDAYTCPCGNKMKRMREGKKNRGKEYRVYANYEACRKCGRKSECTKYNFREMWRLECQDIVDIADERTRNNKGLYRQRQEIIEHVFGTVKAVWGYRQYLCRGKEKVAAETALAYMAYNMRRTFNIYKESRLMPTFG

SEQ ID NO: 29025 - DNA, 534 bp, Unknown
  Obtained from environmental sample
  misc_feature (1)..(534): n is a, c, g, or t
atgtatcagatcggccgagccgccggtatttgcgaggtgctagccgagaactgcctgttcagggggacagaccgaggggtcagaataaaaacccgccgcagccgcggcggggcaatccacgatttggagttcagaaagctcgctattgaaaacagcctctgcccgcttgcgatcaacatgttctaccgctgcggcgcggagctttcggacggctatttcagcacggaagccctccctgtcggcgcggctaccccctcgatcaggaatgtccgcgtctcggatattaaagccacgggctgccgggcttccgcagggtttatcgccggcctgcccgaatcgccgatagaaaacctcagcgtcaggcgctgcgaattttccaccgacgagcagagcggcgtcagtcccgacgagtcggacatgtttttggggcttccgcaggttacggaaaaggggatacgcctgctcaatgtcaaaaatgcggaatttgccgaagtaagcgtgagcgggccggtggaggcttttgtttgccgttaa

SEQ ID NO: 29026 - protein, 177 aa, Unknown
  Obtained from environmental sample
  misc_feature (1)..(177): Xaa is any amino acid
MYQIGRAAGICEVLAENCLFRGTDRGVRIKTRRSRGGAIHDLEFRKLAIENSLCPLAINMFYRCGAELSDGYFSTEALPVGAATPSIRNVRVSDIKATGCRASAGFIAGLPESPIENLSVRRCEFSTDEQSGVSPDESDMFLGLPQVTEKGIRLLNVKNAEFAEVSVSGPVEAFVCR

SEQ ID NO: 29027 - DNA, 300 bp, Unknown
  Obtained from environmental sample
  misc_feature (1)..(300): n is a, c, g, or t
atgggaaaatattacaagtacgagccgcaggaattagcggaactgtatcttgcggcgtctttgcacgacttgggcaagctggcgattccctccgaaattctggaaaaaccgggaaaacttaccaatgaagagtttgagattattaagagccatgtcagtctgacatgggagcttcttaacgaaattgaaggatttgaaacaatatgccaatgggcgtccaaccatcatgaaaaactggacgattcaggatacccgtttggaaaaaaatcctcggagttggatttaattccaagctgttag

SEQ ID NO: 29028 - protein, 99 aa, Unknown
  Obtained from environmental sample
  DOMAIN (12)...(99): HD domain
  misc_feature (1)..(99): Xaa is any amino acid
MGKYYKYEPQELAELYLAASLHDLGKLAIPSEILEKPGKLTNEEFEIIKSHVSLTWELLNEIEGFETICQWASNHHEKLDDSGYPFGKKSSELDLIPSC

SEQ ID NO: 29029 - DNA, 531 bp, Unknown
  Obtained from environmental sample
  misc_feature (1)..(531): n is a, c, g, or t
ttgaactggcccagctcgtttttgccgatccgaatcgccttgagcgtcttgaccgaagcaaaagcaacacgtccggggaggagcggtggcaaaccctgggcatggcgggaaaggttcttttcgcggtctatacggagcgcggggagaggaagcggatcatatcggcgcgcctggccaataaggcggaacggagaagttatcatgggaattaccagatcgacggtaaaggttggtcaaaagccgactaaagaacagctaaggcagattcgggaaattgcgaaaaggccaattcgctacacagaggactgcccggaatccacgccggaagccctcgcggaatttgcggccatggcgcgtgcgcggaggcaaagaaaagcaaagccggtggttgccctgcgcgttgagcctgaagccctggaaaaatacaaggccctgggagacggctataccggcatcatggccgacgtgctgaattacgttgccaacaatccggagatactttcaaaagcatccggcgcggcggctacctga

SEQ ID NO: 29030 - protein, 176 aa, Unknown
  Obtained from environmental sample
  misc_feature (1)..(176): Xaa is any amino acid
MNWPSSFLPIRIALSVLTEAKATRPGRSGGKPWAWRERFFSRSIRSAGRGSGSYRRAWPIRRNGEVIMGITRSTVKVGQKPTKEQLRQIREIAKRPIRYTEDCPESTPEALAEFAAMARARRQRKAKPVVALRVEPEALEKYKALGDGYTGIMADVLNYVANNPEILSKASGAAAT

SEQ ID NO: 29031 - DNA, 321 bp, Unknown
  Obtained from environmental sample
  misc_feature (1)..(321): n is a, c, g, or t
atgcgcgggacagacgttgaatgggacgatgacaagaacgaggccaacaagcgcgaacatgagggaatgagttttgaactggcccagctcgtttttgccgatccgaatcgccttgagcgtcttgaccgaagcaaaagcaacacgtccggggaggagcggtggcaaaccctgggcatggcgggaaaggttcttttcgcggtctatacggagcgcggggagaggaagcggatcatatcggcgcgcctggccaataaggcggaacggagaagttatcatgggaattaccagatcgacggtaaaggttggtcaaaagccgactaa

SEQ ID NO: 29032 - protein, 106 aa, Unknown
  Obtained from environmental sample
  DOMAIN (4)...(94): Protein of unknown function (DUF497)
  misc_feature (1)..(106): Xaa is any amino acid
MRGTDVEWDDDKNEANKREHEGMSFELAQLVFADPNRLERLDRSKSNTSGEERWQTLGMAGKVLFAVYTERGERKRIISARLANKAERRSYHGNYQIDGKGWSKAD

SEQ ID NO: 29033 - DNA, 585 bp, Unknown
  Obtained from environmental sample
  misc_feature (1)..(585): n is a, c, g, or t
atgccattattacccttttctcagcaagctgaaataagagaggaaaaactcgcggtgcttattgacgcggacaatacccagcccgccattatcgagggtcttctcaacgaggttgccaaatacggcattgccagtatcaaacggatctacggagactggaccaataccaatcttcgttcctggaaagaccggcttttggaatatgccattcatccaattcagcagttttcctataccacgggaaaaaactccaccgattccgccatgataattgacgcaatggacatactctacagtgaaaaacttgacgggttctgtatcgtgtccagtgattctgattttacccgccttgccgcccgtttgcgggaaagcggccgcatagtgtacggtttcggcgaaaagaaaacgccgcgggcatttgtctcggtttgtgacaaatttatttacacagaaatattaaaagaggctcaggaagaaaccgatgatgaagattcctcgccttcgttgggcgcgccggccgccaaacccaaaaaagaatttaaagtagaccgcaaactcctcaaactgctgagggaaacgcgttga

SEQ ID NO: 29034 - protein, 194 aa, Unknown
  Obtained from environmental sample
  DOMAIN (14)...(155): Protein of unknown function DUF88
  misc_feature (1)..(194): Xaa is any amino acid
MPLLPFSQQAEIREEKLAVLIDADNTQPAIIEGLLNEVAKYGIASIKRIYGDWTNTNLRSWKDRLLEYAIHPIQQFSYTTGKNSTDSAMIIDAMDILYSEKLDGFCIVSSDSDFTRLAARLRESGRIVYGFGEKKTPRAFVSVCDKFIYTEILKEAQEETDDEDSSPSLGAPAAKPKKEFKVDRKLLKLLRETR

SEQ ID NO: 29035 - DNA, 552 bp, Unknown
  Obtained from environmental sample
  misc_feature (1)..(552): n is a, c, g, or t
atgattaaaacgccgcgtttctatcttatcgcgttgtcgctgatgtttggcacttcggtatttttcatcatcctccccagcctcaaggagttggcggtaaacagggggctggaatctttcgcgacggggattgtcatgttcaccggtatagccaacgctctgggcaggcttggcgctccgcttatgtctgataaaatagggcgtgaaatggcggatgtgatcattcttgccgcaaccgctctcggcgcgttcgggctttgtttcgccagcggacctctgttaattgtaatcatcgcggtagtggcgttctgttacggcggctattcgggactgtatcccgtcctgacatccgaaaatttcggcattaaaaatatcggctccaattacggcgcggtcatggtgggctttatgctctcggcattgttgttcccaattgtgataaaaaaaattgatggtcaagagttgcaatttatcgcgctcggatcactggcggtaatcggcgtggcgcttgttatcatcttaaaattgatgaacaaaaaaaatgaacaatga

SEQ ID NO: 29036 - protein, 183 aa, Unknown
  Obtained from environmental sample
  SIGNAL (1)...(29)
  misc_feature (1)..(183): Xaa is any amino acid
MIKTPRFYLIALSLMFGTSVFFIILPSLKELAVNRGLESFATGIVMFTGIANALGRLGAPLMSDKIGREMADVIILAATALGAFGLCFASGPLLIVIIAVVAFCYGGYSGLYPVLTSENFGIKNIGSNYGAVMVGFMLSALLFPIVIKKIDGQELQFIALGSLAVIGVALVIILKLMNKKNEQ

SEQ ID NO: 29037 - DNA, 834 bp, Unknown
  Obtained from environmental sample
  misc_feature (1)..(834): n is a, c, g, or t
gtgggaattgactgcgttgccatgtgcgtcaatgacgtgctatgcgtcggggccagacccctgttcttcctggattaccttgcctgcgggaaactcgacgccgacatggccgcggaaatcgtcaaaggcgtcgcggttggatgccgggaaacgggcagtgtgctgcttggcggagagaccgccgaaatgcccggattttacgaaaacggaaaatatgatattgccggcttttcagtcggtattgttgaccgcaaaaaaataattgacggttccaaaatctgcgaaggggacgcgctgctgggaataagctcgtccggcccccactctaacggtttcagcctgatacgcaaaataatcccggacttgaacgaggactttggaggaatgcccattggcatgtcccttctggaaccgacgcgcctgtatgccaaggccgtgttaagtttgatgggaaaaattgagatacgcggcatggcccatatcacgggcggcggcttctacgaaaacatcccccggatttttggcaaacaaaaatataccgcggtgatacggaaaggctcctgggacattccgccaatctttgcaaggattgccgccggctgttacaacgccggatgctccggccccctagcccaaaggcagggagctgaactgctaaaagttgacgcggcattacagaaacaaatgtttaatacctttaacatgggcgtcggtttcgtgcttgccctttcaccggctgatgtgaaggcggcgaaagagcatttagataactgcggtttcccttcatgggaaatcggttatgtgaaaaagccgccgggaatctcggccatctga

SEQ ID NO: 29038 - protein, 277 aa, Unknown
  Obtained from environmental sample
  DOMAIN (1)...(83): AIR synthase related protein, N-terminal domain
  misc_feature (1)..(277): Xaa is any amino acid
MGIDCVAMCVNDVLCVGARPLFFLDYLACGKLDADMAAEIVKGVAVGCRETGSVLLGGETAEMPGFYENGKYDIAGFSVGIVDRKKIIDGSKICEGDALLGISSSGPHSNGFSLIRKIIPDLNEDFGGMPIGMSLLEPTRLYAKAVLSLMGKIEIRGMAHITGGGFYENIPRIFGKQKYTAVIRKGSWDIPPIFARIAAGCYNAGCSGPLAQRQGAELLKVDAALQKQMFNTFNMGVGFVLALSPADVKAAKEHLDNCGFPSWEIGYVKKPPGISAI

SEQ ID NO: 29039 - DNA, 636 bp, Unknown
  Obtained from environmental sample
  misc_feature (1)..(636): n is a, c, g, or t
atggcatccgaatcaaaagtaaaaattatggtccttgtttcgggcggcgggacaaatctacaggccctgcttgacgcgcagaaaaatggggcgttcggttccggcgactcagggggtgaaatcgtccttgttgtgtcggacaatccaaaggcttacgcgttggatagggcaaaatccgccggagtcgcggtggctgtggaggagcctgacaggaacatccccaaagataaacgccggcaggaactgtcggatcgcattctgatgttagctgaaacttaccgtattgatcttattgttctggcgggtttcctttcgattctgaaaggggagatcgtcaggtgctattcaggcaggatcatcaacctgcacccaagcctgctgcctaaattcggtggtgacggaatgtacggcagccgtgtgcaccgcgccgtgctggaggccggagaaaaagaatccggctgtacggtgcatcttgtagacgccggtgtcgataccggccccatacttttgcagcgcaaggttccggtgctgtcagacgacacgccggatactcttgctgacaggattcatgcggaagaacatatcgctattgtggaagcggtaaagataatggttgagcgaataaaaaacaattaa

SEQ ID NO: 29040 - protein, 211 aa, Unknown
  Obtained from environmental sample
  DOMAIN (7)...(201): Formyl transferase
  misc_feature (1)..(211): Xaa is any amino acid
MASESKVKIMVLVSGGGTNLQALLDAQKNGAFGSGDSGGEIVLVVSDNPKAYALDRAKSAGVAVAVEEPDRNIPKDKRRQELSDRILMLAETYRIDLIVLAGFLSILKGEIVRCYSGRIINLHPSLLPKFGGDGMYGSRVHRAVLEAGEKESGCTVHLVDAGVDTGPILLQRKVPVLSDDTPDTLADRIHAEEHIAIVEAVKIMVERIKNN

SEQ ID NO: 29041 - DNA, 486 bp, Unknown
  Obtained from environmental sample
  misc_feature (1)..(486): n is a, c, g, or t
ttgaacgaggactttggcggaatgcccataggcagggctcttctggaaccaacgcgcctgtatgttaaacctgtgttaagtttgatggaaaaaattgaggtacatggcatggcccatatcacgggcggcggcttctacgaaaacatcccgcggatttttgcccagcgtaaatataccgcggtgattcgggaaggctcatgggatattccgccgattttcgcaaggcttgccgcgggatgttataacgccggcaactcaggcccgctggcccaggagtttggggctgaactgcttaaaaatgacgcggcgttaaaaaaacaaatgtttaatacctttaacatgggcataggtttcgtgcttgcccttgcgccggctgacgtcacagcggcgaaagagcatttagacaacagcggttttccttcccgggaaatcggctatgttgaaaaaaacgacgggaataacgcgcagggactgcgtatacaataa

SEQ ID NO: 29042 - protein, 161 aa, Unknown
  Obtained from environmental sample
  DOMAIN (2)...(158): AIR synthase related protein, C-terminal domain
  misc_feature (1)..(161): Xaa is any amino acid
MNEDFGGMPIGRALLEPTRLYVKPVLSLMEKIEVHGMAHITGGGFYENIPRIFAQRKYTAVIREGSWDIPPIFARLAAGCYNAGNSGPLAQEFGAELLKNDAALKKQMFNTFNMGIGFVLALAPADVTAAKEHLDNSGFPSREIGYVEKNDGNNAQGLRIQ

SEQ ID NO: 29043 - DNA, 636 bp, Unknown
  Obtained from environmental sample
  misc_feature (1)..(636): n is a, c, g, or t
atggcaagatacacaggccctgtttgcagaatgtgccgtgtagaacagaaaaaattaatgctcaaagggaaccgttgcaagagcagcaagtgtccgattgataagaagcgccccgcgcccggaaaagatccgaaaggacgggcgggcaagcgttccgattacggaatacagcttagggaaaaacaaaagcttaaaagaatttacggcatgctggaaaaacaattcagccttttctttaagcgcgctctgcgtatgccgggtattaccggcgagaacctttttgtattgctggaaagacggcttgataacgtggtttaccgtatgcgctttgcttcgtcaagaactcaggcaagacagcttgtactgcacggccatgtgcttgtaaacggcagaaaaataacgataccttcatatattgtaaaccctgaaaatgaaatcagcattgcggaaaaaagcaagaacatgacggttattaaggattctcttagggaattcggcaagtcgggcgttatgccctggctcagccttgatcctgacgcgatgaaagggaagttccttgcgtctccgcgcagaagcgatattaccgatcttggggatattaaggaacaaatgattatagaattatattcaaagtaa

SEQ ID NO: 29044 - protein, 211 aa, Unknown
  Obtained from environmental sample
  DOMAIN (2)...(98): Ribosomal protein S4/S9 N-terminal domain
  misc_feature (1)..(211): Xaa is any amino acid
MARYTGPVCRMCRVEQKKLMLKGNRCKSSKCPIDKKRPAPGKDPKGRAGKRSDYGIQLREKQKLKRIYGMLEKQFSLFFKRALRMPGITGENLFVLLERRLDNVVYRMRFASSRTQARQLVLHGHVLVNGRKITIPSYIVNPENEISIAEKSKNMTVIKDSLREFGKSGVMPWLSLDPDAMKGKFLASPRRSDITDLGDIKEQMIIELYSK

SEQ ID NO: 29045 - DNA, 705 bp, Unknown
  Obtained from environmental sample
  misc_feature (1)..(705): n is a, c, g, or t
atgtttagatcgtcgtgcttctttgaagggaacgaacttcttcctcatttagctactagaggagataataattatattagacagctattgcccagaggtagtgtagaaattcgttctgaaaaaggatcccaggcattacgaaacgcatctgaaagaggtaaattagacaccgttcaattgcttgtcgaaaatggcgtaaatgtcaacgcaagggattccgatggaagtactgcattatcattggcgtatgacaaaggcgaaatggacatctacgattaccttaaatccaaaggtgcaagggactttgagccacgccaagttactcaacagcctacacagccagccgcaccagcgcaatcgacaaccaacgtgtatgtacagccgtccgctccagcgcagtctgcgcccacgcaaccagccccaaggccgacggcaccgacgcttcgcccgggcagatatgcctatagcggttctaatgtaacaatggatattgcttcgccgttaacaatgataacactttacagcggttatacggcagtcgccgttggaaactataccataaacggcaacacccttgttatatcaatattacgagccagcagtgacgattacaaatttatggtgggcaggacttatgactatactattacaagcgactcgtcattttcaggccagggcgaaagatgggtaaggacggggaattaa

SEQ ID NO: 29046 - protein, 234 aa, Unknown
  Obtained from environmental sample
  DOMAIN (41)...(73): Ankyrin repeat
  misc_feature (1)..(234): Xaa is any amino acid
MFRSSCFFEGNELLPHLATRGDNNYIRQLLPRGSVEIRSEKGSQALRNASERGKLDTVQLLVENGVNVNARDSDGSTALSLAYDKGEMDIYDYLKSKGARDFEPRQVTQQPTQPAAPAQSTTNVYVQPSAPAQSAPTQPAPRPTAPTLRPGRYAYSGSNVTMDIASPLTMITLYSGYTAVAVGNYTINGNTLVISILRASSDDYKFMVGRTYDYTITSDSSFSGQGERWVRTGN

SEQ ID NO: 29047 - DNA, 735 bp, Unknown
  Obtained from environmental sample
  misc_feature (1)..(735): n is a, c, g, or t
ttgagtgccgttggcgcagggcctgtggggatgctcattgcctttgtggtctcaatgatcgtctgcgctgcttttggtatctctattgagcgccttgcctaccggccgctccgttccgcgccgcgtctaaattccctgattacagctattgccgtcagtttgattctggaaaacggcgcaagggttattccctttatcggccccaatccacggcaatttccgcgccctgcggtagttaatatcaaaattgccggagagctttctatctcaaacatacagattatcgttataattctctcggcgctattgatgattgcgttgaactacatcataaattacaccaaacgcggcaaggcaatgcgggcagtctcttttgatatgcaggctgcaagccttatgggaatatcagtaaacgggatcatctcctttacgtttgcgctaggatcattcctggcggcagcagggggcgttctttacgcttcggcttatccccagataaacccattgatgggcatgatgcccggcctcaaggcctttgtcgcggcggtgcttggcggtattggcgtagttcccggggcgatgctcggcggctttattttgggcattgctgaaacttttaccaagggatttatttccagccagttcagcgacgcgatctcattttcgattttgattattgtcctattaatcaggccgaccggcatacttggcaaaaaagtaagggtaaaggtttga

SEQ ID NO: 29048 - protein, 244 aa, Unknown
  Obtained from environmental sample
  SIGNAL (1)...(23)
  DOMAIN (1)...(228): Branched-chain amino acid transport system / permease component
  misc_feature (1)..(244): Xaa is any amino acid
MSAVGAGPVGMLIAFVVSMIVCAAFGISIERLAYRPLRSAPRLNSLITAIAVSLILENGARVIPFIGPNPRQFPRPAVVNIKIAGELSISNIQIIVIILSALLMIALNYIINYTKRGKAMRAVSFDMQAASLMGISVNGIISFTFALGSFLAAAGGVLYASAYPQINPLMGMMPGLKAFVAAVLGGIGVVPGAMLGGFILGIAETFTKGFISSQFSDAISFSILIIVLLIRPTGILGKKVRVKV

SEQ ID NO: 29049 - DNA, 957 bp, Unknown
  Obtained from environmental sample
  misc_feature (1)..(957): n is a, c, g, or t
atgaagaccgtgcaaatgatccgctttctttcggcgcacggcgcggaccccaacattccggcggaagacggcagtaccatgctgtggaaccagtgtaacaaaggctatccaatagaaataatgaaaacgctgttggaaatcggagccgaccccaatcaaacaagcgaagacaacgaagccgaatggacgccgcttgcgtactgcttactgcccggtttcgccgaagacaaagacggcaatccaatcgaaaaccaatatcttcctatagaaaatgaatcaatagaaaaagccaaactgttactcgatcacaacgccgatgcgaacctcgcaaacccctccttccccgataatccgccgctaatgctcgccgtcaaattcgccgtcaggcaaattgacaacacggagaaccttcaacctttggatataaagctatttgaacggctgcttaaaaagggcgcagacccgaacttcaccgacagcaacggcaatacggcaatgatattagccctcgaaagaggaatgggaaaactgtcggaattatcattcacagacggcggacactacgaaggccattttgtagacggaaaattacaaggcaaagggaaatatacaaacaaaagcggcgatatttacgaaggcgattttgtagacggcaaattccacggcaaaggaaaatttacaattccggacgaccatgaatatgaaggagattttgttgaaggcgcgtttcaaggaaaaggaaaatggataaacttacgttacgatgacatttatgaaggggattttttcaaaggcagaagacacggtaaagggaaaattatatacgccgacggcagagtttacgaaggcgaatgggccaaaggaagctggaacggccacggcaaaatgatctatgctgatgacagaatcgaggaaggcgaatggaaagacggaaattttgtagggaaggaggaatga

SEQ ID NO: 29050 - protein, 318 aa, Unknown
  Obtained from environmental sample
  DOMAIN (281)...(303): MORN repeat
  misc_feature (1)..(318): Xaa is any amino acid
MKTVQMIRFLSAHGADPNIPAEDGSTMLWNQCNKGYPIEIMKTLLEIGADPNQTSEDNEAEWTPLAYCLLPGFAEDKDGNPIENQYLPIENESIEKAKLLLDHNADANLANPSFPDNPPLMLAVKFAVRQIDNTENLQPLDIKLFERLLKKGADPNFTDSNGNTAMILALERGMGKLSELSFTDGGHYEGHFVDGKLQGKGKYTNKSGDIYEGDFVDGKFHGKGKFTIPDDHEYEGDFVEGAFQGKGKWINLRYDDIYEGDFFKGRRHGKGKIIYADGRVYEGEWAKGSWNGHGKMIYADDRIEEGEWKDGNFVGKEE

SEQ ID NO: 29051 - DNA, 984 bp, Unknown
  Obtained from environmental sample
  misc_feature (1)..(984): n is a, c, g, or t
gtggtcaacattgagagaatgcgcaacgtctttctggacgagcagatccgcaagcagaactcggaggtcggctacttcgcgcaggtcaactcgaccttcaaccgcatggaggccatcctttgcgagcccagcgacttgggcattatgcactacatggacgagttctttgactcatgggaaaacttggcgaacaaccccaaggacatctcggcgcgcacgatggtcagaaccaacgcccagatgatgatcgacaacttccacaaggccgccgcggagctcgctaacctacgcgagcagaagaacgaggagatcccggtgcacgtcgccaggatcaaccagatttcctacgagattatgaacctgaacaaagaggtggcgacggttgagataggcgatcagaacgccaacgacagccgcgataggcgagaggtgctgctgaaggagctatcgcagctcatagacataaccgtggtggagaacacgatggggcaggtaaccgtcaccacgggcggcaacgtcttggtcgcgccatcttacgtgcagaaccttgaggtcgtaacggtgtcgagggagatggacgacgggaccatcataagggacatgggcatccgcttctcggacacgcggctcgacttcataccggcgggcgggcagctccgcgggctcatcgacagccgcgacgtttacattcccgaatatcaggccaagctcgacgaactcgcggccgccgtcataaaagcggttaacgagatacatgtgcagggctacaacctaatggggcacagcgggtttaacttcttcgacgcttcggtctttgagaaaaaagacgacaggaccggcaagtcgacgtcgccgccgacctacctgcccaagtacaataccgccgcgacgatcaggctggcgccggagatactccaggacgtccagaacatcgcggccgcgtcggaacagcagtcgatcagcaggggaatgccgctacggtga

SEQ ID NO: 29052 - protein, 327 aa, Unknown
  Obtained from environmental sample
  misc_feature (1)..(327): Xaa is any amino acid
MVNIERMRNVFLDEQIRKQNSEVGYFAQVNSTFNRMEAILCEPSDLGIMHYMDEFFDSWENLANNPKDISARTMVRTNAQMMIDNFHKAAAELANLREQKNEEIPVHVARINQISYEIMNLNKEVATVEIGDQNANDSRDRREVLLKELSQLIDITVVENTMGQVTVTTGGNVLVAPSYVQNLEVVTVSREMDDGTIIRDMGIRFSDTRLDFIPAGGQLRGLIDSRDVYIPEYQAKLDELAAAVIKAVNEIHVQGYNLMGHSGFNFFDASVFEKKDDRTGKSTSPPTYLPKYNTAATIRLAPEILQDVQNIAAASEQQSISRGMPLR

SEQ ID NO: 29053 - DNA, 510 bp, Unknown
  Obtained from environmental sample
  misc_feature (1)..(510): n is a, c, g, or t
atgaaagatttgcgcattgagacatcctgcgacgagtgtgccgctgcgattgttgaagacgggaaaagaatactctccaatgtagtggctacgcaaatcccctttcatgcggcctataacggcgtggtgccggagatagcttcaaggaagcacacggaatggatagtccgcgtggtagaggaagctctggacaaagctcaaatgaaagtctgcgatgtggatgccgttgccgctgccgcccatccggggcttttgggttctttgctggtgggtttgaagtttcgccaaagctttttgcatggggccaagggggtataccattcgttgctggggatcatatgctggcccatctttacccaccccggctggataaggcaaaaatccaaaaatccctttttgggacatcctgtttcagggggaacaccccttatttttccccgcccaaaattttgggggaatttacccttttggggggaacaaataataaatccttttgaaaaacccctttaa

SEQ ID NO: 29054 - protein, 169 aa, Unknown
  Obtained from environmental sample
  DOMAIN (23)...(169): Glycoprotease family
  misc_feature (1)..(169): Xaa is any amino acid
MKDLRIETSCDECAAAIVEDGKRILSNVVATQIPFHAAYNGVVPEIASRKHTEWIVRVVEEALDKAQMKVCDVDAVAAAAHPGLLGSLLVGLKFRQSFLHGAKGVYHSLLGIICWPIFTHPGWIRQKSKNPFLGHPVSGGTPLIFPRPKFWGNLPFWGEQIINPFEKPL

SEQ ID NO: 29055 - DNA, 483 bp, Unknown
  Obtained from environmental sample
  misc_feature (1)..(483): n is a, c, g, or t
atgtctacaattcaatttgattttaacgaacccgaacgctttaacatgacctttgtagatacggacggccagcacaaacgcccgtacatgatacatcgcgcgctttttggcagtattgaaagatttttcggcgtgcttatcgaacactttggcggcgctttccccatttggattgcgccggagcaggccgcggttattcccgtatcggaagtgtttaacgattacgctaaaataacagccgcttctcttaaatcgcgcgatttgcgcataacggcagaacttggcgatgagcgcatgaacgctaaaatccgcgactgccaaacgcgaaaaattccctatatgctagttgtaggacaacgcgaagccgatgaaggcacggtatcgatccgtatgcgtgacggaaaacagcttgcggcgatgaagattgaggattttgccgaatatgttcatgaaaagatagaaaacaaatctttagaattgtaa

SEQ ID NO: 29056 - protein, 160 aa, Unknown
  Obtained from environmental sample
  DOMAIN (62)...(152): Anticodon binding domain
  misc_feature (1)..(160): Xaa is any amino acid
MSTIQFDFNEPERFNMTFVDTDGQHKRPYMIHRALFGSIERFFGVLIEHFGGAFPIWIAPEQAAVIPVSEVFNDYAKITAASLKSRDLRITAELGDERMNAKIRDCQTRKIPYMLVVGQREADEGTVSIRMRDGKQLAAMKIEDFAEYVHEKIENKSLEL

SEQ ID NO: 29057 - DNA, 390 bp, Unknown
  Obtained from environmental sample
  misc_feature (1)..(390): n is a, c, g, or t
atggacaggactgttaagatacttgattttttagcatctaacaaaactgtaaaaatttccctacttgccgagttacttgacgtttctaatgtaacgttacgcaaagatttggataatcttgaaaaacgaggcattattcgcaagacccacggttacgcgagtctggaaggcgcggatgataccagcaaacggatggcgtttaatcattcgattaaacgaagaatcgccaaagccgcggttgaaatagtcgatgaaggcgaaacaattttacttgaatcaggctcgtgttgcgcngtatttgccgaggaactcacngctgcccgaaaaaacatttacatcgtcacaaattcgatttttattgcaaactatgtttgtaaaatgcaaatataa

SEQ ID NO: 29058 - protein, 129 aa, Unknown
  Obtained from environmental sample
  DOMAIN (3)...(53): HTH domain
  misc_feature (1)..(129): Xaa is any amino acid
MDRTVKILDFLASNKTVKISLLAELLDVSNVTLRKDLDNLEKRGIIRKTHGYASLEGADDTSKRMAFNHSIKRRIAKAAVEIVDEGETILLESGSCCAVFAEELTAARKNIYIVTNSIFIANYVCKMQI

SEQ ID NO: 29059 - DNA, 549 bp, Unknown
  Obtained from environmental sample
  misc_feature (1)..(549): n is a, c, g, or t
atgcgcgtttatgccgagaaagaacctgcgcgtcgtgatgtccctcaatattctatgcaggcggtttttgaagcagttgtgaacgcggttgcacaccgtgattattcaataacagcgtcaaaaatacgattgcatcttttttctgacagacttgaaattctgtctccaggttcaattcccaatacaatgactatagatacattgcccttgcggcaggccacgcgaaacgaattattagccagtatgcttgcccgtagtcccgcagaaacatccggcaatgatggaacacgtcatttctttatggaaagacgaggcgagggaatacctataattcttgcggaaagcatgaaattatccgggagacttcccgaatatcgcttattaaatggaaacgaattattattaactatatataccgctattattcatgcaaatgacggagatgggtttttccaacgaacagatacaaactgtaaccggatgaaaaaagaaaagattggggatgtcacaagagcggcagtatctcctcccatactgagtacagaatag

SEQ ID NO: 29060 - protein, 182 aa, Unknown
  Obtained from environmental sample
  misc_feature (1)..(182): Xaa is any amino acid
MRVYAEKEPARRDVPQYSMQAVFEAVVNAVAHRDYSITASKIRLHLFSDRLEILSPGSIPNTMTIDTLPLRQATRNELLASMLARSPAETSGNDGTRHFFMERRGEGIPIILAESMKLSGRLPEYRLLNGNELLLTIYTAIIHANDGDGFFQRTDTNCNRMKKEKIGDVTRAAVSPPILSTE

SEQ ID NO: 29061 - DNA, 864 bp, Unknown
  Obtained from environmental sample
  misc_feature (1)..(864): n is a, c, g, or t
atgaatataaatttttttataagggcaatagaaaaacaaaaactgaactgcgaaggtatcatcgtattgcagcacggggaaaaagtcgcggaacaccgctggataccggaagctccaaggaattcgttttctgtcagcaagagttttgtttccattgccgttggtatggcgatagaccgggggaaaatttcgcttgacagccgcatcgcggatttttttccggaatactgccgtaaagcgggtaagcggctttccgttttgactcttgagcatcttttatccatgaccagggggcacagagcgttttcccgtccccctatggtcgtcgatgccataactcagccgcttgcttaccagcccggcgcgcattttgtttacgacaacggcagcactttccttgcctccgccatgttcacaaaggcaatgggactaactgtgcgagaatttctgcttgacgcgctgttccgtcccctggacattcccgatccccaatggccggaaagttcggacggacacactgtcggcgctaccggtctagcgctcgctacatcaagccttgcccgtttcggccagttcctgctccggcgcggccaatggcagaacaggcagttggtttcttccgcgtggatcgacaacgccgcccggccccaggcaaatacccgctcgcgcagacctgactgcgatattggctacggctttgggttttggccctgccgccatggctgttttcgcgccgacggcaaagacggtcaattcgtcgtgatccttccccggcaggacgctgtggttgcaatcaattcaaacgaagaaaagccctatcctattctgtactcagtatgggaggagatactgccgctcttgtga

SEQ ID NO: 29062 - protein, 287 aa, Unknown
  Obtained from environmental sample
  DOMAIN (7)...(286): Beta-lactamase
  misc_feature (1)..(287): Xaa is any amino acid
MNINFFIRAIEKQKLNCEGIIVLQHGEKVAEHRWIPEAPRNSFSVSKSFVSIAVGMAIDRGKISLDSRIADFFPEYCRKAGKRLSVLTLEHLLSMTRGHRAFSRPPMVVDAITQPLAYQPGAHFVYDNGSTFLASAMFTKAMGLTVREFLLDALFRPLDIPDPQWPESSDGHTVGATGLALATSSLARFGQFLLRRGQWQNRQLVSSAWIDNAARPQANTRSRRPDCDIGYGFGFWPCRHGCFRADGKDGQFVVILPRQDAVVAINSNEEKPYPILYSVWEEILPLL

SEQ ID NO: 29063 - DNA, 597 bp, Unknown
  Obtained from environmental sample
  misc_feature (1)..(597): n is a, c, g, or t
atgaaaaaaggcaaatttcgtctaataattctaatttcaatttttgcggtttttacagtgatccttactgttgttttttggccttttattcaggatttaaataatattgaataccgtgaaaattttacactttgggttaagtctttgggatttttgggtatagccgttatgcttggtatccagattctgcagattattatagcggtaattcccggcggtccggtgcagattatggccggaatggcttacggcgcatggggagggctttctgtccttttaacaggatgcgttttaacaacaacaataattttttttacagtaagaaaattcgggctgcctttattaaggcgttttttcggcgaggaagatatcaatacatggaagtttctaaaagattcccgtaaatcagcccgtcttatttttatcctgtttcttgttcccggaaccccaaaagatttgcttacatggcttacgcctcttacaaatatttctcttcctgcatttgttattttatcaacacttgccagaattcccgcaatactgatatccaccataatgggagattccatcggcacgagctcggccaatctgtcatga

SEQ ID NO: 29064 - protein, 198 aa, Unknown
  Obtained from environmental sample
  SIGNAL (1)...(19)
  misc_feature (1)..(198): Xaa is any amino acid
MKKGKFRLIILISIFAVFTVILTVVFWPFIQDLNNIEYRENFTLWVKSLGFLGIAVMLGIQILQIIIAVIPGGPVQIMAGMAYGAWGGLSVLLTGCVLTTTIIFFTVRKFGLPLLRRFFGEEDINTWKFLKDSRKSARLIFILFLVPGTPKDLLTWLTPLTNISLPAFVILSTLARIPAILISTIMGDSIGTSSANLS

SEQ ID NO: 29065 - DNA, 846 bp, Unknown
  Obtained from environmental sample
  misc_feature (1)..(846): n is a, c, g, or t
gtggcaaaaagcgtcgtcattcgcgaaaagcttgagattgtcgagagggttgcaataacagattcgtcggttcttcttttgggggaaagcggggtaggcaaggaaatttttgccgagcagattcacatgaaaagcgcccgcagcgacaagccttttgtaaaggtaaactgcgccgccattcccgaagggcttttggaaagcgagcttttcggccatgttaagggcgcttttaccagcgccgtttcttcaaggcacggccgctttgaactcgcgaacgggggaacaatctttcttgatgaaataggggaactgccgcttggccttcaggcaaaactgctccgggtaattcaggaaaagacttttgaaaaagtagggtctgatgagactataaccgtagacgtgcggattctggcagcaacgaatcgcgatatagaaaaacaggttgaagatggcgagttccgcagtgatttatattatagactgaacgtgcttcctatttatataccgccattaaggcagagggtagaagatattccggaactagcggaaatgtttctaaaaaagtatattaaagaaaccaaaaaccagataacaggtttttcgcaggaagcgatggagaccatgctttcctattcctggccgggtaatatcagggaattgggaaattgcgttgaaagggcctgtatcatcgggaaggggaaaaaaattgaacctgaggatcttttccttaaatcgccggtacagcatatatttccggcagacggaagcagaaacctgaaaaacgccgagaatagtttcagggcctgttatataaagcaggtgctggaagaaaacaactggaattag

SEQ ID NO: 29066 - protein, 281 aa, Unknown
  Obtained from environmental sample
  DOMAIN (23)...(169): ATPase family associated with various cellular activities (AAA)
  misc_feature (1)..(281): Xaa is any amino acid
MAKSVVIREKLEIVERVAITDSSVLLLGESGVGKEIFAEQIHMKSARSDKPFVKVNCAAIPEGLLESELFGHVKGAFTSAVSSRHGRFELANGGTIFLDEIGELPLGLQAKLLRVIQEKTFEKVGSDETITVDVRILAATNRDIEKQVEDGEFRSDLYYRLNVLPIYIPPLRQRVEDIPELAEMFLKKYIKETKNQITGFSQEAMETMLSYSWPGNIRELGNCVERACIIGKGKKIEPEDLFLKSPVQHIFPADGSRNLKNAENSFRACYIKQVLEENNWN

SEQ ID NO: 29067 - DNA, 702 bp, Unknown
  Obtained from environmental sample
  misc_feature (1)..(702): n is a, c, g, or t
atgatggcagcgagacttacccaaagcgaagatgaattaactttcagtgaaaaaatcggtgaattaatccagagaaacaggacgcaattattggccgggcttggcgccgtttttttgatcattgcaggtttcgtaattgttagtgtggtaagagaaaaaagcctgtcaaacgctttgagcaaagtagacgctctaaaccgcaggtatcaggatttaaaggaaagtatttcaggcgaagaagaaatgagcctctcacagatatcggaactcgctgttttattggcggatattaccgcatttgaaaacaataattccggatttgccgtagcccgcgcttatattataagcgccaatatatacacggatcaaaaaaactgggaattggcggaagaaaaatgggtaaaagccgcggaagccgcttcaaaaagccaccttgcgcccatcgccatttataacgccgctgtagcggcagaagagcgggaaaatattgaaacggccattgcttattataccagggcggcagattacggagattctttttcgtcagccgcaagagcgcaatttgccgtaggacggcttgaagaatcccgcaacaacaaggattccgcaattgcggcctacaggaatttgctggccaggtggcctgacgatccggtttggccgaatctggcccagaaccggttgttgattttatcggactag

SEQ ID NO: 29068 - protein, 233 aa, Unknown
  Obtained from environmental sample
  misc_feature (1)..(233): Xaa is any amino acid
MMAARLTQSEDELTFSEKIGELIQRNRTQLLAGLGAVFLIIAGFVIVSVVREKSLSNALSKVDALNRRYQDLKESISGEEEMSLSQISELAVLLADITAFENNNSGFAVARAYIISANIYTDQKNWELAEEKWVKAAEAASKSHLAPIAIYNAAVAAEERENIETAIAYYTRAADYGDSFSSAARAQFAVGRLEESRNNKDSAIAAYRNLLARWPDDPVWPNLAQNRLLILSD

SEQ ID NO: 29069 - DNA, 582 bp, Unknown
  Obtained from environmental sample
  misc_feature (1)..(582): n is a, c, g, or t
ttgacgaacatgtcgaataacacgattattctgtgcggcatggtgctttcgcttttcctgagcgcgatcttaacaacaataagcgccgtcttttctgacgaccttcgccgcattgcgctgtggcagatgggaagttttgcgatgcggggttggacttatgtttatctcctgctgccgtttttcgcggcaggatgcgcgggggttttcctttatacaaaagaaatggacattttaagtttcggcgatgatcacgcaaaatccgccggagtggaaacaggagctctgcgcataaagctgtttgccctttgcgcaatactgacaggcgcggcagtcgctctttgcggcgttatcggttttgtagaccttattgcacctcacgcagcgcgccggttaagcggttcgcagcacaggtatttaatccccatgtcttttattctcggcggctcattgatggttctgaccgaccttatcgcaaggacagttatctctccttcggaacttcccgtaggcgcaattaccgccctaatcggtgcgcctttctttgcgtgggtctactttaaaagacgcaaagtatcgcaatga

SEQ ID NO: 29070 - protein, 193 aa, Unknown
  Obtained from environmental sample
  SIGNAL (1)...(28)
  DOMAIN (1)...(187): FecCD transport family
  misc_feature (1)..(193): Xaa is any amino acid
MTNMSNNTIILCGMVLSLFLSAILTTISAVFSDDLRRIALWQMGSFAMRGWTYVYLLLPFFAAGCAGVFLYTKEMDILSFGDDHAKSAGVETGALRIKLFALCAILTGAAVALCGVIGFVDLIAPHAARRLSGSQHRYLIPMSFILGGSLMVLTDLIARTVISPSELPVGAITALIGAPFFAWVYFKRRKVSQ

SEQ ID NO: 29071 - DNA, 834 bp, Unknown
  Obtained from environmental sample
  misc_feature (1)..(834): n is a, c, g, or t
gtgcgcctttctttgcgtgggtctactttaaaagacgcaaagtatcgcaatgagggcatcgttatgaatacatcggctatgatcgaagttaaaaatctgtcggcgggttacaacggcgttgacgttatccgcaacatcagctttaaggcggagaagagagagagtctctgtatattggggccgaacagcagcgggaaaagcactctgcttaaatcaattgcgcgtatcattgattaccgggggcaggttctgctggaaggcagggatgcggcgttatttccccgcagggagttcgcanaaaaaaccgctatgctgagccagagtacgcaggtattttttccctacactgtttacgagactgtatcaatgggacgttacgcgtattcgcagggcttcttgaaaaacatttccgccgaagacagaactattatcgaaaatattttaaaaaaactcgacatttgggaaagcaaagaccgcatgatcgacgaattaagcggcggagaattgcagagggtatttctggcgagaactttggcgcaaagccctgagttgattttacttgacgagccgagcaatcatctcgacttaaaacatcaaattgaactgctcaaatacttaaaggagtgggtcaaggagaacaacaagactttaatcagcgtgtttcatgatctaaatcttgcgcgtcttttcggcgacacggcgattgttttgaataacggaacgttagccgcaagcggaagtatagaagaagttttaaacggcgggatattaagcgaggtttacgggattgatattcgcgggtttatgcagggagcgctggagaggtggaagtag

SEQ ID NO: 29072 - protein, 277 aa, Unknown
  Obtained from environmental sample
  DOMAIN (53)...(240): ABC transporter
  misc_feature (1)..(277): Xaa is any amino acid
MRLSLRGSTLKDAKYRNEGIVMNTSAMIEVKNLSAGYNGVDVIRNISFKAEKRESLCILGPNSSGKSTLLKSIARIIDYRGQVLLEGRDAALFPRREFAXKTAMLSQSTQVFFPYTVYETVSMGRYAYSQGFLKNISAEDRTIIENILKKLDIWESKDRMIDELSGGELQRVFLARTLAQSPELILLDEPSNHLDLKHQIELLKYLKEWVKENNKTLISVFHDLNLARLFGDTAIVLNNGTLAASGSIEEVLNGGILSEVYGIDIRGFMQGALERWK

SEQ ID NO: 29073 - DNA, 570 bp, Unknown
  Obtained from environmental sample
  misc_feature (1)..(570): n is a, c, g, or t
atgtatgcanaggggagcgcganctggcaggggcaaacanaagccctgggcgctttcgatttgatgaccctgccgccgatgccagcgggagtgccgcagatagaggtctctttcgatatagactcaaacggaatagtgaaagtcgcggctgttgatttgacgacaaaggccgagcagacgatgaacatccagcccagctcggggctaacggagtttgaaatccagcggatggtcagggacgcagaagaatatgcagaacaggacagccgcaggaagagcgagctgcagtacatagcgagctttgacgggctgctctttgccattgaaaaggcgttccatgattttggcaagagcctctctgaggaaaagcaaaaggaaatcagcggcctgcttgcgacgcttaggtcggcggcggcgctaaaagatgttccagctatgagagggaacgaagccaggctattagaggcccaggacttgctgacttctgccgcaatcgcgtccagcgaggacaacgtatccttcattgaaaccgatggcgacgatgcgcccatcggcagtgaaatcgtgtag

SEQ ID NO: 29074 - protein, 189 aa, Unknown
  Obtained from environmental sample
  misc_feature (1)..(189): Xaa is any amino acid
MYAXGSAXWQGQTXALGAFDLMTLPPMPAGVPQIEVSFDIDSNGIVKVAAVDLTTKAEQTMNIQPSSGLTEFEIQRMVRDAEEYAEQDSRRKSELQYIASFDGLLFAIEKAFHDFGKSLSEEKQKEISGLLATLRSAAALKDVPAMRGNEARLLEAQDLLTSAAIASSEDNVSFIETDGDDAPIGSEIV

SEQ ID NO: 29075 - DNA, 966 bp, Unknown
  Obtained from environmental sample
  misc_feature (1)..(966): n is a, c, g, or t
atggcgagaaccgcgcctaggcgatttcggcgttcttttagaacaaacaaccagtttgactgcatcgaagaagcttttttagcggcaaacattccgtacagggtttcaggcggattcagttttttcgagcgcaaggaaatcagggacatactttcctacctccgagtaatcgccaatcacgacgacgatgtaaacctgcttaggataatcaacacgcccaggcggggcataggcaaggccagtatccgaaacgccgcggagcttgcgaagaaaaaccattccagtatatacgacgctctgtaccgaaccagtctcgtaaaaaacgcggaactaataataaaagaacatgagaaggcgagcggcatagaagaattcgtcgagcttattcaaagttcaagagacgagttcttttcgattggagagctttcaaaaaaagtccacggccttgtcaataaaattgactactggggctacctggtaaacgaacacggcaaggacgaaaaaaaagccaggtggaaatacgcaaatatcgaatacctcattgaaatgataaaaaactgggaaaatgatccggacatttttgataaggggctttacgcctacctgaaccgcgtcagccttttaacaagaacagacggcgaagaagatcgaaacgacgcttctataaaaaacggaggcaaggtaaacctcatgacaatccacgctgccaagggccttgaatttcccgtggtgttcatagccggcgcggaggaaggcattattccccacgaaaggagcctcgaagacgaggggctttccctttcacaaggcgcgaatccggtcgaagaggaacggcgccttttctacgtggccatcaccagggctcaggacaagctttacatcacaagctgccaacagcgaaaccgcangggagggtccagcgatcgccagccttcccctttctgggcgaaatcaatccggatctga

SEQ ID NO: 29076 - protein, 321 aa, Unknown
  Obtained from environmental sample
  misc_feature (1)..(321): Xaa is any amino acid
MARTAPRRFRRSFRTNNQFDCIEEAFLAANIPYRVSGGFSFFERKEIRDILSYLRVIANHDDDVNLLRIINTPRRGIGKASIRNAAELAKKNHSSIYDALYRTSLVKNAELIIKEHEKASGIEEFVELIQSSRDEFFSIGELSKKVHGLVNKIDYWGYLVNEHGKDEKKARWKYANIEYLIEMIKNWENDPDIFDKGLYAYLNRVSLLTRTDGEEDRNDASIKNGGKVNLMTIHAAKGLEFPVVFIAGAEEGIIPHERSLEDEGLSLSQGANPVEEERRLFYVAITRAQDKLYITSCQQRNRXGGSSDRQPSPFWAKSIRI

SEQ ID NO: 29077 - DNA, 576 bp, Unknown
  Obtained from environmental sample
  misc_feature (1)..(576): n is a, c, g, or t
atgaacgggccatccatgagcctatgcgcatttgaagcggactgtttcggccgtttttggcatgaggggagtttgtttatcgaagcccttttcagggaaggggcgaaaaacgaggatgctctatttatgactccttccgagtacctctgcaaactggattcttcttcagttcaggcgctgatgcctgaattttcctcctggggaacaaacggttattcggagacctggcttgacgcttcaaacgactggatgtaccgccacacgatgagggcgttggacagaatggtagagctggtagatcgctttccgaacaataacggattaaaagagagggcgctgaaccaggcggcaagggaaattctcctggttattgcttcggactggtccaagatgctttataagcaggagtgcgtcgattatgccagaagccgcattgaaggctcgcttaggaatttcacgactatctatgaggcgcttggaagcaactatatcagcaccgaatggctgacccagctggaaaggcgcaataatatttttcctaatattaattaccgggttttcaggcgcaggcaataa

SEQ ID NO: 29078 - protein, 191 aa, Unknown
  Obtained from environmental sample
  misc_feature (1)..(191): Xaa is any amino acid
MNGPSMSLCAFEADCFGRFWHEGSLFIEALFREGAKNEDALFMTPSEYLCKLDSSSVQALMPEFSSWGTNGYSETWLDASNDWMYRHTMRALDRMVELVDRFPNNNGLKERALNQAAREILLVIASDWSKMLYKQECVDYARSRIEGSLRNFTTIYEALGSNYISTEWLTQLERRNNIFPNINYRVFRRRQ

SEQ ID NO: 29079 - DNA, 885 bp, Unknown
  Obtained from environmental sample
  misc_feature (1)..(885): n is a, c, g, or t
atgcttgatcagtacaaaacagcccttttacatcagaacgatgatccgcaagccgtattctcgcgtgaattaacaaaaatgctttacaataaccatccgctttttaagcctcttgaatatgacgatatcgccaaggtttccattaaagacgcggatgattttttaaaacggtacattaaccccggtgattatacttttgtgtttacaggtaacgtagatcttaatgtcatacgcgaactgtcgtccgtctacattggttccattcctgtttcccagtcgatgaacaactggcataatcccggattaaaacgctctactgaaggcagaagaacaatttataagggaaaagatgataagagtatggtctatcttagctggtatgcgaacggaccggcggatttcagcgaacagagaaatcaaaatgcgtcccttttgtccgaatatcttgagataattttaaacgatgaaattcgtgaaaaattgggcggagtatattcaatttcctcgggcgcgtcggtctcagtgattccatacggcgaatacagaatatacgtgtattttgtgtgtaatccttcccgcgtggaagaattaattaacgcggtacgcgatattttaaccggccttacaaaacagcctcttaatcaggatatatttaacaaatcaaaagaggccctgttaaaagaacatgaaagatctctccaaagaaatttgcacatagcgcagagttacgcgaattcatccgttctttacaacacgactctttcaaggcttaactcaagaccggaagcgataaaagcggttaccgctcaaagcgttcaatctctatgcagggaagccctatcttccggttccatgcaggttgttctgtttcctgagaaacattaa

SEQ ID NO: 29080 - protein, 294 aa, Unknown
  Obtained from environmental sample
  DOMAIN (45)...(225): Peptidase M16 inactive domain
  misc_feature (1)..(294): Xaa is any amino acid
MLDQYKTALLHQNDDPQAVFSRELTKMLYNNHPLFKPLEYDDIAKVSIKDADDFLKRYINPGDYTFVFTGNVDLNVIRELSSVYIGSIPVSQSMNNWHNPGLKRSTEGRRTIYKGKDDKSMVYLSWYANGPADFSEQRNQNASLLSEYLEIILNDEIREKLGGVYSISSGASVSVIPYGEYRIYVYFVCNPSRVEELINAVRDILTGLTKQPLNQDIFNKSKEALLKEHERSLQRNLHIAQSYANSSVLYNTTLSRLNSRPEAIKAVTAQSVQSLCREALSSGSMQVVLFPEKH

SEQ ID NO: 29081 - DNA, 534 bp, Unknown
  Obtained from environmental sample
  misc_feature (1)..(534): n is a, c, g, or t
atggcggaaacaggacaacaaaattatatcgacactctccagcagactcttttagcaagaaaagactggctggaaaagtctgaaatgggaaaacttaaggacgaactcaggatttttcaaatctcattcgcttccttgtataatatatatctaaaaaagaaagtaatagacgaggatccctataaacaggatacaaaaatcagtgagattgtagttcctgacgccagtagttttcaggaagcaaagagaatagagcaatgttctatcaggctctcaaactttgataatcaacttgactatttggttaatttttaccagttaaatgttgattatcttaaccttgaacgtataaaacggattgttgggcttgttcgttatatagactgggtaaatttttcgccggattcacaatccttaatgactaaatcggtcgctgaaatgaccaccaacgcanaagccggcgttgatccccttaccctcagtattataggtgaaagtctttccaagctttcaagaaaacttcctcctgcatga

SEQ ID NO: 29082 - protein, 177 aa, Unknown
  Obtained from environmental sample
  misc_feature (1)..(177): Xaa is any amino acid
MAETGQQNYIDTLQQTLLARKDWLEKSEMGKLKDELRIFQISFASLYNIYLKKKVIDEDPYKQDTKISEIVVPDASSFQEAKRIEQCSIRLSNFDNQLDYLVNFYQLNVDYLNLERIKRIVGLVRYIDWVNFSPDSQSLMTKSVAEMTTNAXAGVDPLTLSIIGESLSKLSRKLPPA

SEQ ID NO: 29083 - DNA, 780 bp, Unknown
  Obtained from environmental sample
  misc_feature (1)..(780): n is a, c, g, or t
ttgatagaagaaatcatcaaagaagattacaccgacagcggcgcggacttaagggaaacagtattaaacaccttaagggtcgctgagacaaagcaaaaagcggcaaaggctcccgtaaattttaaaaacatccttcttgacgggattattgttgttggcggcgcggcaacacagcttaccgaaatctgcggaaaattaaatgataaccaggctgtattggacagccgaaaaaaatctttttttgaggcaataaaagagttaataaggcagattacaaatgctgaaccggaagaagttatctacactgtggaatgtatggataataccaaaggcaccccggttaaggaaaaggtaaattttcatcaattgatggacgagatagacaaaaaaatcaggattttaagcagttttgtccggggtcccgcatataataaactttccgccatgacagaagagcaggttatcagctaccttgaaaaaaatattaaagatgtgcaggggtatcacagaatcttaagcgctatagatgattattttaaaacaaatgtgcggcaggaagaacggccgaaaattaaaggaattaaacctgagttatccgctttaaaaaatacttatataaaggccaaccagatgaggtatgaatacagcgctcaaaaagaagcggaagaacaaatgaaacggcttggagttaccacaggcgctcccgctcctgtccctgtaccgggttccgctcccgcctcgggcgcggcccaggccgctccgccggccccttcggcataa

SEQ ID NO: 29084 - protein, 259 aa, Unknown
  Obtained from environmental sample
  misc_feature (1)..(259): Xaa is any amino acid
MIEEIIKEDYTDSGADLRETVLNTLRVAETKQKAAKAPVNFKNILLDGIIVVGGAATQLTEICGKLNDNQAVLDSRKKSFFEAIKELIRQITNAEPEEVIYTVECMDNTKGTPVKEKVNFHQLMDEIDKKIRILSSFVRGPAYNKLSAMTEEQVISYLEKNIKDVQGYHRILSAIDDYFKTNVRQEERPKIKGIKPELSALKNTYIKANQMRYEYSAQKEAEEQMKRLGVTTGAPAPVPVPGSAPASGAAQAAPPAPSA

SEQ ID NO: 29085 - DNA, 834 bp, Unknown
  Obtained from environmental sample
  misc_feature (1)..(834): n is a, c, g, or t
atgcttgatgattggtttaacgcccgctctatttctgaaaaaagaactaattttaaagatatattaaaataccataatgcaagatataagaaagaattatattttaaagataattcggtaagcgtctgcgactgttattggatacaaacccctgatgaaaataaaaaatggaaagatattaatttttataattctattattgattttaatgaaaatatttatattggtattaaagaagcaaaagataaaattatccaagacaaagaaggaaggcgatcccctaatataatgtcaaatgggaatgtccctaaaatgtggatacaaaaaaatgaagaattataccttttaaaaggaagccaaggatatacatgggaagagccggttaatgaatctatcgtatctgattatatggatacattaggaataaaacatgtacagtattccttggatttgtcaaaaaaaagaccctttagcatatgtaaaaacatgctttcaaaaggcgaagatttaatacccgcctattatgtcgcttccttggaagaaaatgaagaatatcaatacacctataattcttatattgaaaattgtaaaaaactggggttggaaggcaatattaaacaagaactggatcaaatgcttttacttgattatattatttcaaatattgaccgtcattggtttaattttggcctgataagggacgcggaaactttacaaataaaaaaaattgccccaatttatgataatggcctttctttgtttgcaggcgaatttacngatgatataaaagacaaacataccgaagtagaatcggcaagttttttaaatatttaa

SEQ ID NO: 29086 - protein, 277 aa, Unknown
  Obtained from environmental sample
  misc_feature (1)..(277): Xaa is any amino acid
MLDDWFNARSISEKRTNFKDILKYHNARYKKELYFKDNSVSVCDCYWIQTPDENKKWKDINFYNSIIDFNENIYIGIKEAKDKIIQDKEGRRSPNIMSNGNVPKMWIQKNEELYLLKGSQGYTWEEPVNESIVSDYMDTLGIKHVQYSLDLSKKRPFSICKNMLSKGEDLIPAYYVASLEENEEYQYTYNSYIENCKKLGLEGNIKQELDQMLLLDYIISNIDRHWFNFGLIRDAETLQIKKIAPIYDNGLSLFAGEFTDDIKDKHTEVESASFLNI

SEQ ID NO: 29087 - DNA, 1275 bp, Unknown
  Obtained from environmental sample
  misc_feature (1)..(1275): n is a, c, g, or t
ttgattgccgagggcatggtcgccctctcgcggcagattatcgacgattcggcgatgattaaccttgtttcaatttttctggataatcacaaatggggcattgtaaagtatctttgcgaaagaatacttgactacggagaatcaaagttcgccctgcgcaccctcgcggactgttataaaaacgacaacgaggaagatcaggttttcgcagtttgggaaaggcttgtaaaagccgattttgaagaagcggacattacaaaagcccttgcggagcattttgaaaagcagggaaaaaaagaagaagccaacgattattacaaaaaggcgctgcaccgttacattaacaaatcaaatttcgcgaatgtgcgcgagatttgggacaaactgcttgtttcaaacgtggaagacattgatttcttcatgcacattcagaaaaaaatcgccaagacaatcagcgaggacaaagctgtagtcctgttaaacgatctttacgccaaatataaaaatattgacattgacaccgcgattattattttaaaaatcatccttgagtacgatgaaaaggacgtgcagggacgcagggaaattattgagtgtttcagaaaaaaatacgccgaacacagccagcttgaggaatacatacgcatatcaaacctttcccagaattaccgcgacgttcatcaggcgatatctgattttgaaaagcacatagcgtttgacaaggggaattacgtataccaccgcacatggggcgtaggccgcatcgcttcaataaaaagcgacgagatatgcatagatttctcgaaaaaacgcgggcacacaatgtcgcttaaaatggcggttgacgcgcttcaaactctttccaaaaaccatatctgggtgttaaaagcaaccaaaaagaaagaagaattaaaggacaaagtcaagaccgattttatctggacgcttaaaacaattataaagagttttgaaaacgcctgtgatatgaagaaaataaaggcagagcttacgccggcgctgctttccgccggcgaatggtctacatggaacagcaaggcgagagagatattaaaatcaaatccggaattcggggtaagcccggataacattgacatctttaccgtaagggacaggcctatcagcgtaacggaaaaatattacaatgaattttccgcccagaagaatttctttgaccgcatttccataatgcgcgatttctttaattcggaagaaatcagctctgattcggaatatttcattgaaatgctttcatag

SEQ ID NO: 29088 - protein, 424 aa, Unknown
  Obtained from environmental sample
  misc_feature (1)..(424): Xaa is any amino acid
MIAEGMVALSRQIIDDSAMINLVSIFLDNHKWGIVKYLCERILDYGESKFALRTLADCYKNDNEEDQVFAVWERLVKADFEEADITKALAEHFEKQGKKEEANDYYKKALHRYINKSNFANVREIWDKLLVSNVEDIDFFMHIQKKIAKTISEDKAVVLLNDLYAKYKNIDIDTAIIILKIILEYDEKDVQGRREIIECFRKKYAEHSQLEEYIRISNLSQNYRDVHQAISDFEKHIAFDKGNYVYHRTWGVGRIASIKSDEICIDFSKKRGHTMSLKMAVDALQTLSKNHIWVLKATKKKEELKDKVKTDFIWTLKTIIKSFENACDMKKIKAELTPALLSAGEWSTWNSKAREILKSNPEFGVSPDNIDIFTVRDRPISVTEKYYNEFSAQKNFFDRISIMRDFFNSEEISSDSEYFIEMLS

SEQ ID NO: 29089 - DNA, 672 bp, Unknown
  Obtained from environmental sample
  misc_feature (1)..(672): n is a, c, g, or t
ttgacggcgcttatgtcttctccagcggaaaaaatatgggcgtgtttaaggctgtcgggtttcccgaagatgtcgggcngtttttacaaactggaagaatatgagggctggtgctttactgctcacggacgttacccgacaaatactccaggctggtggggcggcgctcaccccttcgctctccttgattattcagttgtgcataacggcgaaatatcttcctacgatactaacagacgcgctatcgaaatgtacggctacaaatgtacgctgcaaaccgataccgaagttattacctacattattgattatctgcacagaaaacaaaaactttcttttgatgaaatcgcatcggtaatcgccgcttcattttggcagaccattgaaaaacagccggcgaaagaacgcgagattcatgagtatttgcgcgttatgttcagcgctcagcttataacgggtccgttctctatccttgtgggctttgacggcggattgatggcgttaaacgacagacttaaactgcgaagcatggtcgtcggtgaaaaggacgatattacctacatcgccagcgaagaagcggctatccgcatcatcgaaccaaaccttgataccgtatgggctcccagaggcggtcagccggtaatcgtcaacataaacagaggtaaagcataa

SEQ ID NO: 29090 - protein, 223 aa, Unknown
  Obtained from environmental sample
  DOMAIN (12)...(192): Glutamine amidotransferases class-II
  misc_feature (1)..(223): Xaa is any amino acid
MTALMSSPAEKIWACLRLSGFPKMSGXFYKLEEYEGWCFTAHGRYPTNTPGWWGGAHPFALLDYSVVHNGEISSYDTNRRAIEMYGYKCTLQTDTEVITYIIDYLHRKQKLSFDEIASVIAASFWQTIEKQPAKEREIHEYLRVMFSAQLITGPFSILVGFDGGLMALNDRLKLRSMVVGEKDDITYIASEEAAIRIIEPNLDTVWAPRGGQPVIVNINRGKA

SEQ ID NO: 29091 - DNA, 606 bp, Unknown
  Obtained from environmental sample
  misc_feature (1)..(606): n is a, c, g, or t
atggccgtttcgttccgtatggcggcctattttgggggaggaggcgcgaaaccgcccccaggagaaccgctttcgcgggatggttacggcatggatagccgtgacaagtatcaatacatggagggttatatgataattaatcacaacatgagtgcgctttatgccaaccgccagcttgacgtaacacaggtcgacactacaaagagtctggaaaaacttagttccggtctgcggatcaaccgcgccggggacgatgcttccggtctcgcggtttccgaaaagctgagggcgcaggtccgcggccttaaccaggcggagcgcaatacccttaacggggtgtctttcatacagaccgctgagggatatcttcaggaaacccaggatgttctgcaccggatccgcgagctggcagttcagtcagccaacggcatctataccgaggaagacagaatgtacatccagatcgaagtttccgcgctggtagccgaagttgaccggatcgcgagccatgcccagtttaacggcatgaatatgcttaccggagcttttgctaacggcggaccgaagacaatgcagtccaaagttggcgcctcgtgccaattctga

SEQ ID NO: 29092 - protein, 201 aa, Unknown
  Obtained from environmental sample
  DOMAIN (70)...(199): Bacterial flagellin N-terminus
  misc_feature (1)..(201): Xaa is any amino acid
MAVSFRMAAYFGGGGAKPPPGEPLSRDGYGMDSRDKYQYMEGYMIINHNMSALYANRQLDVTQVDTTKSLEKLSSGLRINRAGDDASGLAVSEKLRAQVRGLNQAERNTLNGVSFIQTAEGYLQETQDVLHRIRELAVQSANGIYTEEDRMYIQIEVSALVAEVDRIASHAQFNGMNMLTGAFANGGPKTMQSKVGASCQF

SEQ ID NO: 29093 - DNA, 861 bp, Unknown
  Obtained from environmental sample
  misc_feature (1)..(861): n is a, c, g, or t
atgatcatcaaccacaacctgagcgcaatgtttgcggacaggtccctcaaagtcacccaggtatccctggacaaaaacatggaaaaactttcctcgggtatccgcgtcaaccgcgcgggtgatgacgcttccggcctggccgtatcagagaaactgcgggcgcagatccgcggcctcaacatggcctcgttcaacgccgccaacggcatctcctttattcagaccgccgaaggttatctccaggaaacggaagacgtgctgcagcgcatcagagaattggcagtccaatccgccaacggcatctacaccgaagaagacagaatgtacatccagatcgaagtttccgctctcgtggccgaagttgaccggatcgcaagccatgcccagttcaacggcatgaacatgctcaccggacgtttcgccagggctctgggacagaatgtccccaccgcttccatgtggttccacatcggcgcgaacatcgatcagaggacacaggtgtacattggcacaatgaccgcgtcagggcttggcatccgcgatgtcgccgacgcgaccatcatgaccctggcgaccccggaagaagccaacaggaacatcagcactcttgacgaggccctgaaattggtcaacaaacagagggctgacctcggcgcttaccagaaccggctcgaacatgcgattcgcggcattgacattggcgcggaaaacctccaggccgccgagtccaggatccgtgacaccaacatggccaatgaaatggttaagtatgtcacccaccaaattctttcacattccggcactgccatgctggcgcaggctaaccaaagaggcacttcggtattgcagcttttgcaatag

SEQ ID NO: 29094 - protein, 286 aa, Unknown
  Obtained from environmental sample
  DOMAIN (193)...(264): Bacterial flagellin C-terminus
  misc_feature (1)..(286): Xaa is any amino acid
MIINHNLSAMFADRSLKVTQVSLDKNMEKLSSGIRVNRAGDDASGLAVSEKLRAQIRGLNMASFNAANGISFIQTAEGYLQETEDVLQRIRELAVQSANGIYTEEDRMYIQIEVSALVAEVDRIASHAQFNGMNMLTGRFARALGQNVPTASMWFHIGANIDQRTQVYIGTMTASGLGIRDVADATIMTLATPEEANRNISTLDEALKLVNKQRADLGAYQNRLEHAIRGIDIGAENLQAAESRIRDTNMANEMVKYVTHQILSHSGTAMLAQANQRGTSVLQLLQ

SEQ ID NO: 29095 - DNA, 648 bp, Unknown
  Obtained from environmental sample
  misc_feature (1)..(648): n is a, c, g, or t
ttgggatttttgcgctccgttttacgatttgcggaacggagaaacgctcaggcgtataacgctatggtaaaaacggtgcgggacgtgataccgggcggcgcgtcagtattggagcttgccgccggaacaggctcaatttctttggggatagcggacaaagttaaaaatgttctttgtaccgatatgtccccaaaaatgctggctgttgcccgaaaaaaggcggaaaaacgtaatgtaaaaaacattgattttggaaatgccaatatctttggtataaacaaggcagacggcgcgtttgatgttgttatcgcggggcaggtgcttcatttgattgacgagcctgaaaaggcggcggcggaactgcggcgggcagcaagcggtatggtaattttaccgatgagctttacaaaaggtctgaaaggccgcgctcaatttatgcttaacatattcaggttgtttgggttcgcgcccaaaagggaattgacattaaccgaatatgcctcattcttgcgcgggattggctttgaaaactgcgcaattattccgctggagggcataattcctatggctgtggcggtgtggcaaaaaaagcgttttgccgcccccgccgccctcccttcggctgatttatgcgaattatgcaattag

SEQ ID NO: 29096 - protein, 215 aa, Unknown
  Obtained from environmental sample
  DOMAIN (12)...(194): ubiE/COQ5 methyltransferase family
  misc_feature (1)..(215): Xaa is any amino acid
MGFLRSVLRFAERRNAQAYNAMVKTVRDVIPGGASVLELAAGTGSISLGIADKVKNVLCTDMSPKMLAVARKKAEKRNVKNIDFGNANIFGINKADGAFDVVIAGQVLHLIDEPEKAAAELRRAASGMVILPMSFTKGLKGRAQFMLNIFRLFGFAPKRELTLTEYASFLRGIGFENCAIIPLEGIIPMAVAVWQKKRFAAPAALPSADLCELCN

SEQ ID NO: 29097 - DNA, 1461 bp, Unknown
  Obtained from environmental sample
  misc_feature (1)..(1461): n is a, c, g, or t
gtggggagtagggagtggggaatgggtggtaatgacaaattcagttttaacttattgacggactctataatagaggaactcaaaagaattgtggggaaaagcaatgtaattgtcgaaggagaaaaactggaaaattattctcatgatgaaaccgacgcacatgaatacgggcgctgtccggaagcggtggttctcccctccaataccgaagaaacagcggcaatcgtaaaactcgccaaccgggagcatatccctgttacccccaggggcgcgggttcgggcctttccggcggggccatcccggagtacggaggcattgttgtttcgctggaaaaaatgaatcgcctcatcgaaatcgacaagggaaacatggcagcggtggttgaggcgggtatggttaccaatgaattcgcgctggcggttcaggagcaggggcttttctttgcgggctaccccatgagccttcagacttgcttcatcggcggcaatatcgcggagaacgcgggcggaggcaaagcggtaaaatacggcgttaccggccgttacgttctgggccttactctggtaacgccgcagggagaaatcgtcgagctgggaggcaagctcgccaaggatgtcaccggttatgatcttaaatcgcttgttgtcggttccgagggaactctcggcatcgttacgcgcgccataataaggctcatcggctatcctgctgcaaagtcggacatcctcgcgcttttcangacggcgaaggacgctatcgatcttgttcctgaaattctttgccggggcgttactcccacaagtatcgaattcatggacaaactttcggtgcagacaagctgcaagtacctaaacgaaagcctgccctacgaaaactgcggcgcgatgctccttattgagctggacggctcagatcccggccaggttgagactgaccttattgaaacaggtaaactctgcgaaaaccgcggtgctttggaagtgtacgttgccgaagaccggaacaacatcgagcgtatatggaacgttaggcgaaacatcgccgaggcttttaaggtattcagccccattcagagcctggaagacattgtggtgcctgtttcccgaatccccgcgattattccggagctggaacgcctggggaaaaaatacggcatgcagattccctgctacggccacgccggggacggcaatctccacgccacgcttgtcaaagaccccagcatggacatggaggactggaagaaaaacgaaaaagcctgtcagggggaactctacgcaatcaccaaagaagcgggcggtaaaatttccggggagcacggcatagggatcaagcgccgggaattcttcaaggacctggctgcgccaggcgagatggaactaatgaaggcgttaaaacgggcatgggaccccaacaacatcatgaatccggggaaaatatttaatattgatgtgcgctga

SEQ ID NO: 29098 - protein, 486 aa, Unknown
  Obtained from environmental sample
  DOMAIN (60)...(199): FAD binding domain
  misc_feature (1)..(486): Xaa is any amino acid
MGSREWGMGGNDKFSFNLLTDSIIEELKRIVGKSNVIVEGEKLENYSHDETDAHEYGRCPEAVVLPSNTEETAAIVKLANREHIPVTPRGAGSGLSGGAIPEYGGIVVSLEKMNRLIEIDKGNMAAVVEAGMVTNEFALAVQEQGLFFAGYPMSLQTCFIGGNIAENAGGGKAVKYGVTGRYVLGLTLVTPQGEIVELGGKLAKDVTGYDLKSLVVGSEGTLGIVTRAIIRLIGYPAAKSDILALFXTAKDAIDLVPEILCRGVTPTSIEFMDKLSVQTSCKYLNESLPYENCGAMLLIELDGSDPGQVETDLIETGKLCENRGALEVYVAEDRNNIERIWNVRRNIAEAFKVFSPIQSLEDIVVPVSRIPAIIPELERLGKKYGMQIPCYGHAGDGNLHATLVKDPSMDMEDWKKNEKACQGELYAITKEAGGKISGEHGIGIKRREFFKDLAAPGEMELMKALKRAWDPNNIMNPGKIFNIDVR

SEQ ID NO: 29099 - DNA, 1332 bp, Unknown
  Obtained from environmental sample
  misc_feature (1)..(1332): n is a, c, g, or t
ttgatttcataccttagacgcttgtcaagcggaaaaaaattcaaatccgttcattttgcaaacaactgtttacatttttgccaagaataccacgttgttctacccctccctactttttctatattactagtcaatatgggcattacgaacatagcacctagaattttagaccctattccgggcggtaagtatctcgtaaacgtaatggattggattataaactgggctagagccaattccctgtggcccctcacttacggaacaagttgctgcgctatagagatgatgtccagttcaatggctcgctatgatattgctcgctttgggagcgaggtgttcagagcaagcccacggcaagcggacttgttcatcttagccggaacggtgacaaaaaaaatggcccctgcaatggtggctctgtgggagcaaatccccggcccaaaatatgcgatagcgatgggagcttgcaccataagcggcggcccttttgtgtataacaattacagcgtggttcgcggtgcagacaaattgattcccgtagatgtttttatacctggctgccctcctcgcccagaggctctgttccacggaattttaaagctgagggaaaaaatccacgcaacggaatctagcagaaacccttggcaagaagggaaaataagaacggaagatgatggcgaccgctggagcgcggcaaaaaaagcttgggaagaacttgagaaaattaaagacgaggagatgaaaaccgcgagggaagagttcaaggaaaaaaatcccgattataaatccccgtttaagccaaagcctgttgcaaaagaaaatttgcccagtttggaaaggacgcctgtgcctgcggttggcaaatcggttgaggaaatttgcaaagccgttcaagctgcgttcccgaacattcaacagccctctaatttaaacgctcctttggaatttgcggttgataaggaaaactggattgcttttgcaaaattcgccaaagataatttgggttgcgattacttgacagatgtcacagcggtggactgggtaacgcattttgatgttattgcgcaatttatgagcctcaacgaagggcataaggtttttgccagttgctctctgccacgcccagaaacaagcgaactccccgaaatccaaagcattaccgcgatttaccccgctgcggagtggaaagaacgcgaggtttacgatatgtttggaatttcatttaacgagcatcccgatttacgccgcatctttacggaagaaaattttgaaggttggcccctgcgcaaagattttgagaattcacacataatcaagagacctacggcatga

SEQ ID NO: 29100 - protein, 443 aa, Unknown
  Obtained from environmental sample
  DOMAIN (370)...(440): Respiratory-chain NADH dehydrogenase, 30 Kd subunit
  misc_feature (1)..(443): Xaa is any amino acid
MISYLRRLSSGKKFKSVHFANNCLHFCQEYHVVLPLPTFSILLVNMGITNIAPRILDPIPGGKYLVNVMDWIINWARANSLWPLTYGTSCCAIEMMSSSMARYDIARFGSEVFRASPRQADLFILAGTVTKKMAPAMVALWEQIPGPKYAIAMGACTISGGPFVYNNYSVVRGADKLIPVDVFIPGCPPRPEALFHGILKLREKIHATESSRNPWQEGKIRTEDDGDRWSAAKKAWEELEKIKDEEMKTAREEFKEKNPDYKSPFKPKPVAKENLPSLERTPVPAVGKSVEEICKAVQAAFPNIQQPSNLNAPLEFAVDKENWIAFAKFAKDNLGCDYLTDVTAVDWVTHFDVIAQFMSLNEGHKVFASCSLPRPETSELPEIQSITAIYPAAEWKEREVYDMFGISFNEHPDLRRIFTEENFEGWPLRKDFENSHIIKRPTA

SEQ ID NO: 29101 - DNA, 375 bp, Unknown
  Obtained from environmental sample
  misc_feature (1)..(375): n is a, c, g, or t
ttgacggttaaattgaaaagacgcatcgtacatacgtatgcaggcgcaaaggagatttttatggaacagaaccgcaacggtgtcaggcacgaatttaggagcaatgtctacgaaggcgaggtaaaagacggcaagccaaacggcaaagggaagatgacctacgcaagcggagaagtttacgaaggcgaatggaaaggcgacgaacgccacggcaaagggaaagtccgaataaaagaatttaaccacggaggacacagaggacacggagggggaagagaagaagagagggaaataacttttctttttcctctttccttcttcctccgtgtaactccgtgtcctccgtggtttttattcttcctatttcttaactag

SEQ ID NO: 29102 - protein, 124 aa, Unknown
  Obtained from environmental sample
  DOMAIN (37)...(59): MORN repeat
  misc_feature (1)..(124): Xaa is any amino acid
MTVKLKRRIVHTYAGAKEIFMEQNRNGVRHEFRSNVYEGEVKDGKPNGKGKMTYASGEVYEGEWKGDERHGKGKVRIKEFNHGGHRGHGGGREEEREITFLFPLSFFLRVTPCPPWFLFFLFLN

SEQ ID NO: 29103 - DNA, 1209 bp, Unknown
  Obtained from environmental sample
  misc_feature (1)..(1209): n is a, c, g, or t
ttggttcagcatccgggcgggcgggcctcggttctggtctcggtgggggatacggttaaagagggtatgctcatcgggcggggaaaaagccccggccctggcaatatccacgcgacggttccgggaaaaattgtaagaagcgtcgaatggaaggacagcgagggcaggctaaacgaaggttttgtcatacggatggaaggttcttttgaacgccttggtaaaaaagaagaaagatttccccatgacgggataggatatcaggaattgcagcgcatacttaccgaatgcggcatagtcgaaatggaaggttcaggcaggccggtcgccgaaatactttcggaattccgcgtcataggaaaaacccatacgctggtagtccgctgcgtgtttgacgatccctggcttgccgccgactatgtgctgtgcaaagaacggtttcaggagatagtagagggagcttttattatagcgaaagccggcagcaggatagaacgcgtcatttttgccgtttccggccgggaaagggaaatcggcgaggccatgctttcggaggcggcgttatacgatattcaatcctctctggttctgacaggttcaaagtatccgcaaaggaaccacagggagctggaacttgttttacggaattacgccaaaaaggaagagattgatttagggccgcttctggttttgggtccggcgacgcttgccgccgtgaatgacgcggcaaaataccgccgccccatactggagcgctatgtggcagtcgggggttcggccgtggtaaggccgcaggtgatgagggtgcgtataggcaaacgcataggcgacctttttgaggaatgcggcggttttaccggccgtcctttccgtattgccgccggctctccgttttatggaagaacgatacggaatcttgacgagcctgtgacaaaaagcagttatgccatttttgccatgcttaaatcccaggcaggccatcaccctgaaagggactgtattagctgtggggaatgtaggcgcgtatgccctgtcgggttggatccggaggaactgtataaggggataattgtcatgagccgcggcgcaccacagcctcagggctcgccatgcagcggagaggaatgtcatggctgcggctgttgcgaattagtctgtccttccagtctgcctctctccgatataattatggggaggcacagaaatgactga

SEQ ID NO: 29104 - protein, 402 aa, Unknown
  Obtained from environmental sample
  misc_feature (1)..(402): Xaa is any amino acid
MVQHPGGRASVLVSVGDTVKEGMLIGRGKSPGPGNIHATVPGKIVRSVEWKDSEGRLNEGFVIRMEGSFERLGKKEERFPHDGIGYQELQRILTECGIVEMEGSGRPVAEILSEFRVIGKTHTLVVRCVFDDPWLAADYVLCKERFQEIVEGAFIIAKAGSRIERVIFAVSGREREIGEAMLSEAALYDIQSSLVLTGSKYPQRNHRELELVLRNYAKKEEIDLGPLLVLGPATLAAVNDAAKYRRPILERYVAVGGSAVVRPQVMRVRIGKRIGDLFEECGGFTGRPFRIAAGSPFYGRTIRNLDEPVTKSSYAIFAMLKSQAGHHPERDCISCGECRRVCPVGLDPEELYKGIIVMSRGAPQPQGSPCSGEECHGCGCCELVCPSSLPLSDIIMGRHRND

SEQ ID NO: 29105 - DNA, 447 bp, Unknown
  Obtained from environmental sample
  misc_feature (1)..(447): n is a, c, g, or t
atggtacaggaacctttgctcagggtgaaaaaaaaagaagagggggtagagcttccaaagtacgaaactcccggctcggctggtctggatataaaggcgtttatcgcttctgattttgcgatcccgccaatgggaagggcaaaaattcctaccggcctgttttttgaaatccccgaagggtacgaggcccagattagaccgcgttcggggcttgccctgaaatggggagtaacccttttgaattcgccgggaacaattgattctgattacaggggcgagcttgaagtgatacttttcaatacaggttctgagtcctttaccgtgaaaaacggcgaccgtattgcgcaaatggtaatttcaccggttgtccgcgcggtaatatccgaagcggagcgtctttcggaaaccgaacgcggagccggcggattcggatccacaggcacatag

SEQ ID NO: 29106 - protein, 148 aa, Unknown
  Obtained from environmental sample
  DOMAIN (14)...(147): dUTPase
  misc_feature (1)..(148): Xaa is any amino acid
MVQEPLLRVKKKEEGVELPKYETPGSAGLDIKAFIASDFAIPPMGRAKIPTGLFFEIPEGYEAQIRPRSGLALKWGVTLLNSPGTIDSDYRGELEVILFNTGSESFTVKNGDRIAQMVISPVVRAVISEAERLSETERGAGGFGSTGT

SEQ ID NO: 29107 - DNA, 375 bp, Unknown
  Obtained from environmental sample
  misc_feature (1)..(375): n is a, c, g, or t
ttgggcattgtttgggatccgaaagtgggaaagacatataacggcacggttaagcgtgtaatggaatacggcgcttttgtggagatacttccggggaaggaaggtttggttcatatcagtaagctctcccgtcagagggttgcccaggtaagcgatgtggtcaaggaaggggacaagattcaggttaaattgattgaaattgacaaggtaggtcgtcttaatctttcttacatcgacgctattgatccgttgcccggaacggaagccggccagggaacatcaggcggaaattcttctgacaggaatcctaacagaatttctgaaagaaattctgacagaaactctgacaacaggcgggatttccgccgccgttag

SEQ ID NO: 29108 - protein, 124 aa, Unknown
  Obtained from environmental sample
  DOMAIN (6)...(78): S1 RNA binding domain
  misc_feature (1)..(124): Xaa is any amino acid
MGIVWDPKVGKTYNGTVKRVMEYGAFVEILPGKEGLVHISKLSRQRVAQVSDVVKEGDKIQVKLIEIDKVGRLNLSYIDAIDPLPGTEAGQGTSGGNSSDRNPNRISERNSDRNSDNRRDFRRR

SEQ ID NO: 29109 - DNA, 1032 bp, Unknown
  Obtained from environmental sample
  misc_feature (1)..(1032): n is a, c, g, or t
atgagcgaaacctatcttttgccacagcagcgcaacaaaagcaagggttccagaatatggtatggcggaatagtaaaaaacggcgaaaccaaatggataagcctcaaaacaacggacaaaaaaatcgctatggaatggcacaacaaatgccaggcaagccgctacgcgccaaaggaagagctgccatcgcgcttgaagctaggcgaggcaatggaagcctatctagctgatgtggagaaagttcggcgcaggtccaagggcacggtaaaggaatacaaaaagcacttgcatttgttccgctcttggtgcgccttgaaaggcatcgcagacattggtgaggtaatgcctaatatatgctcagagtatgccaaggagcaactatcagcattatccggcaattccgcaaaaaccagaataattgtgttgcgtagttttttccggtgggtagcttttaattatgatttgcaaacacgaaacccattcacaggcatttcaatagcaaaacccaaaccggagccccgcaaattctggactgttgaggaatgcgagaaaataatagaagccgcaaacggcgaggagtgcaaatgctggttcgctcttatggcttatgccggactgcgcaaagaagaagcccgcttgctcagaatggaaaatatcgctgacggcaaaatatcacttataggcaaaggcggcaaatcagcaactatacccatatccacaaagctaaaagaacacctgagcagatacctaaattcaaggggaaacaagccgggctacctattccctacctttgcaaagttcagcataaaccttgaaagattcatatccgcagcggttgccaaagccggagtatcaaatgcggacacagcccactatcaccgcttccgccatagtttcgcgagcaacctgctgcgaatgggcaggagcataaaagccgtgcaaatgcttatgcgccacgagaacgttatgctgaccctcaacacctacgggcacttattgccaagtgatttggaaaaagaggtagagctatga

SEQ ID NO: 29110 - protein, 343 aa, Unknown
  Obtained from environmental sample
  DOMAIN (71)...(154): Phage integrase, N-terminal SAM-like domain
  misc_feature (1)..(343): Xaa is any amino acid
MSETYLLPQQRNKSKGSRIWYGGIVKNGETKWISLKTTDKKIAMEWHNKCQASRYAPKEELPSRLKLGEAMEAYLADVEKVRRRSKGTVKEYKKHLHLFRSWCALKGIADIGEVMPNICSEYAKEQLSALSGNSAKTRIIVLRSFFRWVAFNYDLQTRNPFTGISIAKPKPEPRKFWTVEECEKIIEAANGEECKCWFALMAYAGLRKEEARLLRMENIADGKISLIGKGGKSATIPISTKLKEHLSRYLNSRGNKPGYLFPTFAKFSINLERFISAAVAKAGVSNADTAHYHRFRHSFASNLLRMGRSIKAVQMLMRHENVMLTLNTYGHLLPSDLEKEVEL

SEQ ID NO: 29111 - DNA, 1515 bp, Unknown
  Obtained from environmental sample
  misc_feature (1)..(1515): n is a, c, g, or t
atgctcggcggtttgatgggcggatctccaggcggcttgggtacaaaagccaaaggctctttaaaggcaccaagcgcaagagatattgatatgggtgccggtgatggttcccgttccaaagcggagattatggctgttgtcaatgcccgtatgccggggcttaggaatatatataataaatatttgaaattaaaacccgaatttggtggcaaaattactctcaaattcaccattgctcctagtggcgatattactagtattaatatagtgtccagtacaacgggctatgctgaatttgatgaggccattgaggatatggtggcaacttggaaatggaaggttatcaagagcggcaataccactccaacaataccatttacatttgatgactttggaaacgggtctcgaacacaggcggtaccaccatcaccacaaccgccacagccaccacgtccaccccgtccaagattcaaagaaatatatggtggcagtatgctagataaggcagtagtcgcgtcagaaaatataaaagggtggtggaatatagattttacacctcaaaaatctaaatatcctacgccagatgaaaaagccttgagcatagattctgcaaaagacaattttgttaagggcaacgaatatttgagcaaactcacaggaaaaactgatgaagactatcaaatatatttgaagttgagaaatgattatgcaaattccccaactttttattttgatatggcagactggttttacaagcttggcaacagagaaatagctcttcgcatactcacatccatcgccgatttggaacttgaaaattcctcgctctatagattgctcggctataagtttaaagaatatggcgaatatgctttaggaaaatttgtttgccaaaaagttgttcaatggagaccgatggagccgcaaagctaccgcgactacgctttagcccttgccgacaatggagaaacgcaggcagcactggactcgctctattcactgctcctaaaacactattcggaaaatatccttaggcgtagccgaggaatagaagaagttgtgattatggaaataaataatttgattgctaaaaacgcaaaactgaatacatcaaaaattgacaaacgcttgataatgaaagttcccattgatgttcgcgtggttgtaaattggaatatgaacaataccgatattgacctacacgtaaaagacccaagcggcgaagaatgttattacggtcaccgccaaacgagtattggcggtcatatgagcgcaaacaaaggcggcattggccctgaacaattcattttgaaaaaagcgataaagggaaaataccggatttatgtaaattactacggcgaccgacaattcatcgatgcaggtccatcaaccgttatggcggaaatctacataaaatactccgacaaaactgagcaacgcaaaattgtatctctgcaaatgtccaagtcggggcaaaaagacggaaaaatagaggttggtggatttgaattttaa

SEQ ID NO: 29112 - protein, 504 aa, Unknown
  Obtained from environmental sample
  misc_feature (1)..(504): Xaa is any amino acid
MLGGLMGGSPGGLGTKAKGSLKAPSARDIDMGAGDGSRSKAEIMAVVNARMPGLRNIYNKYLKLKPEFGGKITLKFTIAPSGDITSINIVSSTTGYAEFDEAIEDMVATWKWKVIKSGNTTPTIPFTFDDFGNGSRTQAVPPSPQPPQPPRPPRPRFKEIYGGSMLDKAVVASENIKGWWNIDFTPQKSKYPTPDEKALSIDSAKDNFVKGNEYLSKLTGKTDEDYQIYLKLRNDYANSPTFYFDMADWFYKLGNREIALRILTSIADLELENSSLYRLLGYKFKEYGEYALGKFVCQKVVQWRPMEPQSYRDYALALADNGETQAALDSLYSLLLKHYSENILRRSRGIEEVVIMEINNLIAKNAKLNTSKIDKRLIMKVPIDVRVVVNWNMNNTDIDLHVKDPSGEECYYGHRQTSIGGHMSANKGGIGPEQFILKKAIKGKYRIYVNYYGDRQFIDAGPSTVMAEIYIKYSDKTEQRKIVSLQMSKSGQKDGKIEVGGFEF

SEQ ID NO: 29113 - DNA, 480 bp, Unknown
  Obtained from environmental sample
  misc_feature (1)..(480): n is a, c, g, or t
atggcagaaaaggaagtgagctcggacactagtccggcaaagaacggagaaaacattcaaactcagctgcaggaagaatacctgaaaacgctggaacaacttgaagaagggcagcttgtcgaaggcaaagtaattcaggttacctctgatcaggtattcgtggatgtaggttacaaatcagaaggaaaaattcccatagcggaattttccgaaattccaaaaataggagatcccgtatccgttatccttgtcgcaaaggaaaacaaatacggcgaagttattgtttcaaaacaaaaagccgacgcgaaacttttctggaaaaatttacgtcaggcgttcacggataaaaaatcagttataggaactgtagaaaaacaagttaagggcggctttgacgtaaaccttggagcgggagtgcacgcgttccttccaatcagccaagccgacgtacagaaacttgataaacctgaaaaaatataa

SEQ ID NO: 29114 - protein, 159 aa, Unknown
  Obtained from environmental sample
  DOMAIN (33)...(98): S1 RNA binding domain
  misc_feature (1)..(159): Xaa is any amino acid
MAEKEVSSDTSPAKNGENIQTQLQEEYLKTLEQLEEGQLVEGKVIQVTSDQVFVDVGYKSEGKIPIAEFSEIPKIGDPVSVILVAKENKYGEVIVSKQKADAKLFWKNLRQAFTDKKSVIGTVEKQVKGGFDVNLGAGVHAFLPISQADVQKLDKPEKI

SEQ ID NO: 29115 - DNA, 654 bp, Unknown
  Obtained from environmental sample
  misc_feature (1)..(654): n is a, c, g, or t
atggtaatagcgattgacggccccgcaggttccggtaaaagcaccatagccaaactgttggcggaaaagcttaaagacaaagccggaaaagagtttacctccattaattcgggaaatttgtccagaactattaccttgggctgtatacgggcaaaaattgacttgaatgacagtgaaaaagttattgaattcgctaaaaatgctcaaatttcctatcaaaagacggaagtttttctaaacggcgaaaatgtcacggatttgcttcatacagacgaaattgaccgcttttccgcgcctctttccgctatcgtcnccgtaaggcacattgtgaacgacttaatccgaaatatcgcaaaagggcagaatattgtcatagaaggcagggatatgaccactgtggtcttccctgacgctgaatacaggttctatcttgacgcttcggctgattcaagggcaaaacgccgtttcgagcagggggtgtcaaatttgactctgccggaaataaaagacgccattttacagcgggacgagatagacaggaataaaaccgagggcagtttaaaaatcgccgagggagttaattatttagataccagtgacttgaccattattcaagtttatgagaaattgatacaagtaataacaaataattaa

SEQ ID NO: 29116 - protein, 217 aa, Unknown
  Obtained from environmental sample
  DOMAIN (62)...(212): Cytidylate kinase
  misc_feature (1)..(217): Xaa is any amino acid
MVIAIDGPAGSGKSTIAKLLAEKLKDKAGKEFTSINSGNLSRTITLGCIRAKIDLNDSEKVIEFAKNAQISYQKTEVFLNGENVTDLLHTDEIDRFSAPLSAIVXVRHIVNDLIRNIAKGQNIVIEGRDMTTVVFPDAEYRFYLDASADSRAKRRFEQGVSNLTLPEIKDAILQRDEIDRNKTEGSLKIAEGVNYLDTSDLTIIQVYEKLIQVITNN

SEQ ID NO: 29117 - DNA, 351 bp, Unknown
  Obtained from environmental sample
  misc_feature (1)..(351): n is a, c, g, or t
ttgatttttcttgcagtttacggatttcttgtccgttttgccggcaatttgtcgggaatgtattggaacggagatatgttgtacggcatattttcgggaggcgcgattgcggcggcgtttattcttgcggcggaaccgtcaagcagcgcaaaattaaaaccgggtataatatttgcagttgtattaagcgcgtttctttcatggtttttcagatacaagtgcatggaatattacgggtgctttatcgcccttgctctgacaaattgtataacgcccattgtcaggcttttagaagataaaattattttgttccgtattaatcgcgacagctttcgggagacttccttatga

SEQ ID NO: 29118 - protein, 116 aa, Unknown
  Obtained from environmental sample
  misc_feature (1)..(116): Xaa is any amino acid
MIFLAVYGFLVRFAGNLSGMYWNGDMLYGIFSGGAIAAAFILAAEPSSSAKLKPGIIFAVVLSAFLSWFFRYKCMEYYGCFIALALTNCITPIVRLLEDKIILFRINRDSFRETSL

SEQ ID NO: 29119 - DNA, 303 bp, Unknown
  Obtained from environmental sample
  misc_feature (1)..(303): n is a, c, g, or t
ttgcgcttcccgcgacggcggcagccaatcgttactcataaaaaactccttttattaaattgtttgcttttccaaacgccgcaaaagccgcggcttctaacttgtacgctatggcttttgtcgtgtacgccatggcttttatggcgttggctacggcttttaacttgtacgccacggcttttgcggtgtacgccacggcatttggtttgcgggctatggcttttgtcgtgtacgccatggcttttaacacgtacgctatggcttttgcggtgtacgccacggctgttatcttgtacgccatag

SEQ ID NO: 29120 - protein, 100 aa, Unknown
  Obtained from environmental sample
  misc_feature (1)..(100): Xaa is any amino acid
MRFPRRRQPIVTHKKLLLLNCLLFQTPQKPRLLTCTLWLLSCTPWLLWRWLRLLTCTPRLLRCTPRHLVCGLWLLSCTPWLLTRTLWLLRCTPRLLSCTP

SEQ ID NO: 29121 - DNA, 327 bp, Unknown
  Obtained from environmental sample
  misc_feature (1)..(327): n is a, c, g, or t
ttgtttgcttttccaaacgccgcaaaagccgcggcttctaacttgtacgctatggcttttgtcgtgtacgccatggcttttatggcgttggctacggcttttaacttgtacgccacggcttttgcggtgtacgccacggcatttggtttgcgggctatggcttttgtcgtgtacgccatggcttttaacacgtacgctatggcttttgcggtgtacgccacggctgttatcttgtacgccatagcgcataagtcgtgcgccgtaagttttacaaagtatggatataaatataaaagcgcgaaaaaagcgaaaatattattggcataa

SEQ ID NO: 29122 - protein, 108 aa, Unknown
  Obtained from environmental sample
  SIGNAL (1)...(24)
  misc_feature (1)..(108): Xaa is any amino acid
MFAFPNAAKAAASNLYAMAFVVYAMAFMALATAFNLYATAFAVYATAFGLRAMAFVVYAMAFNTYAMAFAVYATAVILYAIAHKSCAVSFTKYGYKYKSAKKAKILLA

SEQ ID NO: 29123 - DNA, 843 bp, Unknown
  Obtained from environmental sample
  misc_feature (1)..(843): n is a, c, g, or t
gtggaactcgtctcccgctacgtggccctgaaaagggtcggctcggtctataaagggctctgccccttccacaatgaaaaaaccccctccttttcggtcaccccccagcgccaccgcttcaagtgcttcggctacggcgaggggggcggggccacccgcttcctgatgctggtggaaggcttgagctttcccgaagccctggccgaattggcccggcgggccgggctgagcctgccggccccggaccaggccgggaggcgggatgaaacaaaccgggccggcctcttccaggtcatggagcgggcccgggatttttacatcgaccggctctggtcggcccaaggggccgcggcccgccgctacctggcccaagaacggggcctgggccgggccgtgaccgaagccttcggcctggggctggccccggaaggctgggacggcctccggcggcacttggccaaggagggcttcagcgaccagatagcggtccaggccggcctgatcaagcccgggcgtaaggctggccagttctatgactttttccggggccgcctcatggtgcccatcgccgacgcccagggccgggtcctggccttcgggggccgggctctgcccggcagccaggagaccgtgaaatatttgaacagcggggaaacgcccctctacaccaagggccgccacctcttcggcctgaaacgggcccggccccttcatccggaccgccggcctggtttacttggtggaaggctatttcgacgtcatcagcctggcccaggccggaatcaacgaggccgtgggcgccttgggcacggccttgaccgaccgcccgataggctttgctaa

SEQ ID NO: 29124 - protein, 280 aa, Unknown
  Obtained from environmental sample
  DOMAIN (2)...(83): CHC2 zinc finger
  misc_feature (1)..(280): Xaa is any amino acid
MELVSRYVALKRVGSVYKGLCPFHNEKTPSFSVTPQRHRFKCFGYGEGGGATRFLMLVEGLSFPEALAELARRAGLSLPAPDQAGRRDETNRAGLFQVMERARDFYIDRLWSAQGAAARRYLAQERGLGRAVTEAFGLGLAPEGWDGLRRHLAKEGFSDQIAVQAGLIKPGRKAGQFYDFFRGRLMVPIADAQGRVLAFGGRALPGSQETVKYLNSGETPLYTKGRHLFGLKRARPLHPDRRPGLLGGRLFRRHQPGPGRNQRGRGRLGHGLDRPPDRLC

SEQ ID NO: 29125 - DNA, 978 bp, Unknown
  Obtained from environmental sample
  misc_feature (1)..(978): n is a, c, g, or t
ttgcgtgttgtgctcgtctcctccggcgccatagcccacggcatgaaggctctcgggctagacaaacggccgacggaaatccccatgcagcaggcctgcgccagcatcgggcagaataggctcatggccatataccaagagcttttcgccggatacgatattctcatcgggcaagtcttgctgacgtgggacgaccttcgcagcaaaaaacgctacctcaatttgcgcaacaccctctttaaattgctcgactgcggggcgattcccatagtcaacgaaaacgactccgtgagcgtggaggagatatgcttcggcaataacgacacgctgggcgctcagatagcaatgctggtcaacgccgacgtattagtcaatttgacggatgtcggcggcctctacgacaaaaatccgcacaaggaaaaggacgctaaacacattcccgtcgtgagcgccgtttccgccggaatacagaagatggccgacgagagagagagcgagataagcgtcggcggtatgtccacaaagctgaaagccgccgagatggtcacgcgcgccggcattccggcgctcatcggcgacggcttcaaccaacgtttgctgacggtgctgaccgacgagtcccgcgcgacgcttttcctgccgtccgccaaaaaaatcccgtcaaggcagcgctggatagccttcaccgggcaaccggcggggagcgtgaccgtggacgccggcgcgtctaaggcggtaacggaacggggcaaaagcttgctggccgccggaatcacatcggttagcggaaggttcaacgccggggacatggttgacatcgtcaatccgcagggggatgtcatagccaaaggattggtaaatttttccgcggacgagattgaggctatacgcgggtgcaaaacggcggaggtggagaaaaagctaggcgctatacggttcaacgaggttattctgcgggataatatggtagtggggtag

SEQ ID NO: 29126 - protein, 325 aa, Unknown
  Obtained from environmental sample
  DOMAIN (234)...(308): PUA domain
  misc_feature (1)..(325): Xaa is any amino acid
MRVVLVSSGAIAHGMKALGLDKRPTEIPMQQACASIGQNRLMAIYQELFAGYDILIGQVLLTWDDLRSKKRYLNLRNTLFKLLDCGAIPIVNENDSVSVEEICFGNNDTLGAQIAMLVNADVLVNLTDVGGLYDKNPHKEKDAKHIPVVSAVSAGIQKMADERESEISVGGMSTKLKAAEMVTRAGIPALIGDGFNQRLLTVLTDESRATLFLPSAKKIPSRQRWIAFTGQPAGSVTVDAGASKAVTERGKSLLAAGITSVSGRFNAGDMVDIVNPQGDVIAKGLVNFSADEIEAIRGCKTAEVEKKLGAIRFNEVILRDNMVVG

SEQ ID NO: 29127 - DNA, 1554 bp, Unknown
  Obtained from environmental sample
  misc_feature (1)..(1554): n is a, c, g, or t
ttggtgatgcggcgtcggcttattacgacgctagcgtcggcgacaaaggatgcgggtaaaatcgcggggcttgaggtaaagagaattatcaacgagccgaccgccgcctctctcgctttcggttttaacaaagattcaaaaaaagacaaagtaatcgccgtatacgatcttggcggcggtactttcgatatttccattctggaactgggcgacggcgttttcgaggtaaaatcgacaaacggcgatactcacttgggcggcgacgatttcgatcatcgtgttatggaatggcttatcgcagaattcaaaaatgacacaggcatcgatctcggcaaagaccgcatggctctccagcgtctccgtgaagcggctgaaaaagcaaaaatcgaattgtcctctatgcagactaccgaagtcaatctgccgtttatcaccgccgaccagagcggaccgaaacatttgcaaaaatcgctgacacgggcaaaatttgaacagatggtggaagaccttcttgctcgttcaaaagaaccttgcaaaaaagcgctttccgacgcgggacttaccgccgaacaaattgacgaggttatccttgtcggcggttctacccgtattccggctgttcagcagattgtcaaagagcttttcaagaaagaacccaacaagggcgttaaccccgacgaagctgtcgctgtgggcgcggcaattcagggcggtattctcggcggcgacgttaaagacgttcttctgcttgacgttactcccctttcgctcggcattgaaacgcttggcggcgtaatgacaaaactcatcacacgcaacacgacaattccaacacgcaagagccaaatcttctccaccgccgcagacggacaaacagccgtctccattcaggtcttgcagggcgagcgtgaaatggcgaatcaaaaccgtgtacttgggcggttcgatcttgtaggcatacctcccgctccgcgcggagttccgcagatcgaagtaactttcgatattgacgcaaacggtattgttcacgtcagcgcaaaagatttgggaacgggcaaggagcaaaaaatccgcatcgaaagttccagcggtttaagcgactcggacattgaccgcatggtaaaagaagcggaactccacgccgaggaagataaaaaagagcgtgaaaaagccgaagtgcgcaatgaagccgactcgatgatttacgccacggagaaaaacataaaagacttgggcgacaaagtaagcgccgccgataaatccaaaaccgaggaagccattgccgatttgcgcaaagctcttgaaagcggcgatattccgtcaatcaaggacaagaccgaagccttaaagcaggcgtcttacaaaatagctgaggaaatttacaaacagcaagccgcaagcggtcagcagggcggcggcggtcaaggcgcaggacccgacatggggggcggatttaatcccaacatgggcggcggcgaaagtcacggcggcggtatgggcggcgacacanagagcgccgaagacgctgattatgaagtggtagacgataagtaa

SEQ ID NO: 29128 - protein, 517 aa, Unknown
  Obtained from environmental sample
  DOMAIN (2)...(462): Hsp70 protein
  misc_feature (1)..(517): Xaa is any amino acid
MVMRRRLITTLASATKDAGKIAGLEVKRIINEPTAASLAFGFNKDSKKDKVIAVYDLGGGTFDISILELGDGVFEVKSTNGDTHLGGDDFDHRVMEWLIAEFKNDTGIDLGKDRMALQRLREAAEKAKIELSSMQTTEVNLPFITADQSGPKHLQKSLTRAKFEQMVEDLLARSKEPCKKALSDAGLTAEQIDEVILVGGSTRIPAVQQIVKELFKKEPNKGVNPDEAVAVGAAIQGGILGGDVKDVLLLDVTPLSLGIETLGGVMTKLITRNTTIPTRKSQIFSTAADGQTAVSIQVLQGEREMANQNRVLGRFDLVGIPPAPRGVPQIEVTFDIDANGIVHVSAKDLGTGKEQKIRIESSSGLSDSDIDRMVKEAELHAEEDKKEREKAEVRNEADSMIYATEKNIKDLGDKVSAADKSKTEEAIADLRKALESGDIPSIKDKTEALKQASYKIAEEIYKQQAASGQQGGGGQGAGPDMGGGFNPNMGGGESHGGGMGGDTXSAEDADYEVVDDK

SEQ ID NO: 29129 - DNA, 330 bp, Unknown
  Obtained from environmental sample
  misc_feature (1)..(330): n is a, c, g, or t
ttgcaaatgtttcggtccgctctggtcggcggtgataaacggcagattgacttcggtagtctgcatagaggacaattcgatttttgctttttcagccgcttcacggagacgctggagagccatgcggtctttgccgagatcgatgcctgtgtcatttttgaattctgcgataagccattccataacacgatgatcgaaatcgtcgccgcccaagtgagtatcgccgtttgtcgattttacctcgaaaacgccgtcgcccagttccagaatggaaatatcgaaagtaccgccgccaagatcgtatacggcgattactttgtctttttttga

SEQ ID NO: 29130 - protein, 109 aa, Unknown
  Obtained from environmental sample
  misc_feature (1)..(109): Xaa is any amino acid
MQMFRSALVGGDKRQIDFGSLHRGQFDFCFFSRFTETLESHAVFAEIDACVIFEFCDKPFHNTMIEIVAAQVSIAVCRFYLENAVAQFQNGNIESTAAKIVYGDYFVFF

SEQ ID NO: 29131 - DNA, 546 bp, Unknown
  Obtained from environmental sample
  misc_feature (1)..(546): n is a, c, g, or t
ttgctccttgcccgttcccaaatcttttgcgctgacgtgaacaataccgtttgcgtcaatatcgaaagttacttcgatctgcggaactccgcgcggagcgggaggtatgcctacaagatcgaaccgcccaagtacacggttttgattcgccatttcacgctcgccctgcaagacctgaatggagacggctgtttgtccgtctgcggcggtggagaagatttggctcttgcgtgttggaattgtcgtgttgcgtgtgatgagttttgtcattacgccgccaagcgtttcaatgccgagcgaaaggggagtaacgtcaagcagaagaacgtctttaacgtcgccgccgagaataccgccctgaattgccgcgcccacagcgacagcttcgtcggggttaacgcccttgttgggttctttcttgaaaagctctttgacaatctgctgaacagccggaatacgggtagaaccgccgacaaggataacctcgtcaatttgttcggcggtaagtcccgcgtcggaaagcgcttttttgcaaggttcttttga

SEQ ID NO: 29132 - protein, 181 aa, Unknown
  Obtained from environmental sample
  misc_feature (1)..(181): Xaa is any amino acid
MLLARSQIFCADVNNTVCVNIESYFDLRNSARSGRYAYKIEPPKYTVLIRHFTLALQDLNGDGCLSVCGGGEDLALACWNCRVACDEFCHYAAKRFNAERKGSNVKQKNVFNVAAENTALNCRAHSDSFVGVNALVGFFLEKLFDNLLNSRNTGRTADKDNLVNLFGGKSRVGKRFFARFF

SEQ ID NO: 29133 - DNA, 1023 bp, Unknown
  Obtained from environmental sample
  misc_feature (1)..(1023): n is a, c, g, or t
atgttgaattttcggcggcgaagctataaaattagatatggtaactatgacttcccaaaatatgaatccaaaaccataaatatacattacgggcgcaccgtaagaggtatatatgaccgcaaataccaaagaatcgcagacggcgtcgccgtaccgcatggtcgcggacgacgggtcgtccctcaacctctacctcaaggagataagcaagtacaagaccctgcccatagaggaggaggccgacctcgcaaagcgcatacgcgacggcgaccgtatggcgctcgacaaattggtcaagtccaacctgcgcttcgtggtcagcgtgagccgcaactaccagaatcaggggcttccattggtagaccttataaacgagggaaatctaggacttatcagagcggccaaaaggttcgacgaaaagaagaatttccggttcatatcctacgccgtgtggtggataaggcaggcgatcctgcaggccttggcggagcagtcgcgtatcgtgaagttgccgctcaaccgcgtcagcgcaatccacaagatcgggatggtgcagagccgcctcgaacaaaagctaagccgcatcccgaacgtgtacgagatcgccgaggaactgcgtatagaaccccacgacgtacaggaggcggtgaagatcggcaacagccacttctcgctggacgccccgttgcagagcggcgacgactcgaagctcttagacctgctgccggacgaacacgcggaaagccccgaccacggcgtcatgaacatatccctgcactccgaggtggacaccgtcctcgagacgctctcggagagggagcgcgaggtcgtcaggctgtacttcgggatcggcgaggagaccgcctacacgctggaggagatcggaatccgcttcgaactgacgcgggagcgggtcaggcagatcaaggagaaagccataaaaaagctaaaacacagctcgcggacgcgaaagctcaatcttttcaaaaagtcggcggggcaaaagtagcgtatatgagatga

SEQ ID NO: 29134 - protein, 340 aa, Unknown
  Obtained from environmental sample
  misc_feature (1)..(340): Xaa is any amino acid
MLNFRRRSYKIRYGNYDFPKYESKTINIHYGRTVRGIYDRKYQRIADGVAVPHGRGRRVVPQPLPQGDKQVQDPAHRGGGRPRKAHTRRRPYGARQIGQVQPALRGQREPQLPESGASIGRPYKRGKSRTYQSGQKVRRKEEFPVHILRRVVDKAGDPAGLGGAVAYREVAAQPRQRNPQDRDGAEPPRTKAKPHPERVRDRRGTAYRTPRRTGGGEDRQQPLLAGRPVAERRRLEALRPAAGRTRGKPRPRRHEHIPALRGGHRPRDALGEGARGRQAVLRDRRGDRLHAGGDRNPLRTDAGAGQADQGESHKKAKTQLADAKAQSFQKVGGAKVAYMR

SEQ ID NO: 29135 - DNA, 897 bp, Unknown
  Obtained from environmental sample
  misc_feature (1)..(897): n is a, c, g, or t
atgaccgcaaataccaaagaatcgcagacggcgtcgccgtaccgcatggtcgcggacgacgggtcgtccctcaacctctacctcaaggagataagcaagtacaagaccctgcccatagaggaggaggccgacctcgcaaagcgcatacgcgacggcgaccgtatggcgctcgacaaattggtcaagtccaacctgcgcttcgtggtcagcgtgagccgcaactaccagaatcaggggcttccattggtagaccttataaacgagggaaatctaggacttatcagagcggccaaaaggttcgacgaaaagaagaatttccggttcatatcctacgccgtgtggtggataaggcaggcgatcctgcaggccttggcggagcagtcgcgtatcgtgaagttgccgctcaaccgcgtcagcgcaatccacaagatcgggatggtgcagagccgcctcgaacaaaagctaagccgcatcccgaacgtgtacgagatcgccgaggaactgcgtatagaaccccacgacgtacaggaggcggtgaagatcggcaacagccacttctcgctggacgccccgttgcagagcggcgacgactcgaagctcttagacctgctgccggacgaacacgcggaaagccccgaccacggcgtcatgaacatatccctgcactccgaggtggacaccgtcctcgagacgctctcggagagggagcgcgaggtcgtcaggctgtacttcgggatcggcgaggagaccgcctacacgctggaggagatcggaatccgcttcgaactgacgcgggagcgggtcaggcagatcaaggagaaagccataaaaaagctaaaacacagctcgcggacgcgaaagctcaatcttttcaaaaagtcggcggggcaaaagtag

SEQ ID NO: 29136 - protein, 298 aa, Unknown
  Obtained from environmental sample
  DOMAIN (21)...(57): Sigma-70 factor, region 1.2
  misc_feature (1)..(298): Xaa is any amino acid
MTANTKESQTASPYRMVADDGSSLNLYLKEISKYKTLPIEEEADLAKRIRDGDRMALDKLVKSNLRFVVSVSRNYQNQGLPLVDLINEGNLGLIRAAKRFDEKKNFRFISYAVWWIRQAILQALAEQSRIVKLPLNRVSAIHKIGMVQSRLEQKLSRIPNVYEIAEELRIEPHDVQEAVKIGNSHFSLDAPLQSGDDSKLLDLLPDEHAESPDHGVMNISLHSEVDTVLETLSEREREVVRLYFGIGEETAYTLEEIGIRFELTRERVRQIKEKAIKKLKHSSRTRKLNLFKKSAGQK

SEQ ID NO: 29137 - DNA, 882 bp, Unknown
  Obtained from environmental sample
  misc_feature (1)..(882): n is a, c, g, or t
gtgctgccggcgttctgggactacggatttatggacaccggccgaggccggtcgggcgaaccatctttcagaatcagcggacgctaccgattgacggacaagcacacgctcaaagcggcgacaggcgcgtacagccaaagtccggagccgaccggcatcgtgataaacaaggatttcggcaacccggacctgccgtcgacgaaagccgcgcaccatatagcggggttcgagtggcagataaacgacctcataagcctagatgcacaaacatacttcaaccgcatttgggacgtagcgcgttcctacgacgaaagaatcgactacgacccgacgctcgatagacagagacgctacttcaacgacggcagacagcggatgtacgggttggaattgatgctgcgccactcccgctccgaaaagttcttcgggtggatatcgtacactctcgcaaggagcgagttatggagtaagcaagaggaaaagtacatactctcaaaccgcgacgaaccgcacaacctgcaactgctcggcagctggcggctggaaggcaattgggaagcgggcacaagagtacgtttcgtaagcggcaaaccgacgtcgccgattgtcgcgactatcgagagcgaaaacgggagaaacatacgccccgtctacggagcgcaaaactcaacgcgccaagacccgttcttccaagtcgacgcgagaatagacaagaagttcatctttgataaatttatattgacatactacttggatttacaaaacctgctctggccgctctacaagagcccggagcttacgtactacaactataattacacggagaagcaaaaaatatcaatgatcccgttagcggcgacaggaattagagcggaattttaa

SEQ ID NO: 29138 - protein, 293 aa, Unknown
  Obtained from environmental sample
  DOMAIN (22)...(293): TonB dependent receptor
  misc_feature (1)..(293): Xaa is any amino acid
MLPAFWDYGFMDTGRGRSGEPSFRISGRYRLTDKHTLKAATGAYSQSPEPTGIVINKDFGNPDLPSTKAAHHIAGFEWQINDLISLDAQTYFNRIWDVARSYDERIDYDPTLDRQRRYFNDGRQRMYGLELMLRHSRSEKFFGWISYTLARSELWSKQEEKYILSNRDEPHNLQLLGSWRLEGNWEAGTRVRFVSGKPTSPIVATIESENGRNIRPVYGAQNSTRQDPFFQVDARIDKKFIFDKFILTYYLDLQNLLWPLYKSPELTYYNYNYTEKQKISMIPLAATGIRAEF

SEQ ID NO: 29139 - DNA, 564 bp, Unknown
  Obtained from environmental sample
  misc_feature (1)..(564): n is a, c, g, or t
atgggcgacatcggaaccggatttttgcattacgcgatgagtccgaatcccaattccgccgttattaaattcttcagagaaaaatttgaagggtttgaaaaaaatattttgaaaacatacaatgaccaggcatggccgaatgctcttgttgactgggcgtatttttggggttcaagcaaaccagttgtccgtataccggtcgagttgtatatgtgtaacagggttttaaataaagacacggcgaaatcaattcaggttttgcgtgacgcggttaattatatactcggaataaatcccctttcattctcatttttatcaggcttcggtgaaaacagcgtaaaaagcatttacagcgggatattcacctacgacaacatatacgaagtgcccaagggttatcttgccggaggcgcaaatcaatacgaggcgggtttcatatcaaattatccggctaaatgctatgttgacagcgaccgcgaatggacgaccaacgaacacgcgatctactggaacgccgctatggtgttgtgcctgacagttgcggttgggacaattgacaaatag

SEQ ID NO: 29140 - protein, 187 aa, Unknown
  Obtained from environmental sample
  misc_feature (1)..(187): Xaa is any amino acid
MGDIGTGFLHYAMSPNPNSAVIKFFREKFEGFEKNILKTYNDQAWPNALVDWAYFWGSSKPVVRIPVELYMCNRVLNKDTAKSIQVLRDAVNYILGINPLSFSFLSGFGENSVKSIYSGIFTYDNIYEVPKGYLAGGANQYEAGFISNYPAKCYVDSDREWTTNEHAIYWNAAMVLCLTVAVGTIDK

SEQ ID NO: 29141 - DNA, 546 bp, Unknown
  Obtained from environmental sample
  misc_feature (1)..(546): n is a, c, g, or t
atgcagttgtactggggtgttaatacctatatcaggtcgttagtcgacgattcagacagcatgatactcaacaccttgaatgctgtttcggaagcaggagcggcaggtataacagataaaatagttcttattgcgggccttccgcttgaaagtccgaacatgataaatactgtccgtgttatcattatcgggacggttcttgcccgttcaagcgccggcggttacgcgaatccttccattacccgcgcgcagggtaaaataatccacgccgcaaatgccgacgaagcctgtaaaaaaatcaagtcttcgggcggcggtgaaatacttatttgcaatgtgctgaccgaagactacttgtctgttatcagtatggtaagcggaatcatctgcgaaggggtttcgttaatcagcgaacaaaaattacagcttatcaatcccaatcttgtctggcttacccacatcagagaagcggcaaaaaaacttgaacccggattaatggtaacaatagacggaaaagaactgcttgtgtacgaaggaactatttaa

SEQ ID NO: 29142 - protein, 181 aa, Unknown
  Obtained from environmental sample
  misc_feature (1)..(181): Xaa is any amino acid
MQLYWGVNTYIRSLVDDSDSMILNTLNAVSEAGAAGITDKIVLIAGLPLESPNMINTVRVIIIGTVLARSSAGGYANPSITRAQGKIIHAANADEACKKIKSSGGGEILICNVLTEDYLSVISMVSGIICEGVSLISEQKLQLINPNLVWLTHIREAAKKLEPGLMVTIDGKELLVYEGTI

SEQ ID NO: 29143 - DNA, 858 bp, Unknown
  Obtained from environmental sample
  misc_feature (1)..(858): n is a, c, g, or t
atgccgcactcccgggaacttgggcgaattctgctttcaaggaaagattacaagggtgcggtggaatcttttaccaatgcccttaaatataatcccggcgatcttgcatcgttgcgggaactgggagccacgcatagcgaggcgggtaaccataccgctgcggaggaattgtttgccagggctttgcaggcatcccccacagacggtcagacaaactacaatatggctgtggtaaagcttgcccttaacaagaacaccgaggcgctttcctatgcccgtcatgctgttgatagtaatccttccagcgcggtatatacctataccctggggcttgctcttgaagccacaagcaacgccgatgccgccattgttgcgtaccaaaaatccgcttcgctcgacagaaaatacctgcggccccgaatcaacctgggaaatctctatctgtcccgcaataattttaacgatgggcttcattatctttccgaggcttatgctattgaaccgtcaaattttgaagtgaataataaccttggcgcggtatacgcaaaaatggagaactggctgaaaagcgtcgagcattatgaaaaggcgctttccgtggaatcaaagaatcccacagtgcatttgaatctggcaagagcctacaccagcgccggcgaacttaccaaggcgcagaattcataccaggcagtactgcggcttgctcccgataactgggacgctatgtatgaattgggaaaaatctatgtcagccttggaaggccggaggatgctaaaaaatacctcagggatctgttgcagcgtaatgcttcatacagcgcaagggctgacgcggaaaggatacttgccgggctatga

SEQ ID NO: 29144 - protein, 285 aa, Unknown
  Obtained from environmental sample
  DOMAIN (205)...(238): Tetratricopeptide repeat
  misc_feature (1)..(285): Xaa is any amino acid
MPHSRELGRILLSRKDYKGAVESFTNALKYNPGDLASLRELGATHSEAGNHTAAEELFARALQASPTDGQTNYNMAVVKLALNKNTEALSYARHAVDSNPSSAVYTYTLGLALEATSNADAAIVAYQKSASLDRKYLRPRINLGNLYLSRNNFNDGLHYLSEAYAIEPSNFEVNNNLGAVYAKMENWLKSVEHYEKALSVESKNPTVHLNLARAYTSAGELTKAQNSYQAVLRLAPDNWDAMYELGKIYVSLGRPEDAKKYLRDLLQRNASYSARADAERILAGL

SEQ ID NO: 29145 - DNA, 882 bp, Unknown
  Obtained from environmental sample
  misc_feature (1)..(882): n is a, c, g, or t
atgcattattcaaagagcattaaggcgcaccgcatccagcttaagcagtacctggtccgcgaaggcacggacattgacggcagccgggccaagctgtacgggatggatttgcaggaataccgggacaatatggtcgggcggaattttcgcatatttttatcgccccaatcggaccggattgacctgaccagcatggccggggagtttatcaaaaagctggagcagcggaccgggtattccctgtactggcaagcggcgaaccattacaacacggcccatccgcatgcgcacctgctgatcaacggaagggacagggacggcaaagaagttacaattccccgcgacattgttaagacgtttatgagggagtatgcgcgggacatctgcacggcgcagatcggaaaccggacgcgggaagagatagcccttgagaaagagcatgaattgtccgcagggcggtacacccggattgacggcaggattaaggagctgtgcggcgatgagctgcggatcaatcccaagcggatcaagtccgaccgggagcgcgtgctggcccgcctggaaaacttgcggaacatgaacttgtgcgtgtacagggatggggcctaccggctttcgccccgctgggaagaagacctgcgggccaacgggcggtacaacgccttcctgagagccagatctgaactgcaatataccgatccgtcaaaactgcaagttttttccggcgagcatggaacgatcaccggaaaggcaaccaagatttaccggaccgatggcgacgcgagcgacaaccacgcggtaatcatcgagaccctggacgggaacgcgtggtttgtgcctctgttaaaattccgaaagcacgcgcaaaaaaaaccgcgataa

SEQ ID NO: 29146 - protein, 293 aa, Unknown
  Obtained from environmental sample
  misc_feature (1)..(293): Xaa is any amino acid
MHYSKSIKAHRIQLKQYLVREGTDIDGSRAKLYGMDLQEYRDNMVGRNFRIFLSPQSDRIDLTSMAGEFIKKLEQRTGYSLYWQAANHYNTAHPHAHLLINGRDRDGKEVTIPRDIVKTFMREYARDICTAQIGNRTREEIALEKEHELSAGRYTRIDGRIKELCGDELRINPKRIKSDRERVLARLENLRNMNLCVYRDGAYRLSPRWEEDLRANGRYNAFLRARSELQYTDPSKLQVFSGEHGTITGKATKIYRTDGDASDNHAVIIETLDGNAWFVPLLKFRKHAQKKPR

SEQ ID NO: 29147 - DNA, 363 bp, Unknown
  Obtained from environmental sample
  misc_feature (1)..(363): n is a, c, g, or t
atgttacaaaaatggctggaaaaagacagaaaacgtcttagaagaaagattcatatacgcaaaaggatagccggaacagcggaacgtccgcgtatgacggttacaaagagcaaccgcagtctttctgttcagataattgacgatgacaagggacatacccttgtttcagcttcgtcccttgaaaaggaactgaagaatattaaggcgactgtcgccggagcgggacagttaggtgaaatagtgggcaagcgtctgttggaaagaaacatcaaaacagtggtgtttgatcgcaacggatatttgtatcatggaatagttaaggctttagccgacggaacccggaaagcgggaatcagtttctag

SEQ ID NO: 29148 - protein, 120 aa, Unknown
  Obtained from environmental sample
  DOMAIN (7)...(120): Ribosomal L18p/L5e family
  misc_feature (1)..(120): Xaa is any amino acid
MLQKWLEKDRKRLRRKIHIRKRIAGTAERPRMTVTKSNRSLSVQIIDDDKGHTLVSASSLEKELKNIKATVAGAGQLGEIVGKRLLERNIKTVVFDRNGYLYHGIVKALADGTRKAGISF

SEQ ID NO: 29149 - DNA, 657 bp, Unknown
  Obtained from environmental sample
  misc_feature (1)..(657): n is a, c, g, or t
atgatgtcaaaaacaaaagacatagtcgaagattctttagtggaagaaaatatcgaagataccgctgattccgcggcggacacggatactgccgaagttgcggcggagagccgtcacgagggcagaggaagacgcggacgcgggcgggatagagatcgaggcgatcgcgaacctgtagaaaaagaatttgtcgagaaacttgttaaattaaacagaaccgccaaagttgttaagggcggacgccgtttctctttctcggcgctcactgtaatcggcgaccgcaagggaaaagtcggctacggcttcggcaaagcgaacgacgtatcggaagctatccgcaaaagcattgacagggcanaacgcaatatgattcgtctgcccgtaaagaatgggacaattccccatgaagtaaaaggattttttaagtcatcttatgttttgttaaaaccggcttgttccggtacgggaattattgccgggggcccggtaagggcaattatggaagcaggcggcgtaactgacgttctttccaagtccatcggagctgccagccagtataacgtggttaaggctacttttgactgcatcagcaagatgatggacgcgcggacagtcgcgaaaaaccggggcaagcccctgaaggaattctgggggtaa

SEQ ID NO: 29150 - protein, 218 aa, Unknown
  Obtained from environmental sample
  DOMAIN (137)...(210): Ribosomal protein S5, C-terminal domain
  misc_feature (1)..(218): Xaa is any amino acid
MMSKTKDIVEDSLVEENIEDTADSAADTDTAEVAAESRHEGRGRRGRGRDRDRGDREPVEKEFVEKLVKLNRTAKVVKGGRRFSFSALTVIGDRKGKVGYGFGKANDVSEAIRKSIDRAXRNMIRLPVKNGTIPHEVKGFFKSSYVLLKPACSGTGIIAGGPVRAIMEAGGVTDVLSKSIGAASQYNVVKATFDCISKMMDARTVAKNRGKPLKEFWG

SEQ ID NO: 29151 - DNA, 810 bp, Unknown
  Obtained from environmental sample
  misc_feature (1)..(810): n is a, c, g, or t
gtgtatgagcttgtaaaagcaatcaagaaggtgacagacttaccgattgaaatccacactcacgccactacaggtatgtccgtagcgactcttaccaagtgcgccgaagcgggagcggagattttagacactacaatttcatcaatgtcgatgggaacaagccacagccccacggaaacaatggtggaaattttaaaaggcactgaatacgacacaggactggataccgccctgttactcgaaattgccgcgtattttcgcgaagtccgcaaaaactacaaaaaattcgagtcgagcttcctcggcgcggatacccgaatccttgcgagccaggttcccggcggaatgttaagcaacctggaaagccagcttaaagaacagggcgcttcggataaaattgacgacgtactcaaagagatcgccgttgttcaaaaagactcaggctatccgcctcttgttactcccacaagtcaaattgtaggaacacaggctgtgtttaacgtactgttcggcagatacaacaaactttcaggcgagttccaagaccttgtcgccggaaaatacggcgcttgtcccgctcccaaaaatcccgatgtagtaaaaaaagctcttgaagctttaaaaatggaaaaagaaatcacccaccgcccggcggatgatattcccgctgaatattcaaaacttgaagacgaaaccaaaaaacttttaggcacaagcactgttacaacggaagacgttttaacctacgccatgttcccgaaagtcgctccggacttcttcaaaacgcgccaacggtcctgtggtctttaa

SEQ ID NO: 29152 - protein, 269 aa, Unknown
  Obtained from environmental sample
  DOMAIN (107)...(269): Conserved carboxylase domain
  misc_feature (1)..(269): Xaa is any amino acid
MYELVKAIKKVTDLPIEIHTHATTGMSVATLTKCAEAGAEILDTTISSMSMGTSHSPTETMVEILKGTEYDTGLDTALLLEIAAYFREVRKNYKKFESSFLGADTRILASQVPGGMLSNLESQLKEQGASDKIDDVLKEIAVVQKDSGYPPLVTPTSQIVGTQAVFNVLFGRYNKLSGEFQDLVAGKYGACPAPKNPDVVKKALEALKMEKEITHRPADDIPAEYSKLEDETKKLLGTSTVTTEDVLTYAMFPKVAPDFFKTRQRSCGL

SEQ ID NO: 29153 - DNA, 468 bp, Unknown
  Obtained from environmental sample
  misc_feature (1)..(468): n is a, c, g, or t
gtgcttcgctacgccgtacaggaaggcgtagatgtagaagccggtcaaacaataataattttagagtccatgaaaatggaactggaaataaaagcgaacgcatccggtaaagtgcattttattgttcccacaagcacaagtgttgtaggcaaacagcctgtcgccgaaatcagcggagcggaaattgccgttccctcgcctgctccggctcccgccgcgcaacctgcccctgcggcggctccctcagccggcggcggcggaacgatagtcggcgcgcctgtagcgggcgttgttttacgttactcagtaagcgagggcgatacagtctccaacggtcaaacaatcgctattatcgaatccatgaaaatggaattggaaataaaagcaaacgcgtccggtaaagttcattttatcgccgcattaggcactgcgcttgtttccaaacaaccgatagcggaaatacgttag

SEQ ID NO: 29154 - protein, 155 aa, Unknown
  Obtained from environmental sample
  DOMAIN (2)...(57): Biotin-requiring enzyme
  misc_feature (1)..(155): Xaa is any amino acid
MLRYAVQEGVDVEAGQTIIILESMKMELEIKANASGKVHFIVPTSTSVVGKQPVAEISGAEIAVPSPAPAPAAQPAPAAAPSAGGGGTIVGAPVAGVVLRYSVSEGDTVSNGQTIAIIESMKMELEIKANASGKVHFIAALGTALVSKQPIAEIR

SEQ ID NO: 29155 - DNA, 543 bp, Unknown
  Obtained from environmental sample
  misc_feature (1)..(543): n is a, c, g, or t
atgaaagacaatataacgcanattcagaacatgatttacgaaattcgtgggcaaaaagtcatgtttgatcgggatcttgcagatttgtacggtgtgaatttaaaagcaatgaatcaggctgtaaaacgtaatattaggcgtttcccatccgactttatgttccaattaaacgacattgaatggaaaaatctaaggtcacaaattgtgacctttagcaatgatgtaagaaaatacaagccttatgtttttaccgaacaaggcgtttcaatgctctctagcgtaataaattctgaacgtgcaatcgaagtaaacatcaacattatgcgggcatttgtaaaattaaggcattatatgctcactaaaagcgaaacaaatgaacaaattgcagaattacggaaactgctcatggtctatattgaaaatactgactatagactttcaaaacaggataaggcaattgaacaaatcatcatcgctctgaataatttaattcagaaaccgccaaaaaccaaaacgattggttttaatactgataataattag

SEQ ID NO: 29156 - protein, 180 aa, Unknown
  Obtained from environmental sample
  misc_feature (1)..(180): Xaa is any amino acid
MKDNITXIQNMIYEIRGQKVMFDRDLADLYGVNLKAMNQAVKRNIRRFPSDFMFQLNDIEWKNLRSQIVTFSNDVRKYKPYVFTEQGVSMLSSVINSERAIEVNINIMRAFVKLRHYMLTKSETNEQIAELRKLLMVYIENTDYRLSKQDKAIEQIIIALNNLIQKPPKTKTIGFNTDNN

SEQ ID NO: 29157 - DNA, 663 bp, Unknown
  Obtained from environmental sample
  misc_feature (1)..(663): n is a, c, g, or t
gtgacggcgctcatcgggccttccggctgcggcaaaagcacttttttacgctgcctcaaccgcatgaatgacctgattcccggcgcgcgggtccagggctgcatcgaactggacggccaggacgtcaatgcgcgcgataccgatgtggtcagtctgcgccggcgggtaggcatggtctttcaaaagcccaatccctttcccaagagcattttcgaaaatgtggcgtatgggctgcgcatcaacggcatgaagaacgagacggaaattgccgaccgcgtggaggcgagcttatgccgcgccgcgatccttgaagaggtgaaagaccgcatgcacagctccgcgctggggctttccggcggacagcagcagcgtttgtgcattgcccgcgcccttgccgtcgaaccggacgtgctgctgatggacgaacccgccagcgcccttgatcccattgccacccagaagatcgaggaaggcgtccacgagttgaaaagccagctcaccatcatcatcgtgacgcataatatgcagcaggcggctcgcgtttccgaccacaccgcgtttttttacatgggcaggctgatcgaggatgacgcgaccgacgtcatgtttacccgccccaggctcaagcagaccgaagactatataaccggaaggttcggatag

SEQ ID NO: 29158 - protein, 220 aa, Unknown
  Obtained from environmental sample
  DOMAIN (1)...(191): ABC transporter
  misc_feature (1)..(220): Xaa is any amino acid
MTALIGPSGCGKSTFLRCLNRMNDLIPGARVQGCIELDGQDVNARDTDVVSLRRRVGMVFQKPNPFPKSIFENVAYGLRINGMKNETEIADRVEASLCRAAILEEVKDRMHSSALGLSGGQQQRLCIARALAVEPDVLLMDEPASALDPIATQKIEEGVHELKSQLTIIIVTHNMQQAARVSDHTAFFYMGRLIEDDATDVMFTRPRLKQTEDYITGRFG

SEQ ID NO: 29159 - DNA, 375 bp, Unknown
  Obtained from environmental sample
  misc_feature (1)..(375): n is a, c, g, or t
gtgtggtcggaaacgcgagccgcctgctgcatattatgcgtcacgatgatgatggtgagctggcttttcaactcgtggacgccttcctcgatcttctgggtggcaatgggatcaagggcgctggcgggttcgtccatcagcagcacgtccggttcgacggcaagggcgcgggcaatgcacaaacgctgctgctgtccgccggaaagccccagcgcggagctgtgcatgcggtctttcacctcttcaaggatcgcggcgcggcataagctcgcctccacgcggtcggcaatttccgtctcgttcttcatgccgttgatgcgcagcccatacgccacattttcgaaaatgctcttgggaaagggattgggcttttga

SEQ ID NO: 29160 - protein, 124 aa, Unknown
  Obtained from environmental sample
  SIGNAL (1)...(25)
  DOMAIN (43)...(84): Protein of unknown function (DUF1602)
  misc_feature (1)..(124): Xaa is any amino acid
MWSETRAACCILCVTMMMVSWLFNSWTPSSIFWVAMGSRALAGSSISSTSGSTARARAMHKRCCCPPESPSAELCMRSFTSSRIAARHKLASTRSAISVSFFMPLMRSPYATFSKMLLGKGLGF

SEQ ID NO: 29161 - DNA, 1038 bp, Unknown
  Obtained from environmental sample
  misc_feature (1)..(1038): n is a, c, g, or t
ttgatactcaccccttcgaccgtaaaatacgcgtgttccgcgatgttggacgcgcggcggaaaatgcggttcaccgcgcgggcgataaggatggcgtgcatgacgcaccagcccccgacgccggggcgtacttcctcattggaaagacgttccataagatcgtggatgaggcgcatttccatctgggtgacgtcctcgtcgccccggcagatatgcaacgcccgcgccgcatcgccggcgcgaaaggccgcgattgcctcgtgcagcgccttttgcgccatgcgcagcatttcctccagttgccggaattcggggaatctcggcaaatcctgcatcaggacggcgcgttcggcaacattgacggcttcgtcccctatgcgttcaaggtcaaccaccatgcgcaccgcgctgacgacaaaacgcaaatcgcgggcgaccggctgcgtgcgcgccagaagtgaaagcgccatatcgtcgatttcgttttccagctcgtccaccttgccgtcgtgctcaatcaccgcttcggcgcgcgccacgttgttccggcacagcgcgatgcaggcgttttccagcgcctcttccacggtgacgcacatgaccagcagccgggtacgcagttgctccaacaagtactgtaattgcgtttctttgttcatggcgctatccgaaccttccggttatatagtcttcggtctgcttgagcctggggcgggtaaacatgacgtcggtcgcgtcatcctcgatcagcctgcccatgtaaaaaaacgcggtgtggtcggaaacgcgagccgcctgctgcatattatgcgtcacgatgatgatggtgagctggcttttcaactcgtggacgccttcctcgatcttctgggtggcaatgggatcaagggcgctggcgggttcgtccatcagcagcacgtccggttcgacggcaagggcgcgggcaatgcacaaacgctgctgctgtccgccggaaagccccagcgcggagctgtgcatgcggtctttcacctcttcaaggatcgcggcgcggcataa

SEQ ID NO: 29162 - protein, 345 aa, Unknown
  Obtained from environmental sample
  misc_feature (1)..(345): Xaa is any amino acid
MILTPSTVKYACSAMLDARRKMRFTARAIRMACMTHQPPTPGRTSSLERRSIRSWMRRISIWVTSSSPRQICNARAASPARKAAIASCSAFCAMRSISSSCRNSGNLGKSCIRTARSATLTASSPMRSRSTTMRTALTTKRKSRATGCVRARSESAISSISFSSSSTLPSCSITASARATLFRHSAMQAFSSASSTVTHMTSSRVRSCSNKYCNCVSLFMALSEPSGYIVFGLLEPGAGKHDVGRVILDQPAHVKKRGVVGNASRLLHIMRHDDDGELAFQLVDAFLDLLGGNGIKGAGGFVHQQHVRFDGKGAGNAQTLLLSAGKPQRGAVHAVFHLFKDRGAA

SEQ ID NO: 29163 - DNA, 702 bp, Unknown
  Obtained from environmental sample
  misc_feature (1)..(702): n is a, c, g, or t
atgaacaaagaaacgcaattacagtacttgttggagcaactgcgtacccggctgctggtcatgtgcgtcaccgtggaagaggcgctggaaaacgcctgcatcgcgctgtgccggaacaacgtggcgcgcgccgaagcggtgattgagcacgacggcaaggtggacgagctggaaaacgaaatcgacgatatggcgctttcacttctggcgcgcacgcagccggtcgcccgcgatttgcgttttgtcgtcagcgcggtgcgcatggtggttgaccttgaacgcataggggacgaagccgtcaatgttgccgaacgcgccgtcctgatgcaggatttgccgagattccccgaattccggcaactggaggaaatgctgcgcatggcgcaaaaggcgctgcacgaggcaatcgcggcctttcgcgccggcgatgcggcgcgggcgttgcatatctgccggggcgacgaggacgtcacccagatggaaatgcgcctcatccacgatcttatggaacgtctttccaatgaggaagtacgccccggcgtcgggggctggtgcgtcatgcacgccatccttatcgcccgcgcggtgaaccgcattttccgccgcgcgtccaacatcgcggaacacgcgtattttacggtcgaaggggtgagtatcaagcataaaaaggtggaaatccgggaaaaacggctttccgcatag

SEQ ID NO: 29164 - protein, 233 aa, Unknown
  Obtained from environmental sample
  DOMAIN (121)...(210): PhoU family
  misc_feature (1)..(233): Xaa is any amino acid
MNKETQLQYLLEQLRTRLLVMCVTVEEALENACIALCRNNVARAEAVIEHDGKVDELENEIDDMALSLLARTQPVARDLRFVVSAVRMVVDLERIGDEAVNVAERAVLMQDLPRFPEFRQLEEMLRMAQKALHEAIAAFRAGDAARALHICRGDEDVTQMEMRLIHDLMERLSNEEVRPGVGGWCVMHAILIARAVNRIFRRASNIAEHAYFTVEGVSIKHKKVEIREKRLSA

SEQ ID NO: 29165 - DNA, 1155 bp, Unknown
  Obtained from environmental sample
  misc_feature (1)..(1155): n is a, c, g, or t
atgattaacgtagcgattgtcggcacaggaggtattgcccggcagcatataggcggatacctcgcttttcccggccgctgtaaaattacgcgtctggcggacattttcccggaaaaaacggaaagaacgaacgcggaatttaagctcggcgcaaaggtatccgcgtcctggaaggaaatacttgacgacccggatgttgatctggtgagtatttgcaccccgccgttctgccacgctgaaataaccattggttttttgaacgccggaaaaaacgtccttgttgaaaaacccatggctgcgtcattggaagaatgtgacgcgatgatcgctgcggctaaaaaaaacaacaatgttttttccgtcgtcgctcaaaaccgcttccgcgatcctgtagccaaagtgaaaaaaacgcttgactccggacttatcggaaaagttgttcacgcccaggttgattcattctggtggcgcggtcattcatactatgatttatggtggcggggaacatgggaaaaagaagggggcggctgcaccctgaaccatgcggttcaccacattgacatgctgctttggatgcttgggctgcctaaaaaagtcagcgcggtgataagtaacgcgtcccatgataacgccgaagtggaggatatatcagtcgcggtactgcaatacgacggcggtctttgctcaaaaggagcgcttgcgcaggtaacaagctctgttatccaccacggcgaagagcagcagcttgtttttcagggagagaaagcccgcgtttcggcgccttggagagtatcagccaatatcgcgcagcctaacggttttcctgccggacaaaacgaagaattaatatcaaaactaaataatttttacgaggcgctgccaaagcttacccttactttacatgtagggcaaataaacgatgtattgactgcgcttgaaaccggccgtaaaccgttgattgacggcgaagacggcaggcgcacaatagagctaatctccgcgatttataaagccggcacggaacagcgtacggtggaactgccaatgcaaaaagacgatcccttttacacggttaaaggcattatggaaacagtgccgcatttctacgaaaagaccgcctctgtaaacgatcagggcggacaaattacattttag

SEQ ID NO: 29166 - protein, 384 aa, Unknown
  Obtained from environmental sample
  DOMAIN (135)...(251): Oxidoreductase family, C-terminal alpha/beta domain
  misc_feature (1)..(384): Xaa is any amino acid
MINVAIVGTGGIARQHIGGYLAFPGRCKITRLADIFPEKTERTNAEFKLGAKVSASWKEILDDPDVDLVSICTPPFCHAEITIGFLNAGKNVLVEKPMAASLEECDAMIAAAKKNNNVFSVVAQNRFRDPVAKVKKTLDSGLIGKVVHAQVDSFWWRGHSYYDLWWRGTWEKEGGGCTLNHAVHHIDMLLWMLGLPKKVSAVISNASHDNAEVEDISVAVLQYDGGLCSKGALAQVTSSVIHHGEEQQLVFQGEKARVSAPWRVSANIAQPNGFPAGQNEELISKLNNFYEALPKLTLTLHVGQINDVLTALETGRKPLIDGEDGRRTIELISAIYKAGTEQRTVELPMQKDDPFYTVKGIMETVPHFYEKTASVNDQGGQITF

SEQ ID NO: 29167 - DNA, 315 bp, Unknown
  Obtained from environmental sample
  misc_feature (1)..(315): n is a, c, g, or t
atggggcttgtggcgagcgccgcggctattatccagcttgccgcgccaaaagaacggcggttgggattacccaacagccattaccttatacaccagcccctttccggcatacgcggcgtcgccaccgacattgaaatccacgcaagagaacttgaaaaactgcgggcgaagataaaccgcctcatagcggaagaaaccggcaaccccgccgagcaggttgaaaaagacaccgaccgcgactactggatgagcgcacaggaagcggtcaagtacggccttatcaacaaggtgataactaacagggacgagatgtaa

SEQ ID NO: 29168 - protein, 104 aa, Unknown
  Obtained from environmental sample
  DOMAIN (1)...(101): Clp protease
  misc_feature (1)..(104): Xaa is any amino acid
MGLVASAAAIIQLAAPKERRLGLPNSHYLIHQPLSGIRGVATDIEIHARELEKLRAKINRLIAEETGNPAEQVEKDTDRDYWMSAQEAVKYGLINKVITNRDEM

SEQ ID NO: 29169 - DNA, 1080 bp, Unknown
  Obtained from environmental sample
  misc_feature (1)..(1080): n is a, c, g, or t
atgagcgacaaatctaacggtatgaattatgcccccaaggggaagccaaatcctgtcgttaaaaagggagagtttaactttgcggcaatcgcccttgatcacgggcatatttacggacagtgcaacggcttgatagaggcgggcgggacgctgaaaagcgtctacgatcccgatccaaagaaggttgacagattctgcgaaacatatccaggcgtaaaacgtgcggcaagcgaagatgagattcttggcgacaaggaggtcttgcttgtagcaggggcggcagttacgtccgaacgctgtgcgctgggtttgcgcgtaatgtccgccggaaaggattattttacggacaaggccccgcttacaaccctgggacagctccaggcggcaaaggcaaaggcaaaagaaacgggcaaaaaatacatggtatattacagcgagcgcatccatgttgaaagtgccgtttttgcaggccagctcattgaacagggagctatcggcaaggtaattcangtcctcggtcttggccctcaccgtcttgcagctccgtcgcggccagagtggtttttcataaaagaaaaatacggcggcatactctgcgacatcggcagccaccagatagaacagttcctgttttacgctggagtaaaagacgcgaaggtggtacgcagtcagatcgccaattataataacccgcaatacccggaacttgacgacttcggcgatgccatgctggttggcgacaacggcgcgactcattatttccgcgttgactggttcacccccgacggcctgcaaatgtggggggacgggcgttcttttattttaggaaccgaaggttatattgaacagcgcaagtatatgcagtttggcgaaaaaggaagccatggcggcaacgtttatctggcaaacaaacatgaggaaacttactttaatgttgaagggcaggtaggctatccatactttggccagttgattcttgactgcttgaaccgtaccgaaaatgccatgacccaggaacacgcgtttaaagccgccgaactatgcgtaaaagcccagatgcaagcggttaaaatagcgtaa

SEQ ID NO: 29170 - protein, 359 aa, Unknown
  Obtained from environmental sample
  DOMAIN (25)...(144): Oxidoreductase family, NAD-binding Rossmann fold
  misc_feature (1)..(359): Xaa is any amino acid
MSDKSNGMNYAPKGKPNPVVKKGEFNFAAIALDHGHIYGQCNGLIEAGGTLKSVYDPDPKKVDRFCETYPGVKRAASEDEILGDKEVLLVAGAAVTSERCALGLRVMSAGKDYFTDKAPLTTLGQLQAAKAKAKETGKKYMVYYSERIHVESAVFAGQLIEQGAIGKVIXVLGLGPHRLAAPSRPEWFFIKEKYGGILCDIGSHQIEQFLFYAGVKDAKVVRSQIANYNNPQYPELDDFGDAMLVGDNGATHYFRVDWFTPDGLQMWGDGRSFILGTEGYIEQRKYMQFGEKGSHGGNVYLANKHEETYFNVEGQVGYPYFGQLILDCLNRTENAMTQEHAFKAAELCVKAQMQAVKIA

SEQ ID NO: 29171 - DNA, 687 bp, Unknown
  Obtained from environmental sample
  misc_feature (1)..(687): n is a, c, g, or t
gtgattggctgtatattgggaaccggcttcaataccgcgtatcctgaaacccggatacccaagattggctttgagtcagagacagccccgcagatcgtggtttgcgagacaggcactttcaaccttcactaccgcggccggctggacaaggaatttgacagcacaaccaaaaaccccggggcttataatctggagaaagccacttcgggcgcgtacttgggccccctgactctgcacattctgaaacaggcggtaaaggacaagctgatcctgtttaaaaaatccgatgaactccttgccatgccccagcttgaaaccaggatactcaacgaattttcccgcgccccccgcgccgccgaaggcccgctggggtcgctattcggcccggatgagggagacgcgcttgccgcggtgcagtaccttgtctcgattatcaccgagcggggtgcgctgtttgccgcggctgtgctggctgcgacagtagaacggatggatgcataccgcgagccgtactcaccggttcgtatagctatagaaggaaccacctacatgatctacagggggatgcgccgcgcccttgaagcccggctgcatacaatgcttgtcaatgagaagcccaggccctatgtgatttcgccggtagaacaagccagtctctttggcgcggcagtagcggcctgctgttag

SEQ ID NO: 29172 - protein, 228 aa, Unknown
  Obtained from environmental sample
  DOMAIN (1)...(227): Hexokinase
  misc_feature (1)..(228): Xaa is any amino acid
MIGCILGTGFNTAYPETRIPKIGFESETAPQIVVCETGTFNLHYRGRLDKEFDSTTKNPGAYNLEKATSGAYLGPLTLHILKQAVKDKLILFKKSDELLAMPQLETRILNEFSRAPRAAEGPLGSLFGPDEGDALAAVQYLVSIITERGALFAAAVLAATVERMDAYREPYSPVRIAIEGTTYMIYRGMRRALEARLHTMLVNEKPRPYVISPVEQASLFGAAVAACC

SEQ ID NO: 29173 - DNA, 1572 bp, Unknown
  Obtained from environmental sample
  misc_feature (1)..(1572): n is a, c, g, or t
gtggaatgtaatcaggaagtagtaaggcttttcggactttcaaacaaacaggaattcataaacagtgtttttgatctttttccggaatatcagtcttcaggcgaatcatcaagaaacaggtttaataaaaatctttccgaagcgtttgaagaaggatactgccgctttgaatggatgcaccaaaagccggacggggaaccgatacctacggaagttacgtttgtgcgcgttaaattcaagggggaatacgccgttgcagcttatgtcagggatttaagggagcttaagacaatgattgccgaaatgcggagggcggaaatcgccgaagaaagcaataaggcaaagagcgaattcctggcgaagatgagccacgaaatccgaactcccatgaacgcgattttaggtattactgagattcagcttcaggatgttaaccttcccaactcaataaaagaagcgctggaaagaatttacaattcgggggacctgcttcttggcattattaacgacatattggatctctccaaaatagaagccggaaaactggagcttttccctgtacaatacgaagtatcaagcttaatctacgataccgtaaaacttaacattttacgctacgaaaacaagccgattgaatttgcgcttgaagtaaatgaaaatctgccgtctgctcttattggagatgaattgcgccttaagcaaattttgaataacttgatttccaacgcatttaaatatacccacgaaggcagaattaatatgcacctgtcaacagaaaaaggcggcaatgattcggaagtcattcttgttctggttataagcgacacaggtcagggaatgactgcggaacaggtgcgcagactcggcgataaattttccagattcaacacggaggtgaaccgtaagacagagggaacaggccttggcatgaacataacgcagaatttaatacagttgatgagcggcgatatgaaaatcgaaagtacgcccggcatgggatctacctttactgtccgtctgccgcagaaattaaccggcgaacctcctataggaaaagaacttgccgagaaccttatgaagctgaatattaaaaacacttcaaagttcaggaacacgcagataatacaggaatttatgccttacggccgcgttcttgtggtagacgacgtggaatcgaacctttatgtagcgagaggccttttggctccgtacggactgtcaattgatatttccataagcgggtttgaagcggttgataaaattaaagccggcaataattatgatattattttcatggatcacatgatgcccagaatggacggcattgaagcgacaaagctcattcgaagtcttggatatacgggcgcgattgtagcgttaaccgcaaacgcccttgccgggcaggaagaaatgttcctgaagaacggttttgacgattttatctcaaagcctatagacatccgccagttaaacaattcgctgaacaaattgatacgcgataaaaagccnggcggaagtagtagaggaagcgcgtctgcaaaaagacaaacttttcgcggaagtcgtccataa

SEQ ID NO: 29174 - protein, 523 aa, Unknown
  Obtained from environmental sample
  DOMAIN (114)...(180): His Kinase A (phosphoacceptor) domain
  misc_feature (1)..(523): Xaa is any amino acid
MECNQEVVRLFGLSNKQEFINSVFDLFPEYQSSGESSRNRFNKNLSEAFEEGYCRFEWMHQKPDGEPIPTEVTFVRVKFKGEYAVAAYVRDLRELKTMIAEMRRAEIAEESNKAKSEFLAKMSHEIRTPMNAILGITEIQLQDVNLPNSIKEALERIYNSGDLLLGIINDILDLSKIEAGKLELFPVQYEVSSLIYDTVKLNILRYENKPIEFALEVNENLPSALIGDELRLKQILNNLISNAFKYTHEGRINMHLSTEKGGNDSEVILVLVISDTGQGMTAEQVRRLGDKFSRFNTEVNRKTEGTGLGMNITQNLIQLMSGDMKIESTPGMGSTFTVRLPQKLTGEPPIGKELAENLMKLNIKNTSKFRNTQIIQEFMPYGRVLVVDDVESNLYVARGLLAPYGLSIDISISGFEAVDKIKAGNNYDIIFMDHMMPRMDGIEATKLIRSLGYTGAIVALTANALAGQEEMFLKNGFDDFISKPIDIRQLNNSLNKLIRDKKPGGSSRGSASAKRQTFRGSRP

SEQ ID NO: 29175 - DNA, 735 bp, Unknown
  Obtained from environmental sample
  misc_feature (1)..(735): n is a, c, g, or t
ttggggatatcgcggcggcacgtcaagattgagttggacgcttccggagcctacatgctcacagacctgaattcgctgaacggcacgctggtcaacggtaagaaggtcaaaaagacgacgcttgcaaacggcgacaagatcaccatcggcaaatacactatcgtctatgaggacctgcgcggcgagtcggcgctgcacctcgagaccatagtcgcggaattcaggcctgaggacctgcagaatatggcgcagtcgccagggttaccgccgcagacggttccgcaacatcaagcgacgccgatccaaatgatgccgccgcaagcggtcgcgccgcccgtcgctatgccgccgccggtagcggcgccgatatcgtacccgccgccgcaacaaccgcaagcggcgcctataccgctgcagccccctaacactccgattgacgaagaggcgctcaccggcgccgtgctaatagaaaccaccggccacgtcgtctataggctcgaccgcgactacctcactatcggctcggacgagggcgacgacatatacgccgccggattcatggtcaacaagagcttcgccgctatagagaaacgcgacggcggcttctacataaccgcgcaaaaaatgatggccaaggtcaaggttaacggaaaaagcgtgcgaacccaccgactggaacacagggacaggatcgagatcggctcgaacacgttccgattcatggaaaacggatag

SEQ ID NO: 29176 - protein, 244 aa, Unknown
  Obtained from environmental sample
  DOMAIN (3)...(50): FHA domain
  misc_feature (1)..(244): Xaa is any amino acid
MGISRRHVKIELDASGAYMLTDLNSLNGTLVNGKKVKKTTLANGDKITIGKYTIVYEDLRGESALHLETIVAEFRPEDLQNMAQSPGLPPQTVPQHQATPIQMMPPQAVAPPVAMPPPVAAPISYPPPQQPQAAPIPLQPPNTPIDEEALTGAVLIETTGHVVYRLDRDYLTIGSDEGDDIYAAGFMVNKSFAAIEKRDGGFYITAQKMMAKVKVNGKSVRTHRLEHRDRIEIGSNTFRFMENG

SEQ ID NO: 29177 - DNA, 1311 bp, Unknown
  Obtained from environmental sample
  misc_feature (1)..(1311): n is a, c, g, or t
atgatcaaacagccaagcgaggaagaaataactaaaatcttccgaagcatgaagaaattcggagaggaagatatatacaactgtacctgctgcggttacggaaactgtaaatcaatggcgaaggcaattttcaacaaacttaacaaagcggaaaattgcgcccattatattcttgccctgctcacggaaaaaaccaataccgaagaacttaaccgtcagcttcaggaacatatcgctcaggcgtccggccttatcgaaggaattaacaaattaattaataaactgaacgccgccatcatttcacaggcggatacaatcgctcaatcttcggcggcaaccgaaaaaatgatcgactcactcagggaaacttcggaaatttcccgaaaaaaacaagtggccattaaaggattgatagaagacacagccaaaagccagacatccatgcgcgagacgattcagtcgattgaagaaatttcaaaatcagttgaaggcatatcggaggcgattaaaataatcagcgcgatagcggctaacaccaatttattgtccatgaacgcggcaattgaatccgcgcacgcgggagaggcgggcaggggcttcgcggtggttgccggcgaaatacgccgcctttccgacagcacccgtgaaaattcggtgaacattgccaagacgctgaanagcattatcaacggagtaactgttacagaaaaacaatcgggcgacaccggaacgcggattacccgcatggcaaaagaaatcagcagtttcgccgaaaccatgaccggcataatcaataccttcggcgaactgtcggcgcaaagcggcgagataaccaacacgctggatgaacttcaaagccaaagcgaaatggtaaaaaccgattacgctgatatactgacaatgacggaaaaactgcacacggcaatgcatgatttgactatgctgtcaaagaaaaaggtgcttgtaattgatgatgacgagcccgtccttatcatggtaaaagacgcgctgcaaaacagttgtaatgttaccgctattaattccggcaaagcggctttggacttgttcctgcaggggtatattcctcatttggttttactggatttaaatatgcctgaaatgggcggctgggacgcctttgtcagaatacgcaacataacccaattacaccgcatccctatagcaatattcacgtcatcagacgaccggaaagacaaggaaaaagcgctggaattgggggcgattgaatacattcataaaccgatcagcatagatgaattgcaggaaaaaataacaaaattgacgggctaa

SEQ ID NO: 29178 - protein, 436 aa, Unknown
  Obtained from environmental sample
  DOMAIN (76)...(315): Methyl-accepting chemotaxis protein (MCP) signaling domain
  misc_feature (1)..(436): Xaa is any amino acid
MIKQPSEEEITKIFRSMKKFGEEDIYNCTCCGYGNCKSMAKAIFNKLNKAENCAHYILALLTEKTNTEELNRQLQEHIAQASGLIEGINKLINKLNAAIISQADTIAQSSAATEKMIDSLRETSEISRKKQVAIKGLIEDTAKSQTSMRETIQSIEEISKSVEGISEAIKIISAIAANTNLLSMNAAIESAHAGEAGRGFAVVAGEIRRLSDSTRENSVNIAKTLXSIINGVTVTEKQSGDTGTRITRMAKEISSFAETMTGIINTFGELSAQSGEITNTLDELQSQSEMVKTDYADILTMTEKLHTAMHDLTMLSKKKVLVIDDDEPVLIMVKDALQNSCNVTAINSGKAALDLFLQGYIPHLVLLDLNMPEMGGWDAFVRIRNITQLHRIPIAIFTSSDDRKDKEKALELGAIEYIHKPISIDELQEKITKLTG

SEQ ID NO: 29179 - DNA, 930 bp, Unknown
  Obtained from environmental sample
  misc_feature (1)..(930): n is a, c, g, or t
atgaacaaattggcgtcttccatacttgcgctttacacttatgacgaagatccggaaaaccagtcgccggaaaatgttttgcgccagtgccttgagcttattgcgcgttttccgaccattgtcgcgtattcctatatggcaatgaagcattattttcataaagaaagccttgtaattcatcaggttgatccttcctgctccattgcggaaacgctgctctcgcttatcagaccggatcaaaaatacacccaatacgaggctcagcttctggatttggctttggtgcttcacgcggaacacggcggcggtaacaactcaacatttgccatacatgttatttcttcttctgataccgatacttattccgcaatttccgccgggattggctctcttaaaggttttaagcacggcggcgcaaacgcgaaagttattgaaatgatggacgatgttaagaaaaatgtaaaaaattgggagaacgaaaaggaagtcgccgaatatctggaaaaaatattaaagggaaaagctaacgacggcacaggattaatctatggtcagggacacgctgtttacacaataaccgatccgcgcgcttctttgttacgcgacaaggccgaagctcttgccgaagaaaaaggatttataaaagagtttaacctttaccgcctgatagaaaggcttaccccgtctgtttttaaacaggttaaaggttcggacaaggatatttgtaccaatgtcgatttttattcgggctttgtctataaaatgcttggaattccgccggaacttaacaccccgattttcgccgtaagcagagcagccggctggtgcgctcaccgcctggaagaaataatcaccggcggaagaattatccgcccggcgtacaagtgcattcaactgcgccatctgtacacggaaatagacaagcgttag

SEQ ID NO: 29180 - protein, 309 aa, Unknown
  Obtained from environmental sample
  DOMAIN (1)...(292): Citrate synthase
  misc_feature (1)..(309): Xaa is any amino acid
MNKLASSILALYTYDEDPENQSPENVLRQCLELIARFPTIVAYSYMAMKHYFHKESLVIHQVDPSCSIAETLLSLIRPDQKYTQYEAQLLDLALVLHAEHGGGNNSTFAIHVISSSDTDTYSAISAGIGSLKGFKHGGANAKVIEMMDDVKKNVKNWENEKEVAEYLEKILKGKANDGTGLIYGQGHAVYTITDPRASLLRDKAEALAEEKGFIKEFNLYRLIERLTPSVFKQVKGSDKDICTNVDFYSGFVYKMLGIPPELNTPIFAVSRAAGWCAHRLEEIITGGRIIRPAYKCIQLRHLYTEIDKR

SEQ ID NO: 29181 - DNA, 615 bp, Unknown
  Obtained from environmental sample
  misc_feature (1)..(615): n is a, c, g, or t
atgcagaagaaaacatctaaatcgaatgatgatatgctcaatacatattacaaacaaatcaagaatttccctcttttaacttttgaagatgaactggaattatcaaggaagatacttgaaggagataaagatgctctgcataaacttgtaaattccaacctgcggctggtagtaaaaattgccggattgtacagtaaatacaatgtttcccttttggatattattcaggaaggaaatatcggattgatccacgcggcgggaaaatacgattaccgaaagaatgtccgtttttgcacttacgcaagctggtggatacgccagtttataagccgtttcctttccaacaaaagcaggatggtgcgtttaccgacccggaaagaggaagccctgcgcaaaatacaatatacataccatgtactttgccaaactttgatgcaccagcccggaaattccgatattgccaaagagcttggtatttccgttcaggatgttgattctattgttaatatggcggcaaattccgtgtcatttgagcagaataattcggatgaagaaacacncacgccattgatattcacgaagactatacctattgcccggagcggacgtttatga

SEQ ID NO: 29182 - protein, 204 aa, Unknown
  Obtained from environmental sample
  DOMAIN (10)...(46): Sigma-70 factor, region 1.2
  misc_feature (1)..(204): Xaa is any amino acid
MQKKTSKSNDDMLNTYYKQIKNFPLLTFEDELELSRKILEGDKDALHKLVNSNLRLVVKIAGLYSKYNVSLLDIIQEGNIGLIHAAGKYDYRKNVRFCTYASWWIRQFISRFLSNKSRMVRLPTRKEEALRKIQYTYHVLCQTLMHQPGNSDIAKELGISVQDVDSIVNMAANSVSFEQNNSDEETXTPLIFTKTIPIARSGRL

SEQ ID NO: 29183 - DNA, 354 bp, Unknown
  Obtained from environmental sample
  misc_feature (1)..(354): n is a, c, g, or t
gtggtcggcttttttcttgtgcacaatatcccatttgggaacagaatctcaaaagcctcccaggcgttgtccacaaaatggactttaagggtctttttaatgtcagcgctcaactcttcccattcttccttgttgtctgccgggagaagaacttcttccattccgtttcttattgccgcaaggagcttttccttaagcccgcctatgggaaggatgcggccggtaagggtaagctccccggtcatggcaaagcccggttttggcgggacctggcaaagggttgaaagtagcgaggccgccagggttatgcccgctgaaggtccgtctttgggaattgcgccttcgggaacgtga

SEQ ID NO: 29184 - protein, 117 aa, Unknown
  Obtained from environmental sample
  misc_feature (1)..(117): Xaa is any amino acid
MVGFFLVHNIPFGNRISKASQALSTKWTLRVFLMSALNSSHSSLLSAGRRTSSIPFLIAARSFSLSPPMGRMRPVRVSSPVMAKPGFGGTWQRVESSEAARVMPAEGPSLGIAPSGT

SEQ ID NO: 29185 - DNA, 765 bp, Unknown
  Obtained from environmental sample
  misc_feature (1)..(765): n is a, c, g, or t
gtggttggagggtggcgggtacacaatatgaggtatgtggtagggttatttcagttcgactttaaagacaaggaaaagaggcttatgtcagacaaacctaagttaaaaaaagcgatgcacgacgacgtgtggcgtatcttcaggataatggcggagttcgtggaggggtttgagaccctctctaagttcgaccattgcgtgactattttcggcagcgcgcgaacgcatgttgaccatccgcactacaagttggcggtggatgtcgccaagcttgtctctcggagcggctacggcgtgattaccggcggcggtccgggtataatggaagccgcaaacctcggcgcgcaagaggagggaggcgtctccatagggctcaacatacaacttccgtttgagcagcacccgaatccatacataaaaacaatgctcaacttcaaacacttcttcgtacgcaaggttatgttccttaaatatacatccgccgtcatagttatgcccggcgggtacggcacgctcgacgaaatgttcgagacccttacgctagtgcaaacgcaaaaggtggacgccatgcccgttgttcttatggggaaagattactgggcggggcttgtcgattggctgaaaaccaaaatgctggacgagaacaaatacatagaccccgacgatattccgctcatgtacataacggacgatccggaggaggctgtgcgggtgataaatgagcgcttaaagaatagggaacccgcgtcgagtttcgagctgtaa

SEQ ID NO: 29186 - protein, 254 aa, Unknown
  Obtained from environmental sample
  DOMAIN (108)...(242): Possible lysine decarboxylase
  misc_feature (1)..(254): Xaa is any amino acid
MVGGWRVHNMRYVVGLFQFDFKDKEKRLMSDKPKLKKAMHDDVWRIFRIMAEFVEGFETLSKFDHCVTIFGSARTHVDHPHYKLAVDVAKLVSRSGYGVITGGGPGIMEAANLGAQEEGGVSIGLNIQLPFEQHPNPYIKTMLNFKHFFVRKVMFLKYTSAVIVMPGGYGTLDEMFETLTLVQTQKVDAMPVVLMGKDYWAGLVDWLKTKMLDENKYIDPDDIPLMYITDDPEEAVRVINERLKNREPASSFEL

SEQ ID NO: 29187 - DNA, 306 bp, Unknown
  Obtained from environmental sample
  misc_feature (1)..(306): n is a, c, g, or t
gtgccgcaggaggctttcgctaaattgttcatcggcaacaggggattcggcgttctgatggcggcggccataggcgtccccttgtacgtatgcggcggcggcactatcccgctgcttcgggcgtggatggatcacggcatgacgctcggctccgcctcggccttcatgattaccggccaagccatgaagataacaaacctcggagcggtaaagatcgtccttggtatgaaacacttcttgctgttccttctgtacaccgccctgtttgcatttattagcggggttgcgattgatttgttgttttga

SEQ ID NO: 29188 - protein, 101 aa, Unknown
  Obtained from environmental sample
  misc_feature (1)..(101): Xaa is any amino acid
MPQEAFAKLFIGNRGFGVLMAAAIGVPLYVCGGGTIPLLRAWMDHGMTLGSASAFMITGQAMKITNLGAVKIVLGMKHFLLFLLYTALFAFISGVAIDLLF

SEQ ID NO: 29189 - DNA, 393 bp, Unknown
  Obtained from environmental sample
  misc_feature (1)..(393): n is a, c, g, or t
ttgcgcattttttgcgcggggcttttcaaatacgaaaccctgcccaccattccatatccaaccataaaaacacccatacctaaaaactatcgcggaatgcaccgcctgctgaaaagagcagatggctcgccccgttgcgttgcctgcggaatgtgcgcagccgcctgtccggcaaggtgcattagagtggatggaggggaatctccaaatgggcaagttgaaaagcaggcagttcgatttgaaatagattatttggcttgtgtgttttgcgggctttgcgtggaggcttgcccggcagatgccataagaatggatacgggaataacttcttttgtgcacgactcacgcgaaaaattcgtagcagatatgcaaaagctattgaaggcaggttaa

SEQ ID NO: 29190 - protein, 130 aa, Unknown
  Obtained from environmental sample
  DOMAIN (39)...(62): 4Fe-4S binding domain
  misc_feature (1)..(130): Xaa is any amino acid
MRIFCAGLFKYETLPTIPYPTIKTPIPKNYRGMHRLLKRADGSPRCVACGMCAAACPARCIRVDGGESPNGQVEKQAVRFEIDYLACVFCGLCVEACPADAIRMDTGITSFVHDSREKFVADMQKLLKAG

SEQ ID NO: 29191 - DNA, 411 bp, Unknown
  Obtained from environmental sample
  misc_feature (1)..(411): n is a, c, g, or t
atggtttttcaggatccgagcgcttcgctgaacccggtaaaaaaaatcggctggctactggaagagccgctgattatccaccgtctgggcacagcggcggaacgttcccgcaaagtcgatgaaatgcttgagcgcgtcggacttgatccctcatacaaaacacggcgggtacatgagctttccggcggtcagaaacagcgcgcctgtatcgcccgcgccctgatgctggattcaaaaattcttatcaccgacgaagccatcagttctctggacatttctgtcggcatacaaatactcaaccttttccgcgaactgcgcgaaagcctggggctgaccattcttttcatttcgcataacatcagcgcggtggaatatttgtgtgatcgtatggtggtgatggcagactcatga

SEQ ID NO: 29192 - protein, 136 aa, Unknown
  Obtained from environmental sample
  DOMAIN (1)...(136): ABC transporter
  misc_feature (1)..(136): Xaa is any amino acid
MVFQDPSASLNPVKKIGWLLEEPLIIHRLGTAAERSRKVDEMLERVGLDPSYKTRRVHELSGGQKQRACIARALMLDSKILITDEAISSLDISVGIQILNLFRELRESLGLTILFISHNISAVEYLCDRMVVMADS

SEQ ID NO: 29193 - DNA, 432 bp, Unknown
  Obtained from environmental sample
  misc_feature (1)..(432): n is a, c, g, or t
atgtgcaatttatccccgccggggccggtttcaagacgccatgccccgcttgaaccaccgcctgtggcgccgccgccactggaagcggcaccgccgccgctgcaggtgataatttccagtccagcgaccgcggcggtggcggccagagcctcgcccctgaaaccgagcgtttccacggtatccagatcgtcaagacaacggatcttgcttgtcgcgtgtggaagaacgcatttttcaaggttttccctgtccatgccggagccgttatctgacacttcggctttttttgcgccgccgccctcaatcgaaacctctataacggaggctccggcatcaatagcgttgtcaatgaattccctgattagggccgccggcctgtcgattacctcaccggccgctatacgcctggcctcctgcggaggaagcacctga

SEQ ID NO: 29194 - protein, 143 aa, Unknown
  Obtained from environmental sample
  misc_feature (1)..(143): Xaa is any amino acid
MCNLSPPGPVSRRHAPLEPPPVAPPPLEAAPPPLQVIISSPATAAVAARASPLKPSVSTVSRSSRQRILLVACGRTHFSRFSLSMPEPLSDTSAFFAPPPSIETSITEAPASIALSMNSLIRAAGLSITSPAAIRLASCGGST

SEQ ID NO: 29195 - DNA, 879 bp, Unknown
  Obtained from environmental sample
  misc_feature (1)..(879): n is a, c, g, or t
ttggagcccggctttcatctttggcactacctaaaatacttcgccggaccacccgcctccatcaggggggcgtccgaaacagacccgaccgtaatgctgaccacagacggcacactagtggaatctattgaggacggaatacgctttaaggcccttaatagaaaagttacatctatattcgtagatgtggaattcagggataacgaagcggtggaaatgctcatcgaatggaccgatgaaggggttacgcaacaatatgtcaaacgactttacaaatacctgccgcacgaaaattacgcgctactccaatcttgcggaaaagttcaggaccttacgatcacattttacggtaaacccgatgagtcaatcggtatcgccgatgtcgtaatagataaacccattcctttttatttcagcggattgcgaattttaatcgtttcactattactatcggtgatctttactctcgtaaataaaacccttcgcgcaaaggcggcgtattatttatttgagtataggtttgacccgaaaaataagaaacaaaatattatttacgcttgtacggttgctttggtggtgcttttttcgtgggtttgcgtctatacttcggtcgccgatagatacgaggacgtctcgaggcattattctcaatacaataaattcttggtcgacgcgcttatagccggcaaaacatatttggaccgtggaaatcctgaagcgttgcttaacgccgaacgcccttatgatcccatttggcgaaaaactaacggatactatgagacgacggataaagaggcttttgattgggcatggtacaagggaaaatattattgttattttgggggtgtcccccgccgtactcctttatgttccatataa

SEQ ID NO: 29196 - protein, 292 aa, Unknown
  Obtained from environmental sample
  misc_feature (1)..(292): Xaa is any amino acid
MEPGFHLWHYLKYFAGPPASIRGASETDPTVMLTTDGTLVESIEDGIRFKALNRKVTSIFVDVEFRDNEAVEMLIEWTDEGVTQQYVKRLYKYLPHENYALLQSCGKVQDLTITFYGKPDESIGIADVVIDKPIPFYFSGLRILIVSLLLSVIFTLVNKTLRAKAAYYLFEYRFDPKNKKQNIIYACTVALVVLFSWVCVYTSVADRYEDVSRHYSQYNKFLVDALIAGKTYLDRGNPEALLNAERPYDPIWRKTNGYYETTDKEAFDWAWYKGKYYCYFGGVPRRTPLCSI

SEQ ID NO: 29197 - DNA, 387 bp, Unknown
  Obtained from environmental sample
  misc_feature (1)..(387): n is a, c, g, or t
gtgcgcgcggatcctttgattaagccctatctgaaatgggcggggggaaaacggcagcttttgccggagatacaaaagcaccttccggataattttgataagctgcgttattatgagccgttcattggcgccggcgcattgttttttaccaaccagccgcgcagagccgtgattagcgattccaatgaggagctcattcttacctacagagccatacaagagcatattgatgaacttatcgaagcgctggaggcgcatgaagcgcgcaatagcgaagaatattattatcaaatacgcgaacaagatcgtaaccgggaagcgtatgcgcaattttccgatgtgtacaaagcggcgcggctgatgtatctgaataaaaccctgttataa

SEQ ID NO: 29198 - protein, 128 aa, Unknown
  Obtained from environmental sample
  misc_feature (1)..(128): Xaa is any amino acid
MRADPLIKPYLKWAGGKRQLLPEIQKHLPDNFDKLRYYEPFIGAGALFFTNQPRRAVISDSNEELILTYRAIQEHIDELIEALEAHEARNSEEYYYQIREQDRNREAYAQFSDVYKAARLMYLNKTLL

SEQ ID NO: 29199 - DNA, 585 bp, Unknown
  Obtained from environmental sample
  misc_feature (1)..(585): n is a, c, g, or t
atggtacaggcaatttcgcgtgtggatacgtcgggtataacgctgcccgcgggcggctttggcgcgggcatagggatcaattttggcgactgcgttgtcgggaatatcggatttcaggacaagctggactatacggttatcggcgatgcggtcaatctcgcgtcgaggctggagggcgttacgaagtattaccatcagcatatcatcgtttccgagaatgcctatggcgcggcaaggaatgatttcattttccggaaggccgacagtgttcgcgtgaagggcaaggatcagccggtcgggctctatacggtctacgccgcgtggcggggcgaagcgatgggtgaaatgccggaggctctggtcattgatcgcgatgctctcgacaattataataagggattaaaactctacgcgatgcgcgagtgggagaccgcaaaacagtacttccagaaaacactgttgatattcgaaaaaacaggcggcgaggattatctctccacgctgtacctgacgcggatatcggagtatcaggtcaatccgccgccgcccgactgggacgcgacgatcaccatgacggaaaagtag

SEQ ID NO: 29200 - protein, 194 aa, Unknown
  Obtained from environmental sample
  misc_feature (1)..(194): Xaa is any amino acid
MVQAISRVDTSGITLPAGGFGAGIGINFGDCVVGNIGFQDKLDYTVIGDAVNLASRLEGVTKYYHQHIIVSENAYGAARNDFIFRKADSVRVKGKDQPVGLYTVYAAWRGEAMGEMPEALVIDRDALDNYNKGLKLYAMREWETAKQYFQKTLLIFEKTGGEDYLSTLYLTRISEYQVNPPPPDWDATITMTEK

SEQ ID NO: 29201 - DNA, 828 bp, Unknown
  Obtained from environmental sample
  misc_feature (1)..(828): n is a, c, g, or t
gtggtgaacgatagggtgcaaaacattgaaaaactggcagcagaagtggaaaactgggttccaaatttgcgtgttgccattgcccacgcccaaatgtcagatagcagtttggaaaaaactatgtctgcttttataaatagggaatttgatgttttggtttgcactgttttaatagaatctgggcttgatgttccgaatgcaaatacgataataattatgaacgcacagcagtttggggttgggcagctctatcagttgcgtggcagggttgggagatcttcggttcaggcgagggcttttttggtggttccagaaggcgaggttggagtttcaaaatctgcaaaaaagcgacttgccgctatggaacaattcacagatttaggttctggttatcaggttgctatgcgagatttggaaattcgcggtgcaggaaatttgctgggaatggagcagcacggatttatagaggaaatcggttttgaaacttatgttagaatggttaaggaagcggttgcggagttgctaggtacgcagagcgattcttctgttcagccaaggcttgaactccgcgtggatgcttatttgccggaaacttggataaaagacggcttggcaagaatttccatttaccaacgcattgcgagaatagaagcaagcgaagaaatatccgcccttgccggagaacttagagaccgctttggtccaattccaaaaccagcggaaatgcttttgacatctgcggatattggactaaaagcaaaaaaactttctgtcacaggcatagctcgcaaacaaggtgttgccgtttttactttctcaaaaaaataa

SEQ ID NO: 29202 - protein, 275 aa, Unknown
  Obtained from environmental sample
  DOMAIN (188)...(275): TRCF domain
  misc_feature (1)..(275): Xaa is any amino acid
MVNDRVQNIEKLAAEVENWVPNLRVAIAHAQMSDSSLEKTMSAFINREFDVLVCTVLIESGLDVPNANTIIIMNAQQFGVGQLYQLRGRVGRSSVQARAFLVVPEGEVGVSKSAKKRLAAMEQFTDLGSGYQVAMRDLEIRGAGNLLGMEQHGFIEEIGFETYVRMVKEAVAELLGTQSDSSVQPRLELRVDAYLPETWIKDGLARISIYQRIARIEASEEISALAGELRDRFGPIPKPAEMLLTSADIGLKAKKLSVTGIARKQGVAVFTFSKK

SEQ ID NO: 29203 - DNA, 456 bp, Unknown
  Obtained from environmental sample
  misc_feature (1)..(456): n is a, c, g, or t
ttgctgtattatcggaccgatacccactggaacgccctgggggcctatgaagctttcgagggtttccggggctatatgggcttgccgcctctgcccccactcactttgaccgagtcgccggccttttgcaaaggtgatctggtggccatagggggatatgaggaattcccattaactacaggcgactgttttgaacttgattggggcgagtctcagcccccgccgaccgtggtctttggaaaagacgaccgatacctgaacgccaaagcggctaccgacaaatctgtctgggtatttggggattcattttccaccgcgcttctaccttatataatggcaacttttaaagacaccagatatttttttaataaagaagtggagacgcttcttgaccctcggaagcccgggcctgatttggtcattgtggaaatagtggaaagggtttttggcaattaa

SEQ ID NO: 29204 - protein, 151 aa, Unknown
  Obtained from environmental sample
  misc_feature (1)..(151): Xaa is any amino acid
MLYYRTDTHWNALGAYEAFEGFRGYMGLPPLPPLTLTESPAFCKGDLVAIGGYEEFPLTTGDCFELDWGESQPPPTVVFGKDDRYLNAKAATDKSVWVFGDSFSTALLPYIMATFKDTRYFFNKEVETLLDPRKPGPDLVIVEIVERVFGN

SEQ ID NO: 29205 - DNA, 531 bp, Unknown
  Obtained from environmental sample
  misc_feature (1)..(531): n is a, c, g, or t
ttggaatcaagaacgcgcctggccctgcgtaaggggtcccggatcatgctcatacaatcaggggccatgatgcccgatgaacccatgagcgcggccttgggtaaatactacgaggtttcggttttttccggcgttccggctaagaccggcggcgcgaacgcctcggctatccggctggccgcggccaaggcgggctgtcaaacggtcatggtttactggggcctcttggagacggcccaaaagggggaaggcggcaaaatcatttcctggctgcccatctttgggggcgcggtgcctgatgaatcccaggaaatgcgcatccgtataaaaacggcgctcattgatgtgcgaagcggccaatgggagtcatatgcgccggagccttttcaggtcagggcctggagcgcgcgcttcacccgggaagcctcggaccaggcccaggtggcctttctcaaaaccaaggcttatgaggcgctggttgaagatatcgtgaaaatatatgcaaccaggggaaggggacgaagcgactga

SEQ ID NO: 29206 - protein, 176 aa, Unknown
  Obtained from environmental sample
  misc_feature (1)..(176): Xaa is any amino acid
MESRTRLALRKGSRIMLIQSGAMMPDEPMSAALGKYYEVSVFSGVPAKTGGANASAIRLAAAKAGCQTVMVYWGLLETAQKGEGGKIISWLPIFGGAVPDESQEMRIRIKTALIDVRSGQWESYAPEPFQVRAWSARFTREASDQAQVAFLKTKAYEALVEDIVKIYATRGRGRSD

SEQ ID NO: 29207 - DNA, 834 bp, Unknown
  Obtained from environmental sample
  misc_feature (1)..(834): n is a, c, g, or t
atgccccgttccctgaagaccgcgcattcaagccctatcgacacttttgtagagttgaaccccggtgattacatcgtccatgttaatcatggtatcggcctgttcaagggcatagaaaggattaatacgtttggttttgaacgggactatatccagcttgaatacgcgggggatgaaacgatatttgtgccggtggaacaggtaaatctggttcagcgttacatcggcaatgagggccagccgccgcgtctggacacggtaggatcaaaaagctgggagaaccgcaagggccgggtcaagcaatccgttgaagatatagcccagcggctcattgacctgtattcaaagcgcaagcggtcgcagggttttgcctttccccaggactcggaatggcagaccatgtttgaggcggcctttccttttgaggaaaccgaggatcagctccgctgtgtagaggaaatcaaacaggacatggaaagctccagccccatggaccggctgatctgcggggacgttggctacggcaagaccgaagtcgcggtacgggcgtgcttcaaggcgatcatgggcggcaagcaggcggcgtttcttgcccccaccacgattctggttgaacagcattatgaaaattttcaggagcgtttttcccgttttcccgtgcgtatcgccatgctttcccgttttgttgaccgcaaaaatatccgactagttttggaacaggtcaaaaacggcgagattgatctgctggtgggaacccaccgtatcattcagcgtgatgtgcaattcaagaatctggggctgatagtaattgacgaggaacagcgtttggcgtaa

SEQ ID NO: 29208 - protein, 277 aa, Unknown
  Obtained from environmental sample
  DOMAIN (144)...(277): DEAD/DEAH box helicase
  misc_feature (1)..(277): Xaa is any amino acid
MPRSLKTAHSSPIDTFVELNPGDYIVHVNHGIGLFKGIERINTFGFERDYIQLEYAGDETIFVPVEQVNLVQRYIGNEGQPPRLDTVGSKSWENRKGRVKQSVEDIAQRLIDLYSKRKRSQGFAFPQDSEWQTMFEAAFPFEETEDQLRCVEEIKQDMESSSPMDRLICGDVGYGKTEVAVRACFKAIMGGKQAAFLAPTTILVEQHYENFQERFSRFPVRIAMLSRFVDRKNIRLVLEQVKNGEIDLLVGTHRIIQRDVQFKNLGLIVIDEEQRLA

SEQ ID NO: 29209 - DNA, 384 bp, Unknown
  Obtained from environmental sample
  misc_feature (1)..(384): n is a, c, g, or t
gtgtattcggcaagcgtaaacggcatgatggtaggacagctctccggtttcttttacggactcgtgcaggattttctttccgcctcccccatcggccttaacgcgttaatccgcgctctgctcggcgctcttgccggcctgttgaaagggaacttactccttgatgttttccttatcccgatgatactctgcgccctggccacgcttctcaaggcctttatgctttttttattgcacttgctttttggcgaagcggtccacgcgtacccgcttaccaccccgttattatgggcggagatggcgttaaacacgattaccgcgccgtttcttttcgcgtttctcaaacgctttaaaacgcttcttgcggggaaggagctggtttaa

SEQ ID NO: 29210 - protein, 127 aa, Unknown
  Obtained from environmental sample
  misc_feature (1)..(127): Xaa is any amino acid
MYSASVNGMMVGQLSGFFYGLVQDFLSASPIGLNALIRALLGALAGLLKGNLLLDVFLIPMILCALATLLKAFMLFLLHLLFGEAVHAYPLTTPLLWAEMALNTITAPFLFAFLKRFKTLLAGKELV

SEQ ID NO: 29211 - DNA, 1368 bp, Unknown
  Obtained from environmental sample
  misc_feature (1)..(1368): n is a, c, g, or t
gtgactgccttcggtttattaggacaccatcattatacgcaatttttctcattggtaattaaacggcgttgccggataaaaaattatatggagaggtttgagatgaaaaagacaagtgtggttttgttgttagggttttgcgcctgctgtttggtttttatgcagggatgttccaggaagacggcggttaatgaagcgcccaatacggatggcgggagcgtgctttccggctggaatgaagcggttgatacgattggtaggggcgtgccttccggctggactcttcacgatggtatgtattggaaatcctataatgacattgctgtggggaaagagtggaccgctgtgcaactgcaagggaacatagtggagcaagccatagttggctgcacgtttgccaatgccagcgagcaagccaggtggctaaaagaaagctatgatacgctcattgcgggcaagtgggaactggttatggaagatgccgattcctggattcttatgaaagaagataaattggctgccggtgttactaatgaatctgatggcactatttccgcttctgtggtgtttatggccgtaagctccttcggcgcgacagcggcagacggccacatcgaggaggaggactacgcagcatggacagccgtagatgtcagcagaatattcgacgacatctacgcaatcgcctatggaagcggcaagtttgtagcatgtggcggtaacggcaaaatggcgacctcaactaacggcgtaacatggacggcagtatcgaacagcacattcgacgaagaaggcatctattctatcgcttatggaaacaatatgtttgtcgccggagggtttagaggcaaaatggcgacctcaactgacggcgtaacatggaaagccgtaacgagcaccactttcgacagaaacgatagggtcatagtcgcctttggcaacggcacatttgtcgcaggcggaaatagaaaaatggcgacttcaactgacggtgtaacatggacagccagtaatgtattgaacgacaacggctacgtcgcagtttacaacgttaaagcaatcgcctatggcaacggcaagtttgctgcaggtggagataattatggcaaagtaattgcgtattcgtctgataatggcgcaacatggaaagacgtaacaatcaacacattaggcagtaccacatccgaaatctttacaattatctatgccaacagcaaatttgtcgctgggagcaataacggctacatgttgacttcaactgacggcgtaacatggacagcagtaaaggacaacacattaggattaaacgacatctacgcgatcacctatggcaacagcgaatttgtcgtgggtgacaggaacaggtga

SEQ ID NO: 29212 - protein, 455 aa, Unknown
  Obtained from environmental sample
  misc_feature (1)..(455): Xaa is any amino acid
MTAFGLLGHHHYTQFFSLVIKRRCRIKNYMERFEMKKTSVVLLLGFCACCLVFMQGCSRKTAVNEAPNTDGGSVLSGWNEAVDTIGRGVPSGWTLHDGMYWKSYNDIAVGKEWTAVQLQGNIVEQAIVGCTFANASEQARWLKESYDTLIAGKWELVMEDADSWILMKEDKLAAGVTNESDGTISASVVFMAVSSFGATAADGHIEEEDYAAWTAVDVSRIFDDIYAIAYGSGKFVACGGNGKMATSTNGVTWTAVSNSTFDEEGIYSIAYGNNMFVAGGFRGKMATSTDGVTWKAVTSTTFDRNDRVIVAFGNGTFVAGGNRKMATSTDGVTWTASNVLNDNGYVAVYNVKAIAYGNGKFAAGGDNYGKVIAYSSDNGATWKDVTINTLGSTTSEIFTIIYANSKFVAGSNNGYMLTSTDGVTWTAVKDNTLGLNDIYAITYGNSEFVVGDRNR

SEQ ID NO: 29213 - DNA, 894 bp, Unknown
  Obtained from environmental sample
  misc_feature (1)..(894): n is a, c, g, or t
atgtacagattggccgagtatcacggcggagtaacgtttagcgacggcgcgtcggccgttattcccatggcgaaaattaaacgcctttgcggattgctgacggatgttttctcatcgccgggcgggacctacggcggatgggtcggtgcgtcaaccctaacgtccgggcatgtcaaacatcttgtccgtgagttgatgtcaaagagtaacctaacgtttaggatgaatccgttcgatccgaacttacagtttattgattgtattgatagtattaacggcaatgcttccggtatcgaccgcaaagacgattttacccacgccctagacctgacccaagacatcgtccgcctccgcggcggaatctccaaaagcggcaaatacgcgataaacctctctgcccgcaacggcgtaacggtgaagcgggccgaaacgcttgacgaatgggagagttactacgggctgtacatagattccctaaagagatggcgggccggtaaactgaagacccgcaccgtttatccatttagtttattcagacgtatcttcgagaaccgctccggaaacgagattttgtggcttgcggtaaaagagggcgagccgatagccggcgcgctggtcttctattggaacaagcacgcggtaagctggcacggcgcgtcgtcgtcggagcattttagcgttaaaccgaacaacctgctctactgggagataataaaagacgcgatcaaacgcggctgccgcctgttcgatttcaaccccagcggcggctacggcggcgtagagtccttcaaaagccacttcggagcgcaacagctgcccgccccggtaataacggcaaggtcgccgctgcgccggatggccgcggggttacgggggaaattaggaaatgtataa

SEQ ID NO: 29214 - protein, 297 aa, Unknown
  Obtained from environmental sample
  misc_feature (1)..(297): Xaa is any amino acid
MYRLAEYHGGVTFSDGASAVIPMAKIKRLCGLLTDVFSSPGGTYGGWVGASTLTSGHVKHLVRELMSKSNLTFRMNPFDPNLQFIDCIDSINGNASGIDRKDDFTHALDLTQDIVRLRGGISKSGKYAINLSARNGVTVKRAETLDEWESYYGLYIDSLKRWRAGKLKTRTVYPFSLFRRIFENRSGNEILWLAVKEGEPIAGALVFYWNKHAVSWHGASSSEHFSVKPNNLLYWEIIKDAIKRGCRLFDFNPSGGYGGVESFKSHFGAQQLPAPVITARSPLRRMAAGLRGKLGNV

SEQ ID NO: 29215 - DNA, 537 bp, Unknown
  Obtained from environmental sample
  misc_feature (1)..(537): n is a, c, g, or t
atgtataaaaacggtatgagtcgtgaaaaagcgcgagcaaaactgacggcgttaataggagggccatacaagcatgtgctgctaaagaacgatcatgatggcgaagaggtcacattgagtaacacttctgtcggcaagatgttgtcggctacggcagtccgtaaatctgagaataatggttttaccaaagaacagcattttgcggtggtttctgatataagcgacttattcagggtttcccttaaaattatgagccattccgacaaaaacaacaataaagatataaccatacatagatttgcggcaccgttgcattggtgcggcgcgattgtgtatatcactgtaaaagagagtgcgcaggatggtaaacgtgtatatagcgctgaacttacagaaatagaaaaactcggaggtgctttagaaaaggcgagagaactctctcacactcctccctctccgagcttatataaagacaacatacggaaactctggtccggcaaccgatacccgaaagactccaagtttgaacgtctgtaa

SEQ ID NO: 29216 - protein, 178 aa, Unknown
  Obtained from environmental sample
  misc_feature (1)..(178): Xaa is any amino acid
MYKNGMSREKARAKLTALIGGPYKHVLLKNDHDGEEVTLSNTSVGKMLSATAVRKSENNGFTKEQHFAVVSDISDLFRVSLKIMSHSDKNNNKDITIHRFAAPLHWCGAIVYITVKESAQDGKRVYSAELTEIEKLGGALEKARELSHTPPSPSLYKDNIRKLWSGNRYPKDSKFERL

SEQ ID NO: 29217 - DNA, 894 bp, Unknown
  Obtained from environmental sample
  misc_feature (1)..(894): n is a, c, g, or t
ttgcggattttttcgcccgcaccggaagccgcccttccttatattgaaggagttcccggcatcaagggagtctggtcagagcggcacggcctgggcgttgtctatcacggctcgttctcaaagggcgtaacaatcagggcggtggaaaaatccttttgggaagatcctggctcgatgaagtacctcaagatactttcaggcgaggcgaatacggatgacgacagggatgttttattgggcgaagacctggccaattccataggcgcttcagcgggcagcacggtaaggatcatgaccatccgttcatcctccggcagtcgttatgttcccagggtaacgtcatttaccgtgaggggaataatcagctcaggttaccgcgaactggattcactatggtgcattatgagtcttgaagcggggaagcagatcatgcaggattcaagcacgtcgtttctcatgctcaaaatcgataatccatacactgaagctgaaaccatggccaatacgctctataatgttttggattccgacttcggcgtctacacatggaaaacccttcagcgttcccagtacagctcctatgaatcaacccgccagctccttctttttatcatggctttgattgtgcttgtggcctcggttaacgtatcatcggctacttcgatgctggtaatcgaacgccaaagggacatcgccgtcttaaaagcgtccggggccgggccttcctttacgagcgcagtatttttgtggggcgctttcttaaccggccttgcgggatcagttttcgggatcgccgctgggcttgccataggctgttcggtgaacaccctgataagggctctggaaagggcgttgacttttttttcagggcattttcacggcggcccggtttaa

SEQ ID NO: 29218 - protein, 297 aa, Unknown
  Obtained from environmental sample
  DOMAIN (156)...(296): Predicted permease
  misc_feature (1)..(297): Xaa is any amino acid
MRIFSPAPEAALPYIEGVPGIKGVWSERHGLGVVYHGSFSKGVTIRAVEKSFWEDPGSMKYLKILSGEANTDDDRDVLLGEDLANSIGASAGSTVRIMTIRSSSGSRYVPRVTSFTVRGIISSGYRELDSLWCIMSLEAGKQIMQDSSTSFLMLKIDNPYTEAETMANTLYNVLDSDFGVYTWKTLQRSQYSSYESTRQLLLFIMALIVLVASVNVSSATSMLVIERQRDIAVLKASGAGPSFTSAVFLWGAFLTGLAGSVFGIAAGLAIGCSVNTLIRALERALTFFSGHFHGGPV

SEQ ID NO: 29219 - DNA, 1263 bp, Unknown
  Obtained from environmental sample
  misc_feature (1)..(1263): n is a, c, g, or t
atggcaaaacttcgtaacggtcctgaagtatttgaaagagtctgctctttttgcggcaagagcgccgatatggcgcgccgcttaatcgcaggtcccaacgatgtttttatctgcgatgaatgtatagaagtttgccgcaaaattttaagcgaagaagagcacgagcttacctcgcattttacgggcgatattccgactccgcaggaaataaaaaaatatcttgatctatttatcatcgggcaggataacgctaaaaaagctctttccgtcgcggtttacaaccactataaaagaatcgcgaatcctccgtccaaagaaagcgatgaggttgaaattgaaaaatcaaatgttcttttaatcggtcctacgggaaccggcaaaaccttacttgcgaaaatcctcgctaaaaaactaaaagttccgtttgccattgtagacgctacaacccttacggaagccggttatgtcggcgaagacgttgaaaacatccttcttaaattaatacagagcgctggaggaaatatttccgccgcggaaagaggcatcgtttatatcgatgaaatcgacaaaatagctcgtaaaggcgaaaatgtttcgattacgcgcgatgtttcaggcgaaggcgttcagcaggcgcttttaaaaataatcgagggaactatcgcttccgttccgcctcaaggcggcagaaaacatcccaatcaggaaatgatccgcattgacaccacaaatattcttttcatctgcggaggagcttttgtgggactcgacaaattaatcgcccgccgcgtggtgaatcatccgttgggcttcgggtccgagggaggcggcggcgaaaaatccttaaaggagctttatgacgctatgcatccggacgatcttatccgtttcggaatgatccctgaatttatcggaaggcttcccattatcgtcggtcttgaggaattaagactcgaagatttaaaacgcatcatcactgaaccgcgcaacgctatcgtgcgccagtaccaggcgtctttggcttacgacaaagtaaaacttgagtttacggaaaaagcgattgacgcgatagcggacaaggcgattaaacaaaaaacaggcgcacgcggtttaagggcgattgtcgagaaactgatgactgatataatgtttgacattccttcgataccgggcgataaaaaaataataatttcccatgatacagtggaaaaatcggaaccgccgcagataatatatctggagcaaaaacaaaagagcgcataa

SEQ ID NO: 29220 - protein, 420 aa, Unknown
  Obtained from environmental sample
  DOMAIN (116)...(334): ATPase family associated with various cellular activities (AAA)
  misc_feature (1)..(420): Xaa is any amino acid
MAKLRNGPEVFERVCSFCGKSADMARRLIAGPNDVFICDECIEVCRKILSEEEHELTSHFTGDIPTPQEIKKYLDLFIIGQDNAKKALSVAVYNHYKRIANPPSKESDEVEIEKSNVLLIGPTGTGKTLLAKILAKKLKVPFAIVDATTLTEAGYVGEDVENILLKLIQSAGGNISAAERGIVYIDEIDKIARKGENVSITRDVSGEGVQQALLKIIEGTIASVPPQGGRKHPNQEMIRIDTTNILFICGGAFVGLDKLIARRVVNHPLGFGSEGGGGEKSLKELYDAMHPDDLIRFGMIPEFIGRLPIIVGLEELRLEDLKRIITEPRNAIVRQYQASLAYDKVKLEFTEKAIDAIADKAIKQKTGARGLRAIVEKLMTDIMFDIPSIPGDKKIIISHDTVEKSEPPQIIYLEQKQKSA

SEQ ID NO: 29221 - DNA, 600 bp, Unknown
  Obtained from environmental sample
  misc_feature (1)..(600): n is a, c, g, or t
ttggggcattcttcaggggcgcgcttcaaaaacaaactgcccgacaatattggaatcgcgtatacgattttcgtcaacgcggttccaccgctggtctcgtattcgcttatattgatctttggctcgcgtgttttgggtttcccgtccctgtactcgtcaagaaatccgggcatttccagcatacttccgattacctgtctggcgctgggcagcatagcgtggtgggcaatgtggaccaggcgttacatgatcgatgaaatcaacaaagattacataaaactggccaggataaaagggctttccacccagaaaataatggttaatcatgtacttagaaacgccttcgtgccgctggcccaataccttccggcaactttgctgatgacgattagcggttccttgctggcggaaaggttcttttccgttccgggcatggggcctttgctggccgattcaattaaccgttacgacgtaaacctcgttcaagcggtggttattctctattccaccatgagtatcctgggcgtgttcctgggagatgtgcttatgatgatcgttgatcccaggataacgcttaccaaaaagaagggaacaagatag

SEQ ID NO: 29222 - protein, 199 aa, Unknown
  Obtained from environmental sample
  DOMAIN (1)...(192): Binding-protein-dependent transport system inner membrane component
  misc_feature (1)..(199): Xaa is any amino acid
MGHSSGARFKNKLPDNIGIAYTIFVNAVPPLVSYSLILIFGSRVLGFPSLYSSRNPGISSILPITCLALGSIAWWAMWTRRYMIDEINKDYIKLARIKGLSTQKIMVNHVLRNAFVPLAQYLPATLLMTISGSLLAERFFSVPGMGPLLADSINRYDVNLVQAVVILYSTMSILGVFLGDVLMMIVDPRITLTKKKGTR

SEQ ID NO: 29223 - DNA, 315 bp, Unknown
  Obtained from environmental sample
  misc_feature (1)..(315): n is a, c, g, or t
gtgtcagacagggtaatcaggcaggaagaaattgagaaaataaccaacgaagacgatctttttgtctttgtggagtattctcccgaggccgccgaaagaataggctactcggattattcctactggaagtcggtatttcagcactttttgaagaaaaaatccgcggtagtacagtcatgtatctttatcgcgctggttatcttttcctttattgccctcgcgataggaaaatacaattacgcgaagctgatacctgaccttaacagtcatttatcagcccgaacagcgagtactggtttggcacagacaacatag

SEQ ID NO: 29224 - protein, 104 aa, Unknown
  Obtained from environmental sample
  misc_feature (1)..(104): Xaa is any amino acid
MSDRVIRQEEIEKITNEDDLFVFVEYSPEAAERIGYSDYSYWKSVFQHFLKKKSAVVQSCIFIALVIFSFIALAIGKYNYAKLIPDLNSHLSARTASTGLAQTT

SEQ ID NO: 29225 - DNA, 549 bp, Unknown
  Obtained from environmental sample
  misc_feature (1)..(549): n is a, c, g, or t
gtgatcggctgtatatggggttacgtccgcaaactggaccgcttaatcaccgaagtatacaacatcatcaactgcgtcccgatgatcatctacatgaccctgattgccctccttgtagggcagagtttcacgattatggcgatttcgcttgtcgccttcggctggcttattatggcgagaaacgtgcggaaccttgtatttatgtaccgcgacagggaatttaaccttgcttccagggctttgggcactccaatcagccgcatcttgctcaggaacatactacctcagcttatcagcgttataattctaagattggcattgtccattcccgcgacaattacaatggaaacaacattgtcctacctcggtctgggtcttgatgtaaacacgccctctttgggaattttgctcagaaacgcgcgaagttactttcttgattatccttacctcctcattttcccggcggttatcgtctccctgattaccattacattttatttgattggaaacgcgttctccgacgcctccgatccgagaaaccatgtgtaa

SEQ ID NO: 29226 - protein, 182 aa, Unknown
  Obtained from environmental sample
  DOMAIN (1)...(182): Binding-protein-dependent transport system inner membrane component
  misc_feature (1)..(182): Xaa is any amino acid
MIGCIWGYVRKLDRLITEVYNIINCVPMIIYMTLIALLVGQSFTIMAISLVAFGWLIMARNVRNLVFMYRDREFNLASRALGTPISRILLRNILPQLISVIILRLALSIPATITMETTLSYLGLGLDVNTPSLGILLRNARSYFLDYPYLLIFPAVIVSLITITFYLIGNAFSDASDPRNHV

SEQ ID NO: 29227 - DNA, 753 bp, Unknown
  Obtained from environmental sample
  misc_feature (1)..(753): n is a, c, g, or t
ttgtttgacagcgagaccgctacggttgctaaggcattgccggaatgcgaggtttattcgtttggcaaaggaagcggaacggagcatatagatttagaccttgcagattttgaaacagcaaaaaaggtgctggacacataccccaagcctgatgttatatttgcatcgccgccttgcgaaagctgggcgccattaagcaaggggaatttaccaaaattcacaaatgaaatagggttgaatttgcattggcgtaaaaaatgggagggatttgatttcaagccagaatacaaaaagactagaataaacggaataaacactgctttaaccttggcgaaaataatacagcattaccaaccaaaattctgggctatagaaaatggttcgcaaagtttgattttttcttatatgtttgaatttgcaaatttcaacggaataaaaaatatatgcaattatggctcttacggatttcctgttcataagccaactataattttatcaaacaaaagactttatctagcgaatatgtctaggcaatttcttaatagaactagcgttattacaagaagaaggactatagagagtatgagctataaaagacgtgggataaaaccctgcaacactcccgcagaacggtcgctagttcccactggattatatcaagatataatgaggcaattcaggcacggcggtcagcccatgctattcatggattcagatttcaaaccaaaggaggcgacaaatgatataccttga

SEQ ID NO: 29228 - protein, 250 aa, Unknown
  Obtained from environmental sample
  misc_feature (1)..(250): Xaa is any amino acid
MFDSETATVAKALPECEVYSFGKGSGTEHIDLDLADFETAKKVLDTYPKPDVIFASPPCESWAPLSKGNLPKFTNEIGLNLHWRKKWEGFDFKPEYKKTRINGINTALTLAKIIQHYQPKFWAIENGSQSLIFSYMFEFANFNGIKNICNYGSYGFPVHKPTIILSNKRLYLANMSRQFLNRTSVITRRRTIESMSYKRRGIKPCNTPAERSLVPTGLYQDIMRQFRHGGQPMLFMDSDFKPKEATNDIP

SEQ ID NO: 29229 - DNA, 933 bp, Unknown
  Obtained from environmental sample
  misc_feature (1)..(933): n is a, c, g, or t
ttgcaattcaacaacgcgcctgcagagcttctgggcgagcggcagaggggcctaaccaagtacacactgtggctcatgaacaacgcccgtctcggcgtggccgcccaggcggttggcatcgcagaagcggcctaccgcgaggccgacctttacgccacaaagcgcatccagttcggcgcgcctgtacgcgatctcccagcggtctttgaaatgctcaccgagatgaagatttccgttgaagcgggccgcagtcttctttacgaaaccgcccgcttcgttgacctgaaggaagcattggaggattattccgaaaagcaccctgaagataaaagcgagatagtggaagacaaaaagaagtatgcgaaatacgcggggttcttcaccccgctggttaaaggttacgccacagaaatggcaaacaaggtcgccaacgacgcgattcaaatccacggcggcacaggctacatgaaggagtttaacgctgaacgtcattacagggacgcgaggatcaccaacatctacgagggaaccacccagcttcaggttgtggccgccatcgggccggtaacttcaggtgtcgcccaggccgttctggacgaatacgacaaggcacactaccatcacagccccgctttgcttgagaaagtcagggaagcccgcaagttttttgaggaagccctgcaatacgcgaaaacatacgagggccacgagcagttccttacctaccattcccgccgcctcgtggaaatggcaaccgatctcgtcatcagttaccttctgctccgagacggtaaccacagcgagcgcaaacaaaaggcggcggctgtcttcatcgccaaaatgccatcgcgactcaaagcgagccgagatttcatcatgagcgaagatggggccttgctcaaaaattatgaagcggtgattgggaagacgtaa

SEQ ID NO: 29230 - protein, 310 aa, Unknown
  Obtained from environmental sample
  DOMAIN (31)...(179): Acyl-CoA dehydrogenase, C-terminal domain
  misc_feature (1)..(310): Xaa is any amino acid
MQFNNAPAELLGERQRGLTKYTLWLMNNARLGVAAQAVGIAEAAYREADLYATKRIQFGAPVRDLPAVFEMLTEMKISVEAGRSLLYETARFVDLKEALEDYSEKHPEDKSEIVEDKKKYAKYAGFFTPLVKGYATEMANKVANDAIQIHGGTGYMKEFNAERHYRDARITNIYEGTTQLQVVAAIGPVTSGVAQAVLDEYDKAHYHHSPALLEKVREARKFFEEALQYAKTYEGHEQFLTYHSRRLVEMATDLVISYLLLRDGNHSERKQKAAAVFIAKMPSRLKASRDFIMSEDGALLKNYEAVIGKT

SEQ ID NO: 29231 - DNA, 468 bp, Unknown
  Obtained from environmental sample
  misc_feature (1)..(468): n is a, c, g, or t
ttggccgaggacatttcacagccttatattgtcgcattcatgagcgagcagcttcagccgcgcaggggaatgaaaattctggaaatcggaacagggtcgggttatcaatccgccattctctcttatctcggctgcgaagtttatacggttgaactgctggaagaacttgccaacagggcagaaaaaaactttaaaacgcttaatctgagcaacgtaaaaataaaatgcgccaatggttattccggctggcaggaagaagcccctttcgaagccatcatcattaccgccgctccggaaaaaatccccgaaaaacttattgagcaattggcggaaggtggcaaaatgattttgccggtaggccctgtcaattccgtgcagtttttaaagctcatcataaagaaagacggcaaggttattgagagggatttgcttccggttaggtttgtcccaatggtagattctgcttag

SEQ ID NO: 29232 - protein, 155 aa, Unknown
  Obtained from environmental sample
  DOMAIN (8)...(140): Methyltransferase small domain
  misc_feature (1)..(155): Xaa is any amino acid
MAEDISQPYIVAFMSEQLQPRRGMKILEIGTGSGYQSAILSYLGCEVYTVELLEELANRAEKNFKTLNLSNVKIKCANGYSGWQEEAPFEAIIITAAPEKIPEKLIEQLAEGGKMILPVGPVNSVQFLKLIIKKDGKVIERDLLPVRFVPMVDSA

SEQ ID NO: 29233 - DNA, 438 bp, Unknown
  Obtained from environmental sample
  misc_feature (1)..(438): n is a, c, g, or t
atgtccattgatattcaaactacagtaaagaaccttcatccccttgaggtgaaggttcttctgtcctacaagaaaggcgatgagctttcggttgaaaaaattgagaaagacttaggtctcaaaagcggaaacggcaaccaagccctttcatggcttgcggcaaaaggcttgattagcgaaatccggcgggagaccgctgttttttacgagttgacgggccttggcgggcagtggaaagaaaagggaagtcccgaagagcggattcttgagctgatacgaaagggaattgagcgcaaagccgccttgaagcgcctgccggaaattgcccaggaactgagcatggaaaacaaggatattggcagcgcctttggcagcctttcaaactgggcatccttgccatggacggcgataaaatgtaaccctcactattccacatga

SEQ ID NO: 29234 - protein, 145 aa, Unknown
  Obtained from environmental sample
  misc_feature (1)..(145): Xaa is any amino acid
MSIDIQTTVKNLHPLEVKVLLSYKKGDELSVEKIEKDLGLKSGNGNQALSWLAAKGLISEIRRETAVFYELTGLGGQWKEKGSPEERILELIRKGIERKAALKRLPEIAQELSMENKDIGSAFGSLSNWASLPWTAIKCNPHYST

SEQ ID NO: 29235 - DNA, 756 bp, Unknown
  Obtained from environmental sample
  misc_feature (1)..(756): n is a, c, g, or t
atgtataacgccgacgacggcttttactatgacatcaacaagagcgaaaagcaggtgccgattaaaacaatcgccggttactggccgcttctcgcggaaattccaaatgatgaaaaagcggaatttataattgaaaaactttccgacccaaaatttttcggcactccccatcccttccccaccatctcggtcagtgaaaaagaatttgacgaaaacgggcgcggttaccgaggatcggtctttcctcatttaacatttatggtaataaaagggcttgaacgctatcagaggtgggacatcgcaagggactgcgctatacggcatttatatttcatgctggattcgatgagtcccgacggcaatcatcacaagggaaatctttgggaagcgtatttacccacaaaagaagggccggcaaaatggtcggggaaacctttattcccaagggcgcagtatcttacttatgacgcgctttccactatctgtttaacaatagaaaatattgtggggctttttatttctcttccgcgcaagaccgtggactgggttattcccaatcttgaaattatgggagtagaaaatctttcgcttaaaaataatatgattacaattctttccaacaagagcgggaggggctgggaaattcacatggaaagcgagaagctttattattttacgattaatattcttgggaagaagaagaagacgcttcctattccgtccggaaaatgttctatgttgatagacaaactgtag

SEQ ID NO: 29236 - protein, 251 aa, Unknown
  Obtained from environmental sample
  misc_feature (1)..(251): Xaa is any amino acid
MYNADDGFYYDINKSEKQVPIKTIAGYWPLLAEIPNDEKAEFIIEKLSDPKFFGTPHPFPTISVSEKEFDENGRGYRGSVFPHLTFMVIKGLERYQRWDIARDCAIRHLYFMLDSMSPDGNHHKGNLWEAYLPTKEGPAKWSGKPLFPRAQYLTYDALSTICLTIENIVGLFISLPRKTVDWVIPNLEIMGVENLSLKNNMITILSNKSGRGWEIHMESEKLYYFTINILGKKKKTLPIPSGKCSMLIDKL

SEQ ID NO: 29237 - DNA, 648 bp, Unknown
  Obtained from environmental sample
  misc_feature (1)..(648): n is a, c, g, or t
gtgataaaacaggattttcccaaaatccacttctatgaccaggattttgtcgatatttacgacaaaacctgggcatggatacaggattgctggcatggtgaaggcgaaaaaagtaaaattaacggtaaatttttctcatatcctgattcacagactgtaaatcaggctgatgctatattttcttcgttttttttggtttattccaacagaatttatcaggcgcatccgactttagaccttttttatgaccgtcaggagccaaatggggcaatccgctgcgcctatgatgtaaaaacaggcgcacccgtggtggaaagagacaatccggaaggacttggaatacctcttttcgcttgggcggagtataatatctaccataagtcaggaaataaaaagcgggttaaggacgttctttcgattttatgcaaatactcaacatggatcgattcggtatttaaaaaatcaaacggcctttataaaactccacttagcgcgacaggaatgggcaatttaccccgcggggacgcgtactacgccatggattttaacacaatgatggcgataaatatgctttatatgtccgcccttgctgatattcttaacgacaaggaaatcagctttcaatataagcgccagtattttncctaa

SEQ ID NO: 29238 - protein, 215 aa, Unknown
  Obtained from environmental sample
  misc_feature (1)..(215): Xaa is any amino acid
MIKQDFPKIHFYDQDFVDIYDKTWAWIQDCWHGEGEKSKINGKFFSYPDSQTVNQADAIFSSFFLVYSNRIYQAHPTLDLFYDRQEPNGAIRCAYDVKTGAPVVERDNPEGLGIPLFAWAEYNIYHKSGNKKRVKDVLSILCKYSTWIDSVFKKSNGLYKTPLSATGMGNLPRGDAYYAMDFNTMMAINMLYMSALADILNDKEISFQYKRQYFX

SEQ ID NO: 29239 - DNA, 678 bp, Unknown
  Obtained from environmental sample
  misc_feature (1)..(678): n is a, c, g, or t
gtgagtaatagtgagctttttgccgcgtctttccagcaatacgacaagtttctcgatgaaaatgatgttgttaaaagcggatctgatgcagagatggtaaatactctcggcaaagatatcaaagaggcggctgaaagatggtacaaaaaggaaggtaaatccagctatctcaaggattacaaatgggaatatcatctggtcaagaacgatcaagtgaacgcatggtgtatgccgggagggaaaatcgtggtatatacgggtttacttcccgtcactaagaacaaagacgcgcttgccgtggtaatgggtcacgaagtcgcccatgctctgctcgatcatggaaggcagagggtaagccttgcttttttacagcagcttggcctctcggccacggggctcggtgcctcccttttgggagcatccgagctaacccagtcgctttttgtcgcggctttaggtataggttctaatcttgcggtagctctacccttcagccgcgacaatgaaagtgaagcggatgaatacgggctttatttgatggcgattgccggttacaaccccgaagaatcagtaccattttgggaacggatggcgaacggcaaatcaaacagtaaattcgaggaaatgttaagcacccacccttcagtgataagcgcgcaagcaatcttaagtcgttaa

SEQ ID NO: 29240 - protein, 225 aa, Unknown
  Obtained from environmental sample
  DOMAIN (36)...(224): Peptidase family M48
  misc_feature (1)..(225): Xaa is any amino acid
MSNSELFAASFQQYDKFLDENDVVKSGSDAEMVNTLGKDIKEAAERWYKKEGKSSYLKDYKWEYHLVKNDQVNAWCMPGGKIVVYTGLLPVTKNKDALAVVMGHEVAHALLDHGRQRVSLAFLQQLGLSATGLGASLLGASELTQSLFVAALGIGSNLAVALPFSRDNESEADEYGLYLMAIAGYNPEESVPFWERMANGKSNSKFEEMLSTHPSVISAQAILSR

SEQ ID NO: 29241 - DNA, 753 bp, Unknown
  Obtained from environmental sample
  misc_feature (1)..(753): n is a, c, g, or t
atgtttgaactaaacggcaaggtggcgctggtgacgggcgcgagccaaggcataggcgaggtcatagtaaaaaagctggcccatcagggcgcaacagttgtatgcggctctcttccttcgactgtcagcgatctggaaaatgtggtggcctctatccaggcagaggggagggcggccagctatgtgctgctggacatgatggacgcggcaagcgtgaaggccgccatcaatgatactgcagagaaacacgggggcctgcacatcttggtcaacaacgctggcgtgaccaaggacaaactgctgatccagatgaaggaagacgagtacgacttggtgatggacgtgaacctcaggggtgcctggctggcctcccaggcggcggcaaagcccatgatgaagcagcgctgggggcgcatagtgaacattgccagcgtagtcgggcagatggggaacgttgggcaaagcaactacgccacatcgaaagcgggcctcataggcttgaccaaaaccgtggcacgcgaactcgccagcaggaacgtcacatgcaacgccgttgcgccgggctatatcgccaccaagatgacggattcgctgtccgatgaagtgaaagaaaattttacaaaacagatccccttggggcgcatgggtacggcagaggacatagccaacgccgttgcctttctgtgcagcgaggaggcgggctacatcactggcgcgaccatacccgtgaacggcgggatgctgatggtttaa

SEQ ID NO: 29242 - protein, 250 aa, Unknown
  Obtained from environmental sample
  DOMAIN (7)...(176): short chain dehydrogenase
  misc_feature (1)..(250): Xaa is any amino acid
MFELNGKVALVTGASQGIGEVIVKKLAHQGATVVCGSLPSTVSDLENVVASIQAEGRAASYVLLDMMDAASVKAAINDTAEKHGGLHILVNNAGVTKDKLLIQMKEDEYDLVMDVNLRGAWLASQAAAKPMMKQRWGRIVNIASVVGQMGNVGQSNYATSKAGLIGLTKTVARELASRNVTCNAVAPGYIATKMTDSLSDEVKENFTKQIPLGRMGTAEDIANAVAFLCSEEAGYITGATIPVNGGMLMV

SEQ ID NO: 29243 - DNA, 753 bp, Unknown
  Obtained from environmental sample
  misc_feature (1)..(753): n is a, c, g, or t
ttgcaaccgttaaaccatcagcatcccgccgttcacgggtatggtcgcgccagtgatgtagcccgcctcctcgctgcacagaaaggcaacggcgttggctatgtcctctgccgtacccatgcgccccaaggggatctgttttgtaaaattttctttcacttcatcggacagcgaatccgtcatcttggtggcgatatagcccggcgcaacggcgttgcatgtgacgttcctgctggcgagttcgcgtgccacggttttggtcaagcctatgaggcccgctttcgatgtggcgtagttgctttgcccaacgttccccatctgcccgactacgctggcaatgttcactatgcgcccccagcgctgcttcatcatgggctttgccgccgcctgggaggccagccaggcacccctgaggttcacgtccatcaccaagtcgtactcgtcttccttcatctggatcagcagtttgtccttggtcacgccagcgttgttgaccaagatgtgcaggcccccgtgtttctctgcagtatcattgatggcggccttcacgcttgccgcgtccatcatgtccagcagcacatagctggccgccctcccctctgcctggatagaggccaccacattttccagatcgctgacagtcgaaggaagagagccgcatacaactgttgcgccctgatgggccagcttttttactatgacctcgcctatgccttggctcgcgcccgtcaccagcgccaccttgccgtttag

SEQ ID NO: 29244 - protein, 250 aa, Unknown
  Obtained from environmental sample
  misc_feature (1)..(250): Xaa is any amino acid
MQPLNHQHPAVHGYGRASDVARLLAAQKGNGVGYVLCRTHAPQGDLFCKIFFHFIGQRIRHLGGDIARRNGVACDVPAGEFACHGFGQAYEARFRCGVVALPNVPHLPDYAGNVHYAPPALLHHGLCRRLGGQPGTPEVHVHHQVVLVFLHLDQQFVLGHASVVDQDVQAPVFLCSIIDGGLHACRVHHVQQHIAGRPPLCLDRGHHIFQIADSRRKRAAYNCCALMGQLFYYDLAYALARARHQRHLAV

SEQ ID NO: 29245 - DNA, 786 bp, Unknown
  Obtained from environmental sample
  misc_feature (1)..(786): n is a, c, g, or t
atggcttttataaaaaatctttttgatcgtaattttctagagtacgcttcttatgtaattaaagacagggctatccccgatcttgaagacggtcttaagcctgtccagcggcgtattcttcattccctgtttgagatggacgacggtaaatttcataaagtcgccaatgtgacaggtcactgcatgaagtaccacccccacggcgaggcttccattaaccccgcattggttgttcttgccaacaaagagctttttatcgacaggcagggaaacttcggcaacctgtttacaggcgacgacgcctcagccccgcgctatatcgagtgtcgtgtaacgcctctggcgaaagatattttttacaatccaaaacttacaacttgggcggattcctatgacggcagaaacagggaacccgttctttttcccgcaaaaatccccgtggttcttgttatgggcgttgagggcatcgccgtcggaatgtccacaaaaattctgccgcacaatgtaatagaagtattggaagcggaaatcgcctgccttaccggaaaaaagtttgagctttaccctgattttcccacaggcggttatgtcgatgtttccgagtacgcggaaggaaacgggaaggttttggtgcgcgcaaaaatggacacatcggacccaaaacgcattcttattaccgagcttccgtttggctctactacggaaagtttgataaacagcatagactccgccgcgagaaacggaagacttaaaataatgggcattaatgattttacaacccgataa

SEQ ID NO: 29246 - protein, 261 aa, Unknown
  Obtained from environmental sample
  DOMAIN (23)...(261): DNA gyrase/topoisomerase IV, subunit A
  misc_feature (1)..(261): Xaa is any amino acid
MAFIKNLFDRNFLEYASYVIKDRAIPDLEDGLKPVQRRILHSLFEMDDGKFHKVANVTGHCMKYHPHGEASINPALVVLANKELFIDRQGNFGNLFTGDDASAPRYIECRVTPLAKDIFYNPKLTTWADSYDGRNREPVLFPAKIPVVLVMGVEGIAVGMSTKILPHNVIEVLEAEIACLTGKKFELYPDFPTGGYVDVSEYAEGNGKVLVRAKMDTSDPKRILITELPFGSTTESLINSIDSAARNGRLKIMGINDFTTR

SEQ ID NO: 29247 - DNA, 1224 bp, Unknown
  Obtained from environmental sample
  misc_feature (1)..(1224): n is a, c, g, or t
atgatgagtaaagacgatgttgtgtttgatgaagaatccggaatatcggtggaagaacagcaggaaatactttctaagattaacggaatagctgagaacaaccgtaagctgctttcacagacaactcaagttgataacggaaaaataattattaacgcccaaaagagcggggcgggttttccgttagttgtaaatatagccgctgtaggtatacttttaatcggtatagtttttatgtttttattttacggaaaaaaggattcgcaggtaaggataggaaaagccgtttatgatataaccgaacgcacgcttatagaagaaattcgcaaagacacgtcggaaaaactggcgaaaaaagatatggaaataacgaatataacaacgcggttggacgaagttgacgacgagctttcaaaattatattccagcaatcaggagcttacaaaagagcaaatagcggctcaggaaaaacttttagctatgcaaaattcttatcgcgatgaacttgccgtattgcaggaagagaggtcgcaaattttagaagcttcccgcgcaagagaagcccgtcttcgcgcgcagcttgacgaaagaacaagagaatacgccgcggcgcagcagaaagtatccggtgagttggattacgcgaacagcgaattggacaggcttacgacagaacaggaaagaatcgccgccatagacgcgcagttttcaggcggacttgcgtcagctaaggactatattaataacggacagtatgatcaggcggagagcattgttgaaaatttgcggcatttttgcaataccaatacgcttgcatcctcgcgcgtgttccagtcaagaagggacttttataaccagtcgattgattttgtggaagcgatgataattgacgcgcaaaaaaacagcggctcttcgcttggttctcagcagtttgatttgcagacaaaaaatgtccagcaacaggaaaaaataaacgaactgcaaaaaacaattgacactttaagcaaaggcggttcgggacttaacagtaaaatcggagaactgcaggcaagtattaacgataaagacaataaaatatcggcattagaggctgataaaacaaaatccgccgatgatattaaccggctgcaaaattcaattaccagtaaagatcaagaaataacaaggcttagaaaccagttaagtgtgatacaacaagctctaaaagatcctactgaagaatga

SEQ ID NO: 29248 - protein, 407 aa, Unknown
  Obtained from environmental sample
  misc_feature (1)..(407): Xaa is any amino acid
MMSKDDVVFDEESGISVEEQQEILSKINGIAENNRKLLSQTTQVDNGKIIINAQKSGAGFPLVVNIAAVGILLIGIVFMFLFYGKKDSQVRIGKAVYDITERTLIEEIRKDTSEKLAKKDMEITNITTRLDEVDDELSKLYSSNQELTKEQIAAQEKLLAMQNSYRDELAVLQEERSQILEASRAREARLRAQLDERTREYAAAQQKVSGELDYANSELDRLTTEQERIAAIDAQFSGGLASAKDYINNGQYDQAESIVENLRHFCNTNTLASSRVFQSRRDFYNQSIDFVEAMIIDAQKNSGSSLGSQQFDLQTKNVQQQEKINELQKTIDTLSKGGSGLNSKIGELQASINDKDNKISALEADKTKSADDINRLQNSITSKDQEITRLRNQLSVIQQALKDPTEE

SEQ ID NO: 29249 - DNA, 465 bp, Unknown
  Obtained from environmental sample
  misc_feature (1)..(465): n is a, c, g, or t
atgagaaaccttgaggacattgagagagatttagccgaggcgagggaggccctttcatccgtggaagggacgccggcggaagtttacagccgtatcgtgggttattaccggtcggtacgaaactggaaccggggaaagagggaggaatacggcgagcggcagctttaccgtatcaatgaatcgtacgccgccgtttctccccagcctgttccaacagaagaatcattgcttctgctttttatccgcgcttcctgcccggcctgccctcctgccaaggccgcggcgggaaaactgggcatccccgtcgagcttgtaaatgccgatacggcggagggcatggccgaggcaacaagacgcaacgtgatgtccaccccaacggcaatactcatttcagcgagaggcgaggaactcgccagggccggaaacgcggaaacaataggcagattgcttgccgccgcctcttaa

SEQ ID NO: 29250 - protein, 154 aa, Unknown
  Obtained from environmental sample
  misc_feature (1)..(154): Xaa is any amino acid
MRNLEDIERDLAEAREALSSVEGTPAEVYSRIVGYYRSVRNWNRGKREEYGERQLYRINESYAAVSPQPVPTEESLLLLFIRASCPACPPAKAAAGKLGIPVELVNADTAEGMAEATRRNVMSTPTAILISARGEELARAGNAETIGRLLAAAS

SEQ ID NO: 29251 - DNA, 762 bp, Unknown
  Obtained from environmental sample
  misc_feature (1)..(762): n is a, c, g, or t
atggtacttgcaaaggacagcctcaggatcaagcgcaagatcgtcggccgccttttagagggcgggctctttccgtataccaagcggtaccttaataacctggacaaccactttagcaccatagggctggtgggaatgaacgaatgcctgttaaatttcctgggcagggaattcaccatagctaccgacaggggccgttcatttgcccttgaggttttgggctttatgcgtaacaagcttgcggacttccaggaagaaaccggggaactttttaaccttgaagccacccccgccgaatctacgtcctaccggcttgccaggcacgacaaaaaaaaatacccgcgcattatcaccgccggaaaagcagagccttactatactaactctacccagcttccggtaatggaaaccgacgacatttttgaagccctggacttgcaggagaaactccaaaccgcctatacaggcggcacggttttccattgcttccttggcgaagcaatagaagactggcgggtatgcagggatctggtaaaaacaatagccggtaaataccggattccttattttaccatttcgcctactttttctgtgtgccctgtacacggatacctacgaggcgagcatttttcctgccagaaatgcagggaagaaaagaaaacgagctccgcgagaaaatcgcggtattggagaagagcgggagcccgttttagcgttgctttagcaaccattacaaatatagcactgagcaggagagactaa

SEQ ID NO: 29252 - protein, 253 aa, Unknown
  Obtained from environmental sample
  misc_feature (1)..(253): Xaa is any amino acid
MVLAKDSLRIKRKIVGRLLEGGLFPYTKRYLNNLDNHFSTIGLVGMNECLLNFLGREFTIATDRGRSFALEVLGFMRNKLADFQEETGELFNLEATPAESTSYRLARHDKKKYPRIITAGKAEPYYTNSTQLPVMETDDIFEALDLQEKLQTAYTGGTVFHCFLGEAIEDWRVCRDLVKTIAGKYRIPYFTISPTFSVCPVHGYLRGEHFSCQKCREEKKTSSARKSRYWRRAGARFSVALATITNIALSRRD

SEQ ID NO: 29253 - DNA, 735 bp, Unknown
  Obtained from environmental sample
  misc_feature (1)..(735): n is a, c, g, or t
atggaatataaatggctgagtataagctccacgcgcggaacggtcgaatctcaggaagaaataaccctgcactgtaacaggcaaagcctaacggatgaaatacaaaacgcccggctgttaatcaaagacaaagaaactgtcgtagccgtcgaaataaaagcgagaaatcccgttacaaaaaatctgcctcccatgacttttcttgaaaacaacggggtaattgttattgaagcgaaccgttactgtgaaaaaaaggacgcggcatccgccggttttattgagttaaaaaattacggcagaagcggggttggaatgaaagtgtatcccacaaccgccgattttacggagaatgacgacttacccgttcttatataccgctttttgattgaggaatctggcaagtatacggcggaagtatggacgaccccgacaaatcccgtacaaaacaaacgccccctgcgcttccgttttgaaagccggaaagatgacaggcaaatcattaccgccgtcccctcggattttatcgcgggcagcctttcggatcaaagatggtgcgacggagttcttgacaatatacgcgtcagcaaaattccattaacacttgaaaagggagtgcgggaaatttcaatcggcgcgctggaagccgctcttgtgcttgaaaaggtgttaatatacaaagagggaagggaaccgatgccatcgtatctgggaccgcctaattcaattaacaattaa

SEQ ID NO: 29254 - protein, 244 aa, Unknown
  Obtained from environmental sample
  misc_feature (1)..(244): Xaa is any amino acid
MEYKWLSISSTRGTVESQEEITLHCNRQSLTDEIQNARLLIKDKETVVAVEIKARNPVTKNLPPMTFLENNGVIVIEANRYCEKKDAASAGFIELKNYGRSGVGMKVYPTTADFTENDDLPVLIYRFLIEESGKYTAEVWTTPTNPVQNKRPLRFRFESRKDDRQIITAVPSDFIAGSLSDQRWCDGVLDNIRVSKIPLTLEKGVREISIGALEAALVLEKVLIYKEGREPMPSYLGPPNSINN

SEQ ID NO: 29255 - DNA, 1272 bp, Unknown
  Obtained from environmental sample
  misc_feature (1)..(1272): n is a, c, g, or t
ttgctctggtctatagaagagccgcccattccctcaggaacggttatgcccgtgtatatcaagtccaatatcaacaaagtctgggttgtcggcatgccggaaggctggtatacaggcaaaggcagaaacgacaaaattgaaattccgtttgcacactttgaactggtgggaagcaagagaaaagccaaaatgcaggcgcagattttttccaaattcgcgcttacctatgctgaaaatttacaggatggcctgccggtacgggatacccctgacaacaatgcgaggcggatctaccgcctgaaaacgggagagattgtcaaaatcctctctgaggcggagggcagtcccgccataggcacaacaggggagcctttgccgggtgaatggtacaaagtgcttaccgaggacggcagtacgggctactgtttctcataccgtctcaagctgtttgaacataccggcggacaccttgccgctgccaagacagtcgtcgccgaaaaagccgaagaccccgaactggaagcgctgctgtcaaaaacatggtcgcccgaatcgtatttaacaatgattaactccaaaagaatcaaccttgaagatttgacgcgtcaatggcgctttgatccgggacaggagacaggtcttgcaaggatttttgtatccggtactgacaatagttatgcgtataccagcatacgccccgacgggaatcgcgtctggcgttttgatggaaccaacctttcaatgcagcttaaggcggaaacgacactggccgtgcagtttttggaagggggcggcagtacaaggactttgctttttgtctcgctgcctgtcagcgtggacgatcttatcttgcaggaaaccgcccgccgggaaagactgtacaacgagatttacagccaggggccggtttataccagtaacaactacggaaccattacctttaagggaggcccacccccggtcggaggcggaaccttctcatggcgcagttttgatctcctggtaccccggttcatccccgaagacattgaaggtaatgggacaattttattggatctttttcttgctcccgcgcttgaggatcgctacgacggggcatttaccctccgctttacaaatacaaaagccgcgctgtactgcatgtactcgcttgacaacgaggggttcaggatagagatagtccccgattcgagcatcgaggatgtcaccgttacccgccggggggcatccccgatggttctgtacttcttccgggacacggagctttggtaa

SEQ ID NO: 29256 - protein, 423 aa, Unknown
  Obtained from environmental sample
  misc_feature (1)..(423): Xaa is any amino acid
MLWSIEEPPIPSGTVMPVYIKSNINKVWVVGMPEGWYTGKGRNDKIEIPFAHFELVGSKRKAKMQAQIFSKFALTYAENLQDGLPVRDTPDNNARRIYRLKTGEIVKILSEAEGSPAIGTTGEPLPGEWYKVLTEDGSTGYCFSYRLKLFEHTGGHLAAAKTVVAEKAEDPELEALLSKTWSPESYLTMINSKRINLEDLTRQWRFDPGQETGLARIFVSGTDNSYAYTSIRPDGNRVWRFDGTNLSMQLKAETTLAVQFLEGGGSTRTLLFVSLPVSVDDLILQETARRERLYNEIYSQGPVYTSNNYGTITFKGGPPPVGGGTFSWRSFDLLVPRFIPEDIEGNGTILLDLFLAPALEDRYDGAFTLRFTNTKAALYCMYSLDNEGFRIEIVPDSSIEDVTVTRRGASPMVLYFFRDTELW

SEQ ID NO: 29257 - DNA, 1347 bp, Unknown
  Obtained from environmental sample
  misc_feature (1)..(1347): n is a, c, g, or t
ttgggaaataaatatgttcccgcctttgccggcgctccgcttaaaaattccggcgtccttcctttaatcggtttctttgttgacgtatctcctaatccgcgcacggcaaaagacgcggtaattgacgccgaaggaaatgaaacgcctgtcgctatcgatcccgataaaccgatgtcggcgcttgttatacggacaaactacgatcaattttccggcaaactttcatggataaaagttataacgggaaaacttgcgtcagataccgaagtgcataatgttaccgaaaacaaaaaagagcgtataggaaaactgcatacatgtcagggtaaaaaacttgaagaagtaaaagagctgtcggcgggcgatatcggcattattacaaaagccgcaaccttaaaaaccaacgatactttggcggcgggcgacagtaaaaactttgtccacctgcgtctgcctgaacctgttcattctgttgcggtaaacgctgtgcaaaaaaaagacgaagacaaactgggcgaattccttgtccgtgcggcggaagaagacaaaactttccgctaccactacaacggcgagacaaaagaatccgtaatttccggcatgggcgaattacaaatcaacattattcttgataaaataaaacacaaccaaaaaatcgaagttgaaactcacgttccgaaaattgcgtatcgggaaacaattacaaaaaaagcgggcgcggaatatactcacaaaaaacagacgggcggtcacggtcaatacggaaaagttgtgctggaaatatcgccgcttgcccgaggagaaagttatcaatttgttaacgccattttcggcggcgcaattccgaaaaactttattccgggagtagagaagggtatagtcgaaggaatggcgcacggtactatggcgagttatcctgtcgttgacgtagaagtaaaacttacggacggcaaacatcaccctgtagactccaacgaattgtcgttcaagcttgcggcgcgcaatgctttccgcgaggcgatgaagcaggcaaatcccacactgcttgaaccgattatgaatttgacggtctttatcgaagaaaaatatttaggcgatgtaatgagcgatctttcgggaaagcggggcaagatacacgggcaggattcagcgggcggcattgcggaagtaaaagcggaagttccaatgtcggaacttttgcgttactcgatagacttgcgttcaattacttcgggaacaggctctttcaatgtggacttcagccactatgccccgatttcgggacgcaccgccgacgaagttgtgaaagcccgtgagtcattcaaggtgcaggagtcggacgaatag

SEQ ID NO: 29258 - protein, 448 aa, Unknown
  Obtained from environmental sample
  DOMAIN (72)...(139): Elongation factor Tu domain 2
  misc_feature (1)..(448): Xaa is any amino acid
MGNKYVPAFAGAPLKNSGVLPLIGFFVDVSPNPRTAKDAVIDAEGNETPVAIDPDKPMSALVIRTNYDQFSGKLSWIKVITGKLASDTEVHNVTENKKERIGKLHTCQGKKLEEVKELSAGDIGIITKAATLKTNDTLAAGDSKNFVHLRLPEPVHSVAVNAVQKKDEDKLGEFLVRAAEEDKTFRYHYNGETKESVISGMGELQINIILDKIKHNQKIEVETHVPKIAYRETITKKAGAEYTHKKQTGGHGQYGKVVLEISPLARGESYQFVNAIFGGAIPKNFIPGVEKGIVEGMAHGTMASYPVVDVEVKLTDGKHHPVDSNELSFKLAARNAFREAMKQANPTLLEPIMNLTVFIEEKYLGDVMSDLSGKRGKIHGQDSAGGIAEVKAEVPMSELLRYSIDLRSITSGTGSFNVDFSHYAPISGRTADEVVKARESFKVQESDE

SEQ ID NO: 29259 - DNA, 531 bp, Unknown
  Obtained from environmental sample
  misc_feature (1)..(531): n is a, c, g, or t
ttgtttataagccgcgttattgttaagcggtaccgggcaaaggaggaacttcgtgtgacggaaatggcgcttatacccggaggaaccttcacaatgggcagccccgccaacgagccagtgcgtcaggacagggaaggccctcagcggcaggtaacggtgagcggcttttacatgggaaaatacgaggtaacgcaggcggaatggcaggaagtgatggggacgaaccccagccatttcaaaggggacagcctgccggtggagagcgtaagctggtttgacgcagtagagtactgcaaccgtttaagcctgcgggaagggctggatcccgcgtatatagtgaacgggacggagggacggaggtatgcaagcggagcccaggccgatcctgatggcccgtcatcagggcttaaccgcattcggcgcggtgggggctggggcagcgtcgccgaaatagtgcgttccgcgtaccggactacctacgctccatccggcagggacagcgccctgggcttccgcgtcgcgcgctcctga

SEQ ID NO: 29260 - protein, 176 aa, Unknown
  Obtained from environmental sample
  DOMAIN (18)...(175): Domain of unknown function (DUF323)
  misc_feature (1)..(176): Xaa is any amino acid
MFISRVIVKRYRAKEELRVTEMALIPGGTFTMGSPANEPVRQDREGPQRQVTVSGFYMGKYEVTQAEWQEVMGTNPSHFKGDSLPVESVSWFDAVEYCNRLSLREGLDPAYIVNGTEGRRYASGAQADPDGPSSGLNRIRRGGGWGSVAEIVRSAYRTTYAPSGRDSALGFRVARS

SEQ ID NO: 29261 - DNA, 1191 bp, Unknown
  Obtained from environmental sample
  misc_feature (1)..(1191): n is a, c, g, or t
atgccacttctgccgatcctcgcagaaatggaaggtgaaggcatcaagattgaaaagaaaatactaaataattatgggacggaattgggaaaagaactggaagatattcaggcaaagacttacaaactcgtgggtcatgaatttaatttgtcatctacccagcagcttcagaaagtcctgtttgaagagcgaaagcttaaacctgacaagaaaacaaaaaccggctattcgaccgacgttgctgtattggaagaacttgcgcgggaagacgaagtccctgccctcatactcaggcacaggacgctttctaaactcaaatcaacttacgttgacagcctgccggtattggcggataaggacagcaggctgcataccaactttgtgcagaccggaaccgccacgggacggctttccagccgggagcccaatttgcagaacatacctatcagggacgaagaaggccgccgcatccgggaagccttcatcgcaaggccaggatgggtcctcatctccgccgattatagccagatagagcttgtggtgcttgcgcacctttcgggcgacaaaaacctgctctcctcttttgtcgagggaaaagacgttcacgcccgcaccgcttcgctgatttttggaatggaagaaaaagacattcaaagcgaacagcggcgcatcgcgaagacgatcaacttcggcgtcatgtacggcatgagcgcgttcaggctctcgaatgagctgagcatcagccgtaccgaggccgccgcttttatcgaagcctactttaaaacgtatgccggggtaagggattttatcgaaagcctaatcgctaaaactgagaaaaccggctttgcgtctaccatcctgggaaggcggcgttttattcccgctatcaattcgcggaacaaaaccgaaaaagccgccgccgaaagagtcgcggtaaatacgccaatacagggttctgcggcggacattgtaaaaaccgcaatgcttaacctggacaaggcccttacagcggccaacagccccgcgaaactgcttttacaagtgcacgacgaattaattttggaatgtccgcaagaaaaagcaaaagagacagcggagctagttaaaagggaaatggaaaacgccgtgaagcttaaaatcccgctcagggcaagcgttgagaccggaaagagctggggcgatttccattaa

SEQ ID NO: 29262 - protein, 396 aa, Unknown
  Obtained from environmental sample
  DOMAIN (17)...(395): DNA polymerase family A
  misc_feature (1)..(396): Xaa is any amino acid
MPLLPILAEMEGEGIKIEKKILNNYGTELGKELEDIQAKTYKLVGHEFNLSSTQQLQKVLFEERKLKPDKKTKTGYSTDVAVLEELAREDEVPALILRHRTLSKLKSTYVDSLPVLADKDSRLHTNFVQTGTATGRLSSREPNLQNIPIRDEEGRRIREAFIARPGWVLISADYSQIELVVLAHLSGDKNLLSSFVEGKDVHARTASLIFGMEEKDIQSEQRRIAKTINFGVMYGMSAFRLSNELSISRTEAAAFIEAYFKTYAGVRDFIESLIAKTEKTGFASTILGRRRFIPAINSRNKTEKAAAERVAVNTPIQGSAADIVKTAMLNLDKALTAANSPAKLLLQVHDELILECPQEKAKETAELVKREMENAVKLKIPLRASVETGKSWGDFH

SEQ ID NO: 29263 - DNA, 336 bp, Unknown
  Obtained from environmental sample
  misc_feature (1)..(336): n is a, c, g, or t
ttgaatgtctttttcttccattccaaaaatcagcgaagcggtgcgggcgtgaacgtcttttccctcgacaaaagaggagagcaggtttttgtcgcccgaaaggtgcgcaagcaccacaagctctatctggctataatcggcggagatgaggacccatcctggccttgcgatgaaggcttcccggatgcggcggccttcttcgtccctgataggtatgttctgcaaattgggctcccggctggaaagccgtcccgtggcggttccggtctgcacaaagttggtatgcagcctgctgtccttatccgccaataccggcaggctgtcaacgtaagttga

SEQ ID NO: 29264 - protein, 111 aa, Unknown
  Obtained from environmental sample
  misc_feature (1)..(111): Xaa is any amino acid
MNVFFFHSKNQRSGAGVNVFSLDKRGEQVFVARKVRKHHKLYLAIIGGDEDPSWPCDEGFPDAAAFFVPDRYVLQIGLPAGKPSRGGSGLHKVGMQPAVLIRQYRQAVNVS

SEQ ID NO: 29265 - DNA, 303 bp, Unknown
  Obtained from environmental sample
  misc_feature (1)..(303): n is a, c, g, or t
atgaaagcatacgaaagcattatgcaaggcttaactgaagccgtagattatcaacagggaaaaatccccgcccgaaaagccaaactgaccataaagccagtagctgctttcaacaccgaagacattaagcggatacgccaaaaaacaggtttaagccaggtagtttttgctggttcacttggtgtctccccaaaaacagtagaagcatgggaaaatggccgtaacaagccggaaggcgcttcacggagattacttgaaatagtccgggacgaccctgggtttttgagacgatttcaggcttga

SEQ ID NO: 29266 - protein, 100 aa, Unknown
  Obtained from environmental sample
  DOMAIN (42)...(95): Helix-turn-helix
  misc_feature (1)..(100): Xaa is any amino acid
MKAYESIMQGLTEAVDYQQGKIPARKAKLTIKPVAAFNTEDIKRIRQKTGLSQVVFAGSLGVSPKTVEAWENGRNKPEGASRRLLEIVRDDPGFLRRFQA

SEQ ID NO: 29267 - DNA, 798 bp, Unknown
  Obtained from environmental sample
  misc_feature (1)..(798): n is a, c, g, or t
atgggaaaaccacggctgctgagggagctgaacacggttgtagccatagcggcgcgtgaaatcacggtctttctcaaatccccaggcaccgcgatcatgagcctaaccatgcccatcgtgatgatgggcatgatcggcggcaacctgatgcagaacatggccggcggcctgggcttcaactttggacagttcatgctggtcggaatgttggtcaacatgctcttcatgacgaccacaatgggcaccgcctcgctggtggacgaccaccacacaaacttcaaccaagagatgcttgtgtcgccggtctcgcgctactcgctggtgataggcaagatactcggcagttcattcggcgcgatagccggcatggcggggacgcttgtagtcggggccgccatgcggatatcgctgcccttcggcaagctgctcttgattctggcgctctccccgctcatgtgcctttcagcgggggcgttggcgataatcgccatcgggctgatcaaaaacaaaagggccgtgaacatagtgatcatgctaatcaccatgccgcagatgtttctgtcaggcgcgatcatcccaatccaccaatccaacggcgtgctgctgatcctgagcagactgatgcccatgacatactgcatagacctcgcacgggccatcgtctgcgcgggaacgcctgattacgacagagtggttatgttcaacccagtcgtgaacttcgccgccatcgccatgctgaccgtagtctgcctcgtcatcggcacattcttcttcgcaaggagcgaaaagaacagatga

SEQ ID NO: 29268 - protein, 265 aa, Unknown
  Obtained from environmental sample
  DOMAIN (11)...(222): ABC-2 type transporter
  misc_feature (1)..(265): Xaa is any amino acid
MGKPRLLRELNTVVAIAAREITVFLKSPGTAIMSLTMPIVMMGMIGGNLMQNMAGGLGFNFGQFMLVGMLVNMLFMTTTMGTASLVDDHHTNFNQEMLVSPVSRYSLVIGKILGSSFGAIAGMAGTLVVGAAMRISLPFGKLLLILALSPLMCLSAGALAIIAIGLIKNKRAVNIVIMLITMPQMFLSGAIIPIHQSNGVLLILSRLMPMTYCIDLARAIVCAGTPDYDRVVMFNPVVNFAAIAMLTVVCLVIGTFFFARSEKNR

SEQ ID NO: 29269 - DNA, 471 bp, Unknown
  Obtained from environmental sample
  misc_feature (1)..(471): n is a, c, g, or t
atgaccgacaacaccccctatgtcatagaagaaacaagcgactttgccgttgttttcaagccgccgcggatgcacagcgcccctctcgcgaagaaagagggtgggacgctctttgattggtttacggcgcgggagcgagctctgtccccatgtcaaaacaaccttatgcaccgcctcgattttgatacccacggacttgtactttttgcaaaaaatttaaaaagttttgagttttttaaggaattgcaggacaagggcgggtttgtaaaggaatattccgctatttgcttgagctctgtccccagcgcaagctctgtccccagcgcaagctctgtccccaatccgagctctgtccccggtttcccgccgcctcccgcccttgccgcccatgccccctctcccgaaaacccgcttataatcgaaagttttttccgtcctttcggtcccggcagaaaattagtccgcccgtaa

SEQ ID NO: 29270 - protein, 156 aa, Unknown
  Obtained from environmental sample
  DOMAIN (14)...(143): RNA pseudouridylate synthase
  misc_feature (1)..(156): Xaa is any amino acid
MTDNTPYVIEETSDFAVVFKPPRMHSAPLAKKEGGTLFDWFTARERALSPCQNNLMHRLDFDTHGLVLFAKNLKSFEFFKELQDKGGFVKEYSAICLSSVPSASSVPSASSVPNPSSVPGFPPPPALAAHAPSPENPLIIESFFRPFGPGRKLVRP

SEQ ID NO: 29271 - DNA, 630 bp, Unknown
  Obtained from environmental sample
  misc_feature (1)..(630): n is a, c, g, or t
ttggcctataacctccagaaggaagactttgccgtgctggaggccggcgacggccgtctggggctggagatggcgcgtacccaggcccccgtgctcattctgctggatctgatgctgccgggtatggacggcctgacggtgtgccgggaactggagcgtgaccctgctaccgcctccatccccgtcattatgctcaccgccaagggcgaggaaatggatcgcgtcgtcggcctggaactcggcgcggatgactatctggtcaagcctttcagcgtgcgggagttgatcctgcgcatccgcaacatcctgaaacgtcaagcccaggccggtaccggcggcagtctttcccggcatggggtgacggtgaatcaaagcgcgcacaaagcgagcgtcaacgggacggatgtggagctgacggccacggaattccgtctgttggcgaccctgatgcgccacgccggacaggtgctcacccgcgaacagcttttgaacggtgtttggggctatcagtttgaaggctatgcccgcaccgtggatacgcatgtgcggcgtttgcgcgccaagctcggcaacgccgccgaactggtcgaaaccgtgcgcggcgtcgggtaccgctttcgggcggaatag

SEQ ID NO: 29272 - protein, 209 aa, Unknown
  Obtained from environmental sample
  DOMAIN (1)...(100): Response regulator receiver domain
  misc_feature (1)..(209): Xaa is any amino acid
MAYNLQKEDFAVLEAGDGRLGLEMARTQAPVLILLDLMLPGMDGLTVCRELERDPATASIPVIMLTAKGEEMDRVVGLELGADDYLVKPFSVRELILRIRNILKRQAQAGTGGSLSRHGVTVNQSAHKASVNGTDVELTATEFRLLATLMRHAGQVLTREQLLNGVWGYQFEGYARTVDTHVRRLRAKLGNAAELVETVRGVGYRFRAE

SEQ ID NO: 29273 - DNA, 417 bp, Unknown
  Obtained from environmental sample
  misc_feature (1)..(417): n is a, c, g, or t
gtgatgggcgttttttctactcgtaaaaactcgaaattcgacctaataaaatttgaaattaaggcaaacaaattattgtgtcttgaaaacagtaaagttaaacaaaagattgtgggaaaaattataaaagagcccgtttttgaaattcttgcaatttggattagcaaaaataaaataaaagaagctgttgataaaagatatactgtagtggatgcaaatacaataattggtactaatttggatcatttaattaggaaaaatattgttgaaatatttacttatgatatgtcaaaaaatatattaaaagatatttcagaaaaaaataaattgttggtcgaagattgcctctcaaaatatgaacctatagaaataaaaaaaatattagaaatgatccttgaaaggaaaaaaaccttttaa

SEQ ID NO: 29274 - protein, 138 aa, Unknown
  Obtained from environmental sample
  misc_feature (1)..(138): Xaa is any amino acid
MMGVFSTRKNSKFDLIKFEIKANKLLCLENSKVKQKIVGKIIKEPVFEILAIWISKNKIKEAVDKRYTVVDANTIIGTNLDHLIRKNIVEIFTYDMSKNILKDISEKNKLLVEDCLSKYEPIEIKKILEMILERKKTF

SEQ ID NO: 29275 - DNA, 573 bp, Unknown
  Obtained from environmental sample
  misc_feature (1)..(573): n is a, c, g, or t
atggttaaaaaacttataaccggtttagcgttctctttgatgacgatgttgcttttttctcaaagcaaggcgttccatttgtatccaaactatacgcaatatcttaaaaatagagctgttcccactaaaaaggctttcttctttaaagcccaaacagatgagaaaatcgtgtgtttttcctttgatgatgggccgaattttcccaaaacagagaaactcatcgcgtttctaaaacaaagaaaatgtcctgccgttttttttcttgttggtgaacaaatgaagagtgaccgaatagaggtgtacaaagatcccttatttgagatcggatgccatgggtttcatcatgatttgtattcgcaaggtgcgaatcaggagtccttacgggccgatgttcaagcagttcttgatgtgcataaaaaatttggattcgatgcgaaatttttccgccctccgtttggcgttataaacaaacatctcgctaagatcgtgaacgatttaaatatcaagggcgtactgtggagtttagacagtcaagattttttgatgagacccaatcggggatatcttacatga

SEQ ID NO: 29276 - protein, 190 aa, Unknown
  Obtained from environmental sample
  SIGNAL (1)...(20)
  DOMAIN (50)...(171): Polysaccharide deacetylase
  misc_feature (1)..(190): Xaa is any amino acid
MVKKLITGLAFSLMTMLLFSQSKAFHLYPNYTQYLKNRAVPTKKAFFFKAQTDEKIVCFSFDDGPNFPKTEKLIAFLKQRKCPAVFFLVGEQMKSDRIEVYKDPLFEIGCHGFHHDLYSQGANQESLRADVQAVLDVHKKFGFDAKFFRPPFGVINKHLAKIVNDLNIKGVLWSLDSQDFLMRPNRGYLT

SEQ ID NO: 29277 - DNA, 651 bp, Unknown
  Obtained from environmental sample
  misc_feature (1)..(651): n is a, c, g, or t
atgaatagagttgctgaaattaccagaaagacaaaagaaactgacattgttattaaactgaatattgatgggcagggtaaggccagacttgattacccaattggctttatggcgcatatgctcaatacatttgcccgccacgggctgtttgatattgaaattactgcaagcggcgatcttgaagtggatcaacatcatttggtggaagacacagggatagttttgggccagtgttttgcaaaagcgttaggcgataagaaaggcattaggcgtaacggaagctgttttttccctatggatgaaacgctggcccgcgccgccgttgatatttctggccgccctttcctgttttttgacggcgagctttcaggcacgccatttgtagccgcttccggcgatagggaaaaagaattccattttcagaccgataccgtcgaagatttttggcagggctttaccggcgcggcgggctgcaaccttcatctggaaattcttcgcggcagaagcgatcatcacaagattgaggccatgttcaaagccgccgcccgcgccattcgcgccgcctgcgagacagacgaacgcgctaaagatttaattccctcaacaaagggcgttcttcccggttttgacgcgccgagtgtgcttgcatga

SEQ ID NO: 29278 - protein, 216 aa, Unknown
  Obtained from environmental sample
  DOMAIN (34)...(186): Imidazoleglycerol-phosphate dehydratase
  misc_feature (1)..(216): Xaa is any amino acid
MNRVAEITRKTKETDIVIKLNIDGQGKARLDYPIGFMAHMLNTFARHGLFDIEITASGDLEVDQHHLVEDTGIVLGQCFAKALGDKKGIRRNGSCFFPMDETLARAAVDISGRPFLFFDGELSGTPFVAASGDREKEFHFQTDTVEDFWQGFTGAAGCNLHLEILRGRSDHHKIEAMFKAAARAIRAACETDERAKDLIPSTKGVLPGFDAPSVLA

SEQ ID NO: 29279 - DNA, 1530 bp, Unknown
  Obtained from environmental sample
  misc_feature (1)..(1530): n is a, c, g, or t
gtggtgcaggtgcgggtggcgaattacggcactatgactgaaaacatgactgtcactattcctgatatttttactaccggcaaagccaacatgaggcagtacgtcaggggttacggcggcatgcacgtcgcatgggacaatttcccgaggctggacgccgaggatacggaacttatgtacgacccctaccgcatgggctacaacatactgcggatcatgatcaggccggacaacatcgacattaaaaaaacaatggacgacatggtttacggttcccttgccaaattctatgccgactactacgaaaatgttaaaatcgttaacaaatacggcggctatgtggcggcaagcccctggaccccgcccaaagaatggaagagcaacaactccattaacggcggcggcaacctgataccctcgtactacaggcttttcgccaactacctgcgtaccttcgcccagctcatgtacgacaagggcgcccccatatactgtatttcgatttccaacgagccaaactacgtcgccggttacgacggctgcgaatggtcgccggaggaaatgaggaatttctggatggagataggccactttacggacggcgttaggggctacggcggcggcagggaattgccctacgttttgaccatgaacggcgaatcggcgaacaccccgtatatcaacgtcaaagcgctggaggaaccccgttcccgtgccgtaatcgaccttctcgcccgccacatctacggctcccgcaaagacagcctgtataatcacgatgattattcaaagctgctggtcaggcccgacggcacccttaccgaaatctggatgaccgagcataacatcaacagcgcgaacgccaccgggtattacaacgactggacatggaactatgtctggcgctacatgaacgacgtagacctggtaatgcgtttaaataacgaaaacgcctttgtctggtgggcaagcaagcgcttctacagcatggtgggagacggccagttcggcaccacggacggagcgcctctgccgcgcggctggggcttggcccactactcgcgcttcaccatcgatacgacccgtattgccatcaacccggttgggctggccgaatccggcggcggtgtcagtcctgcacaaactatgcgggacggaaacacaattacccatatagatcgggcagcctccaagctcaataacaaacttgacgagccggacaatgacgctgtgcgcataacggcgtatatttccagagacaataaagaaatcagcctgattttgatggcgccgactaaaaccggatcagccggttatgatcccggaatagtcaaggtggaattaccctccagagctgaaggtatgacaactcttcagtataaagtcaatggcgtaacggcggtccactctaacggcgctgctattttccagccctacggcattcaacttaaccaggcgcgggatactgtgtacatagacctaagcaagggacaaattgtgtcggttaagttaacaggagagtgggaataa

SEQ ID NO: 29280 - protein, 509 aa, Unknown
  Obtained from environmental sample
  misc_feature (1)..(509): Xaa is any amino acid
MVQVRVANYGTMTENMTVTIPDIFTTGKANMRQYVRGYGGMHVAWDNFPRLDAEDTELMYDPYRMGYNILRIMIRPDNIDIKKTMDDMVYGSLAKFYADYYENVKIVNKYGGYVAASPWTPPKEWKSNNSINGGGNLIPSYYRLFANYLRTFAQLMYDKGAPIYCISISNEPNYVAGYDGCEWSPEEMRNFWMEIGHFTDGVRGYGGGRELPYVLTMNGESANTPYINVKALEEPRSRAVIDLLARHIYGSRKDSLYNHDDYSKLLVRPDGTLTEIWMTEHNINSANATGYYNDWTWNYVWRYMNDVDLVMRLNNENAFVWWASKRFYSMVGDGQFGTTDGAPLPRGWGLAHYSRFTIDTTRIAINPVGLAESGGGVSPAQTMRDGNTITHIDRAASKLNNKLDEPDNDAVRITAYISRDNKEISLILMAPTKTGSAGYDPGIVKVELPSRAEGMTTLQYKVNGVTAVHSNGAAIFQPYGIQLNQARDTVYIDLSKGQIVSVKLTGEWE

SEQ ID NO: 29281 - DNA, 978 bp, Unknown
  Obtained from environmental sample
  misc_feature (1)..(978): n is a, c, g, or t
atgacaccagacgagcgattatttaatttgggcgacatggattacagggcactgaaatacaaaaaggccgctaattgcttccgcttggcggcgttgctgggacatgccgatgcacaatttatacttgggcgcatgcattacggcggtcagggtgtctcgcagaattacctagaagcagagaagtggtaccacttggcggcggagcaggggcacgctggagcacagaacaacctaggaatcatgcataacaacggcgagggtgtcccacagaattacgtggaggccatgttttggttccgcctagcggcgaaccaaggtcacgctggggcacagttcaagctaggtgaaatgtgttacagcggcaagggcgccaagaaagattataaagaggccatgaagtggttccgccaagcggccgagcagggtcacgctggggcacagttcaagcaaggcgaaatgtgttacaggggcgaaggcaccaagccggattaccgggaggccatgaattggttccgccaagcggccgagcagggccatgctgtggcacagtgcaccctgggagccatgtaccactactaccactaccccctccaggattaccaggagaccatgaaggaggccatgaagtggtaccgcctggcggcggcgcagggcaacgacagggcacagggcggaattggactcatgtatcactacggcgaaggcgtccagcaggattaccaggaggccatgaagtggtaccgcctggcggcggcgcagggcaacgacagggcacagtgcggaattggactcatgtatcacaacggcgaaggcgtccagcaggattaccaggaggccatgaagtggtaccgcctagcggcggcgcagggcaacgacagggcacagtgcggaattggactcatgtataacaacggcgaaggcgtccagcaggattaccaggaggccataaagtgtactcaaggcgctcgccataattaa

SEQ ID NO: 29282 - protein, 325 aa, Unknown
  Obtained from environmental sample
  DOMAIN (180)...(219): Sel1 repeat
  misc_feature (1)..(325): Xaa is any amino acid
MTPDERLFNLGDMDYRALKYKKAANCFRLAALLGHADAQFILGRMHYGGQGVSQNYLEAEKWYHLAAEQGHAGAQNNLGIMHNNGEGVPQNYVEAMFWFRLAANQGHAGAQFKLGEMCYSGKGAKKDYKEAMKWFRQAAEQGHAGAQFKQGEMCYRGEGTKPDYREAMNWFRQAAEQGHAVAQCTLGAMYHYYHYPLQDYQETMKEAMKWYRLAAAQGNDRAQGGIGLMYHYGEGVQQDYQEAMKWYRLAAAQGNDRAQCGIGLMYHNGEGVQQDYQEAMKWYRLAAAQGNDRAQCGIGLMYNNGEGVQQDYQEAIKCTQGARHN

SEQ ID NO: 29283 - DNA, 444 bp, Unknown
  Obtained from environmental sample
  misc_feature (1)..(444): n is a, c, g, or t
atggggatttacttagatacgtgctgttggaatcggccaagtgatgatcatagacaagcgaccattcgggatgaagcagcggcgattttgaaaattacggagttatcgcggatgtatgggtatacgatctatagtagtaaagcattggacgaggaaattaatgcaaatcctgatgccgaaaaaaagactgcggcttggaagttgtaccgccaaatggcgaaggcgcgagccacatacaacgaaagcatatttaatcattttttgccaatggcaaggcaagccggtatcagaggatatgatgcgctccatttatgctattccatagcggcgggtgcaagcagtttattgacaacagatatgcagtttttaaaagttgcgtctcggctggttttgccggtattggttataaatccgctacaatttaatgttgggggtgtaatatga

SEQ ID NO: 29284 - protein, 147 aa, Unknown
  Obtained from environmental sample
  misc_feature (1)..(147): Xaa is any amino acid
MGIYLDTCCWNRPSDDHRQATIRDEAAAILKITELSRMYGYTIYSSKALDEEINANPDAEKKTAAWKLYRQMAKARATYNESIFNHFLPMARQAGIRGYDALHLCYSIAAGASSLLTTDMQFLKVASRLVLPVLVINPLQFNVGGVI

SEQ ID NO: 29285 - DNA, 945 bp, Unknown
  Obtained from environmental sample
  misc_feature (1)..(945): n is a, c, g, or t
ttgcgaccaaactgccgattcttttactcaatctttcccgcgatagcaaaattgactttgacaaatattaaaatcaatctcttgaaagggctaaaaacagattatattgattattatttaatgcacatgataaccgacatggatcagtggaaaaaactgagggactcaggaattgaaagctggttagcgcagaaaaagcaaacagggcagataaaacacataggtttttcttttcatggctcggcgagcgaatacttaaaaattctcggcgcttatgactgggaactgtctctgatacaatacaactattttgatgaaaattatcaggcgggcgttatggggcttaaagccgccgccgcaagaatgcccgttgtaatcatggaaccgcttctcggcggaaaacttgcgacgggattgccgaaagacgccgttaaaattttcaaaaacgccgatgaaaatttaacgcccgccggctgggcgcttaactggctatggaatcagaaggaagtaactacgattatttccggcatgaacgcaaaagaacaactggaagaaaatatctcccttgccgaaaaatcttccgccggaatgttagacgacgataaattagccgtttaccaatcggcgcttgacgttataaaacgttcctgcaaagtacgctgtacaggctgtaattactgtatgccatgtcccgcaggcgtaaatattcccggttctttctcggcgtataatgccgtgtattcaatgggctactatgagggaataaaacaatacgccatgagtacgggaatgacgcaggaaaagagcagcagtccgcgcctgtgcgtaaaatgcggcaaatgcgaatcgcactgtccgcagagtattcagattataaaagagcttgacgaggttaagaagaaaatggagccgcctgtatcaggttatcggctcggccgattctga

SEQ ID NO: 29286 - protein, 314 aa, Unknown
  Obtained from environmental sample
  DOMAIN (268)...(291): 4Fe-4S binding domain
  misc_feature (1)..(314): Xaa is any amino acid
MRPNCRFFYSIFPAIAKLTLTNIKINLLKGLKTDYIDYYLMHMITDMDQWKKLRDSGIESWLAQKKQTGQIKHIGFSFHGSASEYLKILGAYDWELSLIQYNYFDENYQAGVMGLKAAAARMPVVIMEPLLGGKLATGLPKDAVKIFKNADENLTPAGWALNWLWNQKEVTTIISGMNAKEQLEENISLAEKSSAGMLDDDKLAVYQSALDVIKRSCKVRCTGCNYCMPCPAGVNIPGSFSAYNAVYSMGYYEGIKQYAMSTGMTQEKSSSPRLCVKCGKCESHCPQSIQIIKELDEVKKKMEPPVSGYRLGRF

SEQ ID NO: 29287 - DNA, 864 bp, Unknown
  Obtained from environmental sample
  misc_feature (1)..(864): n is a, c, g, or t
atgatggggaaagcccgcttcgcgttcggacgagcgctcccccgccccgtcggtctggcgctcttttcgttttggggttgggcttgctactacatattgggcaccgataggcggctgaccgtccacaacctgacctttatattcggcgacgagtggagcaagaagaagatccgcgccgtcgcgcgggcggtgtttatatcgcaagggaaaaatctcttcgacgccgttcacttgggcggcgtcaaaaacgacgtctttgacaatatagtttctcacgacagcctatacggagtagcccaggcctgcgaacgtggcaagggcattgtagccataaccgcgcacttaggctgcttcgagatgctgctgcacctattcgcccgccgcggactagagtgcttcgccatcggacgggcgttcaaaaaccccgacgtagacgagaccgtgcgaatgatgagaagcggccccggcatagagtatatcgacagatcggaaagcacccgcaaaatcgtgcggctgctgaaacatggaaaagtcatgggagtattaatagaccaagacacgcacgtagagggcgtattcgccgactttctgggacaccccgccttcacgccgagcagcgcggtacgcttcgcgatgaaactgggaatcccgatgttcgtatcggtcacggcaagactgccgggaaataaacaccacgtctatgtcagcaaagaaataatacccgtaaacaccggagaccccaaagcggatttggtcgccaatatacagaagatcaacgacattatcagcgaatacatccgcaaacacccggaacagtgggtctggatgcacgagcggtggaagactcagccggttgacacatga

SEQ ID NO: 29288 - protein, 287 aa, Unknown
  Obtained from environmental sample
  DOMAIN (1)...(282): Bacterial lipid A biosynthesis acyltransferase
  misc_feature (1)..(287): Xaa is any amino acid
MMGKARFAFGRALPRPVGLALFSFWGWACYYILGTDRRLTVHNLTFIFGDEWSKKKIRAVARAVFISQGKNLFDAVHLGGVKNDVFDNIVSHDSLYGVAQACERGKGIVAITAHLGCFEMLLHLFARRGLECFAIGRAFKNPDVDETVRMMRSGPGIEYIDRSESTRKIVRLLKHGKVMGVLIDQDTHVEGVFADFLGHPAFTPSSAVRFAMKLGIPMFVSVTARLPGNKHHVYVSKEIIPVNTGDPKADLVANIQKINDIISEYIRKHPEQWVWMHERWKTQPVDT

SEQ ID NO: 29289 - DNA, 1017 bp, Unknown
  Obtained from environmental sample
  misc_feature (1)..(1017): n is a, c, g, or t
ttgttcaaagagggccaaatggtcaaagagggcgacttgttggtcgagattgacccccgcccttaccaagtgcaactgatgcaggccgaaggcaacagggcaaagaaccgcgccgccctccacaacgcaaaacttgaccttgaaaggtacaaaagcctattcgagaaaggcgtggtctccagccagcagctagacacccacaacgctgcagtggagcaactggaggcggctctgatgagcgacgagggctcggtcgagagttccaagctcaatctgacctactgccggatcaccgcccccatatctggccgcgtagggctccgcaatgttgaccccggaaacttggtcgccaccaatgacccaaatgggatagtcgtgatcacgcccctttctcccatacacgtggtttttgcaatagccggcgactcaatcagcaaagtctattctccgcaggaatcccaaaggctgagcgtagaggcctgggacaaagaccttaccaagaaattggctacggggaaagtgttcgcgctcgacaaccaagttgacctcgccacggggacactaaaaattaaagccctgtacgaaaatagcgaccaatccctcttcccaaaccaatttgtcaacgtcaggctctttgttgacaccctccgcaacgccatattggtccccagcgcgtccatccagaggggcatacagggggactatgtgtacgtggttaaagaggattcaaccgttgaactgagggtggtgggaatattggccgcccagggcgacgtaacagccctgagcaaggggctacaagcgggagagactgtcgtcactgacggcatagagaggctgcgtccaggctccaaggtagtcataccgggggccgagccggctcagggagggctgccgcagggtggccggggagccaaggaaggcgccaaggaagcccaaggcgccaaaggccctagcgggggcgccgcgccagcgggcagtaatcaggggcgaaggcaggggcggacaggctcatga

SEQ ID NO: 29290 - protein, 338 aa, Unknown
  Obtained from environmental sample
  DOMAIN (1)...(274): HlyD family secretion protein
  misc_feature (1)..(338): Xaa is any amino acid
MFKEGQMVKEGDLLVEIDPRPYQVQLMQAEGNRAKNRAALHNAKLDLERYKSLFEKGVVSSQQLDTHNAAVEQLEAALMSDEGSVESSKLNLTYCRITAPISGRVGLRNVDPGNLVATNDPNGIVVITPLSPIHVVFAIAGDSISKVYSPQESQRLSVEAWDKDLTKKLATGKVFALDNQVDLATGTLKIKALYENSDQSLFPNQFVNVRLFVDTLRNAILVPSASIQRGIQGDYVYVVKEDSTVELRVVGILAAQGDVTALSKGLQAGETVVTDGIERLRPGSKVVIPGAEPAQGGLPQGGRGAKEGAKEAQGAKGPSGGAAPAGSNQGRRQGRTGS

SEQ ID NO: 29291 - DNA, 1053 bp, Unknown
  Obtained from environmental sample
  misc_feature (1)..(1053): n is a, c, g, or t
atgcgcgttaacggtattgacgacattatcagtattaacggtatcaacactgtcaacgatatcgacagtaacgatattatagaaatgccaattaaatattgcacgatatcagacactctggattgcttcgctacgctcgcaatgacgtcattgcgaggagcgaagcgacgaagcaatccagaatatttagcggtaggcgcaatgtttaattgtggtatctataacaacacggcgacaaacgcgaaaacgcgacgatacatagtagacagcaccctccgcgacggggagcaaacacccggaatcttcttttccccaaatcaaaaattagagatagccgcgctccttgattccagcggcgttcatcaaatagaagcgggcgttccggcggcatcgcctgaagaaaaagcaaccatcgtcaatataatcaaaaaccgcaaaaacgccataatatcggtatgggcgcggcttgtcccatccgacatccaacacgcgatagacgtacgcccaaacatcatacacatctgcgtccctgtctcgcaaacgcaaatccgagaaaaactgcgcacggataaagagagcgtaatcaataaactgcgcgaatgtctacagatagtagaaaaaagcggcatcccgctctccgtaggttttgaagacgccttccgggcggatatagacttcatgatactaatagcgcgaatccttacagactccggcgtaacccgcatacgcctttccgacactgtaggcgtcgcttccccatctcaatgcggtacgctcttaaagaaaatctccgccgaactaaacggcaaagcggaactcggcatccacgcccacaacgacctcggcatggccgtagcgaacacaatcgaggcggcgaaatcaggctgcctatacgccgacgcaaccatcggaggcataggcgaacgcgccggaaactgcaacttcgcggacttgatccaagcgagttcgtcaatattcgactgggggatgacggcggaggcggcgcgggagttgcaacgtgagattgggaagattatttggtttttattttga

SEQ ID NO: 29292 - protein, 350 aa, Unknown
  Obtained from environmental sample
  DOMAIN (93)...(344): HMGL-like
  misc_feature (1)..(350): Xaa is any amino acid
MRVNGIDDIISINGINTVNDIDSNDIIEMPIKYCTISDTLDCFATLAMTSLRGAKRRSNPEYLAVGAMFNCGIYNNTATNAKTRRYIVDSTLRDGEQTPGIFFSPNQKLEIAALLDSSGVHQIEAGVPAASPEEKATIVNIIKNRKNAIISVWARLVPSDIQHAIDVRPNIIHICVPVSQTQIREKLRTDKESVINKLRECLQIVEKSGIPLSVGFEDAFRADIDFMILIARILTDSGVTRIRLSDTVGVASPSQCGTLLKKISAELNGKAELGIHAHNDLGMAVANTIEAAKSGCLYADATIGGIGERAGNCNFADLIQASSSIFDWGMTAEAARELQREIGKIIWFLF

SEQ ID NO: 29293 - DNA, 978 bp, Unknown
  Obtained from environmental sample
  misc_feature (1)..(978): n is a, c, g, or t
atgacagattggccgagcggtaagtatccgctggtggttgtatgcgccggggccggttacggcaagactaccgcggttagcgactttataagaaagtatgaggcgaccaagtcatggatacagctctccgacctcgatgataacgggagtcgtttttgggaaaattacgtatattccctgtcaagagttaaccctgccgcggccaaggcgttttccgagattggttttccggataccaaagaaaagctgcgcaatttcaggaccatgtcgcaaaatttcattgtagaagggaaaaagatatttgtaatagacgatttccattctattgaagatccgaccgtgcttcgtttcatggatgaatgttttttcaggaatataccgccggaaaccacgatatttttgatttcacgttccatggcccgcgcgaataccgcggatataatttcccggggccgggtatttaacgtaagtgagaacgacttgcgttttaccgaaaacgagctggcgcaatatttccaccagatggatatttcatacaagaaggacagcctgtatgagatcatgcaggataccgaaggctgggcattcgcgatcaaccttatcgcgcgctcgtaccagagagcgcccggctacaacggctatgtgcgcagcgcgatgaagcggaatatcttccagtttttggaaacggaaatatgggccggaattcccgagcgtctgcggaattttttggttcaagtgtccctgattggacatttgtccgttgagttgctcacaaaactggcgggaaaggataaagatcttgtcggggaactggaaagacaaagcgcctatctgcgcatggacagtaatatcggcgcttatgtcattcaccctttgtttctggattttttaaggacnaagcagtactctcttcccggaaaaacaagaaagaaaaatctacgctgttcagggcgatggtgcgcacataacggcttttaa

SEQ ID NO: 29294 - protein, 325 aa, Unknown
  Obtained from environmental sample
  misc_feature (1)..(325): Xaa is any amino acid
MTDWPSGKYPLVVVCAGAGYGKTTAVSDFIRKYEATKSWIQLSDLDDNGSRFWENYVYSLSRVNPAAAKAFSEIGFPDTKEKLRNFRTMSQNFIVEGKKIFVIDDFHSIEDPTVLRFMDECFFRNIPPETTIFLISRSMARANTADIISRGRVFNVSENDLRFTENELAQYFHQMDISYKKDSLYEIMQDTEGWAFAINLIARSYQRAPGYNGYVRSAMKRNIFQFLETEIWAGIPERLRNFLVQVSLIGHLSVELLTKLAGKDKDLVGELERQSAYLRMDSNIGAYVIHPLFLDFLRTKQYSLPGKTRKKNLRCSGRWCAHNGF

SEQ ID NO: 29295 - DNA, 300 bp, Unknown
  Obtained from environmental sample
  misc_feature (1)..(300): n is a, c, g, or t
atgaataattttgtgttcagggttaagccggccggcagtccttacagtttaacggaatttgagctggctcttaaaccgtatcatccttccattccgaatgttcccgctatctgggatgagtcgataccgttctcaggcagcatggacacaattgttttgggaccggatgaatgttttgttgtctcggatgatcgcggcaacacaaacgattcccgcacatggggcgccatatccccgtcgttaattaccgcaaaggcgcttttgcgcttctggcctgtgaataaatttgaactttattaa

SEQ ID NO: 29296 - protein, 99 aa, Unknown
  Obtained from environmental sample
  misc_feature (1)..(99): Xaa is any amino acid
MNNFVFRVKPAGSPYSLTEFELALKPYHPSIPNVPAIWDESIPFSGSMDTIVLGPDECFVVSDDRGNTNDSRTWGAISPSLITAKALLRFWPVNKFELY

SEQ ID NO: 29297 - DNA, 492 bp, Unknown
  Obtained from environmental sample
  misc_feature (1)..(492): n is a, c, g, or t
atgttaaattctactagtttttatatacatgttcctttttgcgtcaatggtaagtgcgattattgtgatttttattctgttgttttggatgaaaaaaatgaaactattatggattcatatttgaaatcttttttagaggatataaaatatcagattgaatattttaatgttaaagatatttgtactgtttatataggaggcggtactccttctgttcttggcgcaaaaaagcttcatgttatacttgacgcgttaaatgttatttctgggttttctccggttgaatttacaatagaggcgaatccggaatcggtgaccgaagattttttatctgtgtgccgcgaaggggggataaacaggataagccttggggtgcagacatttaatgaaaaatcgcgcttcgcggtaggacgcagaggagatgttaaattgcttgaaaaacggcttgcgcttgtttcagatatgtttccgggcgcgtttttcgcggattaa

SEQ ID NO: 29298 - protein, 163 aa, Unknown
  Obtained from environmental sample
  misc_feature (1)..(163): Xaa is any amino acid
MLNSTSFYIHVPFCVNGKCDYCDFYSVVLDEKNETIMDSYLKSFLEDIKYQIEYFNVKDICTVYIGGGTPSVLGAKKLHVILDALNVISGFSPVEFTIEANPESVTEDFLSVCREGGINRISLGVQTFNEKSRFAVGRRGDVKLLEKRLALVSDMFPGAFFAD

SEQ ID NO: 29299 - DNA, 1128 bp, Unknown
  Obtained from environmental sample
  misc_feature (1)..(1128): n is a, c, g, or t
atgcacatcctctactacataacgtctcacggctacggccacgcggtcaggagcgccgcggtttgcaacgcgctgtttgaggctgtcggcgcttgcacccgtcccgccaacgtcggtgcggatattgatagagacggccttcgactgcgcctgacggtctgcaccgacatcccgcaagcgttcttcaaagaggaactcccgttcccgcataattggcgcgccggcgggttcgacgtcgggtgcctccagagcgacggggtctccgtattaataaaggagacgctcgcggcctacaaggagatatccgttaataacagactgcgcttagacgaggaggtgcggtggtgcaagtttaataatgttgactgcgtcattagcgacatcacgccgttcgcctttgatgtggcgcacaaggcggggattccgtccgtggcgatcagcaattttacgtggcatgacatctactcgccatacgcggagcggttcccggagtacggggagatgctggcggagatggcggatcaataccgcaaagcctcaatcgcgttgacgctctacccgtccttgccgatgccggtctttgagaagaagcagtcgatacccatactcggcagacgcggcgttgaccggcgggaggatatttgccggcattttgggatcgaccggggcaagcggcttggggtgatctacgtagggaatttcgggcttgaccgcgttgactggcggcggcttgaggcgtttgacgggtgggagtttgtcggcgtctacccgctaccggacgggcctaaaaattatcacttagtatcaaaagaacagttccggtaccaagacctgtcggcctcggctgacgccgtaatagccaagatggggtacggggtcttctccgaatcgatacttaacggcataccgctggtctacctgccgagggaggattttgcggagtttccggtcttggacgcggaggcgaagaggcttgggagcggggtttgtatcaataccgaagagttttgcggcttaggatggttaaaggtattgaacgggattgtcgataataataatatgacgccggacaactgcggcggggcgcgtatgtgcgcggaggagataataaaaatcgcgggaaagtaa

SEQ ID NO: 29300 - protein, 375 aa, Unknown
  Obtained from environmental sample
  misc_feature (1)..(375): Xaa is any amino acid
MHILYYITSHGYGHAVRSAAVCNALFEAVGACTRPANVGADIDRDGLRLRLTVCTDIPQAFFKEELPFPHNWRAGGFDVGCLQSDGVSVLIKETLAAYKEISVNNRLRLDEEVRWCKFNNVDCVISDITPFAFDVAHKAGIPSVAISNFTWHDIYSPYAERFPEYGEMLAEMADQYRKASIALTLYPSLPMPVFEKKQSIPILGRRGVDRREDICRHFGIDRGKRLGVIYVGNFGLDRVDWRRLEAFDGWEFVGVYPLPDGPKNYHLVSKEQFRYQDLSASADAVIAKMGYGVFSESILNGIPLVYLPREDFAEFPVLDAEAKRLGSGVCINTEEFCGLGWLKVLNGIVDNNNMTPDNCGGARMCAEEIIKIAGK

SEQ ID NO: 29301 - DNA, 510 bp, Unknown
  Obtained from environmental sample
  misc_feature (1)..(510): n is a, c, g, or t
atgaaagactgcatgcgccagataggacattccatgtcctgccaccggatgctgatggattattccaacaactactattttcccgcgcttaaaaattaccgcaaattgatgaaagatgaatatgccgacgcaaaatcccttgcggcgtatttcggcaaactgcgtgattcatgggacagcctcaaaattttaaaaatcgaagccaacaccaagccgataatgcagcgcggggattcgctcaatgttacagctcatattgatcttggtaaaatggagccaaacgatttgctcgtggaactgtattacggcgcggtatcgaaccagaacaatgagattaccaatgcccacagaatcgagatgaagtgggtcggcagtaaagatggcctgaaccagtaccatgtacgggtagaatgttccgacacgggcttccagggccacacggtgcggattttaccaaagcacgaagccttgatccatccgtatcgcaccggttttattaaatgggcctaa

SEQ ID NO: 29302 - protein, 169 aa, Unknown
  Obtained from environmental sample
  misc_feature (1)..(169): Xaa is any amino acid
MKDCMRQIGHSMSCHRMLMDYSNNYYFPALKNYRKLMKDEYADAKSLAAYFGKLRDSWDSLKILKIEANTKPIMQRGDSLNVTAHIDLGKMEPNDLLVELYYGAVSNQNNEITNAHRIEMKWVGSKDGLNQYHVRVECSDTGFQGHTVRILPKHEALIHPYRTGFIKWA

SEQ ID NO: 29303 - DNA, 1434 bp, Unknown
  Obtained from environmental sample
  misc_feature (1)..(1434): n is a, c, g, or t
atgacagattggccgagcgcttggttttctacagaaccgaaaactcttgatccgctcaatatcaatgatacgtcggacggcagaagtatcctttttaatgtctttgaaggacttgtaaaacctgataccgacggaactttactgccctgtatcgccgaatcatggacaatagagcgtgacgcgctaatttataccttcactctcagaaaagacgtgcgttttcatgacggctcgattgtaaccgcgaacgatgtcaagttcagtattgatacggcgattgccgcaggttttaacggattaaacaggatagataatgtcgcgattacgtcggacaaccgcgtaagaataacccttaaagctcccgaccctgaatttcttccgtatataactgttggaattgttaaagcggataataaagacagggaaaaaaatattatcgggacaggtcccttctttatcgaaagttttactccgcagagaaaccttgtgttaaaaaaatttaacgactattggaagaaaaaactcgacccgtcgctggacatacctcatttggaaaaggtaactatcgtttttttcgcgaatgttgaagcgttgatgattgccatgagaagcggtaatgttgacggcgcgaatttggtcggctcttttgccgcccagcttgatcacagaaatttcgatattattgacagttattcggcggcggttcaacttatggcgctcaataacgccgctgcgcccctcaacgatatccgcgtacgcaaagccataaattacggcgttgacattcagggaataattgacggcgcttttttcggaaaaggcgcgccttcgggcagtcctgtaattccgggattatcaacatactatgacgggtctttaagctatccgtatgatccgcaaaaagcgcgcgagcttcttaccgaagccggttttaatgacacacataaactttcgtttgaaattacagtgccttccgaatataccatgcatgttgataccgcgcaggtaattgttaaccaacttgaacaaatagggattaacgcgtccgttaaacttgttgactggaatacatggctttccgatgtttacagaggacgcaattatcaggcgactgtaatttctttggacagcccgattgtttccgcgcgtaattttcttgcccgttacagatcagataacagcggtaattttatcaatttttcaaacaaagaatttgacagaacttatgactcgctccttacggagacaaacgaaacaagaagaaaacagctttacaaagacgcgcagcgtataattacctcagacgcggcaagcgtttatatacaggatattctttattataaagttttccgcgcgggcgctttcgccggagcgaagaattatcctctattaattgtggatttttcttcgatttacaaggtacagcagaattga

SEQ ID NO: 29304 - protein, 477 aa, Unknown
  Obtained from environmental sample
  DOMAIN (46)...(397): Bacterial extracellular solute-binding proteins, family 5 Middle
  misc_feature (1)..(477): Xaa is any amino acid
MTDWPSAWFSTEPKTLDPLNINDTSDGRSILFNVFEGLVKPDTDGTLLPCIAESWTIERDALIYTFTLRKDVRFHDGSIVTANDVKFSIDTAIAAGFNGLNRIDNVAITSDNRVRITLKAPDPEFLPYITVGIVKADNKDREKNIIGTGPFFIESFTPQRNLVLKKFNDYWKKKLDPSLDIPHLEKVTIVFFANVEALMIAMRSGNVDGANLVGSFAAQLDHRNFDIIDSYSAAVQLMALNNAAAPLNDIRVRKAINYGVDIQGIIDGAFFGKGAPSGSPVIPGLSTYYDGSLSYPYDPQKARELLTEAGFNDTHKLSFEITVPSEYTMHVDTAQVIVNQLEQIGINASVKLVDWNTWLSDVYRGRNYQATVISLDSPIVSARNFLARYRSDNSGNFINFSNKEFDRTYDSLLTETNETRRKQLYKDAQRIITSDAASVYIQDILYYKVFRAGAFAGAKNYPLLIVDFSSIYKVQQN

SEQ ID NO: 29305 - DNA, 390 bp, Unknown
  Obtained from environmental sample
  misc_feature (1)..(390): n is a, c, g, or t
ttggaggctgaaatggcgcgtttattggaagtgaataacctgaccgcgggggtaaaaaaagacggaaaagtgtaccggatactgaacggaataagtttttcgattgacgagggggaaattgtagggcttgccggagaatcgggctgcggaaaaagcatgaccgcgttatcaattccaaatcttctgccccatggaataaaaatccttgatggcgaaatagttttaaataacataccgattacttccatgagcgagaaagagctgagttacataagaggaaaagaaatctccgttatttttcaggatgtaaggcagtcgcttaatccattgatgagagtcggcggacaaattacggaaatgctggagcttgccggcactcggccgatctga

SEQ ID NO: 29306 - protein, 129 aa, Unknown
  Obtained from environmental sample
  misc_feature (1)..(129): Xaa is any amino acid
MEAEMARLLEVNNLTAGVKKDGKVYRILNGISFSIDEGEIVGLAGESGCGKSMTALSIPNLLPHGIKILDGEIVLNNIPITSMSEKELSYIRGKEISVIFQDVRQSLNPLMRVGGQITEMLELAGTRPI

SEQ ID NO: 29307 - DNA, 795 bp, Unknown
  Obtained from environmental sample
  misc_feature (1)..(795): n is a, c, g, or t
atgagaataactaatttgaaggttggagccgttatcggcataataattgtaaagatgtccctattaagccttttttgggttccgcataattacaaccaaatggatcattcaaaccgccttatgcctccgtccgcaagccatatacttggaacagataattttggaagagatgttttctcgcgcatcatggctgggggaaggaactccctgctccttgcggtatgcacagtaatgggagcggcggtccttggaagtttactggggcttttggcgggctatatcggcggaattacaggggaaatcataatgcggtttattgatacgcttaactcattccccggaatagtccttgcgcttctgttggtagcggtaatgggcaacagtcaattcagtttgtttttggcgctgttaattctttttactccaagctacacacgcgttatgcgaacaggtgcgctgagttataaaaacgcttcttttatacaggcggaaaaaatactgggcgcaggcttttttcgcataacatttattcatattctgcctaatcttgccccatcgcttctttccgcttcggtacttgggctttctaacgctattctcgccgaagccgccatgagttatttgggaatgggtatacagccgcctgaaccttcatgggggcgtatgttattcgaggcgcaggcgtggtttttcaacgccccgtggtgcgccattgcgcccggcattttcataatgctgacggttatcgcttttcacttgttaggcgaaggtcttcgcaaaaggtttggaggctga

SEQ ID NO: 29308 - protein, 264 aa, Unknown
  Obtained from environmental sample
  DOMAIN (66)...(264): Binding-protein-dependent transport system inner membrane component
  misc_feature (1)..(264): Xaa is any amino acid
MRITNLKVGAVIGIIIVKMSLLSLFWVPHNYNQMDHSNRLMPPSASHILGTDNFGRDVFSRIMAGGRNSLLLAVCTVMGAAVLGSLLGLLAGYIGGITGEIIMRFIDTLNSFPGIVLALLLVAVMGNSQFSLFLALLILFTPSYTRVMRTGALSYKNASFIQAEKILGAGFFRITFIHILPNLAPSLLSASVLGLSNAILAEAAMSYLGMGIQPPEPSWGRMLFEAQAWFFNAPWCAIAPGIFIMLTVIAFHLLGEGLRKRFGG

SEQ ID NO: 29309 - DNA, 519 bp, Unknown
  Obtained from environmental sample
  misc_feature (1)..(519): n is a, c, g, or t
atgggacttctttttatttttatcttcggtttcggtttaaaactttttatccccggcgaatatatcgattacagtaaaaactttctagggtttttccgctgtctttgtttccccgctctcgcaatttcaattccaaacgccgcgattcttattaaatttttaagaggttcgctctttgcggaactgcgaagcgattatgtgacaatggcaagaagcaagggcgcggacggactttatatcctgcgtaaacacgttttaaaaaacgcgctgctgcccgcggttaccatattcgccatgataatcgccgaagttttttcgggaagtatcgttattgaacaggtctttacaattccgggaatcggcagacttttaatctccgcgataagttccagagattatccgttaattcaatcacttatggtttacatagcttttattatcatcattgccaacactctcgcggacatagcgatcatgattatcgacccaagaatcagagaggcaagagacatcagatga

SEQ ID NO: 29310 - protein, 172 aa, Unknown
  Obtained from environmental sample
  DOMAIN (1)...(167): Binding-protein-dependent transport system inner membrane component
  misc_feature (1)..(172): Xaa is any amino acid
MGLLFIFIFGFGLKLFIPGEYIDYSKNFLGFFRCLCFPALAISIPNAAILIKFLRGSLFAELRSDYVTMARSKGADGLYILRKHVLKNALLPAVTIFAMIIAEVFSGSIVIEQVFTIPGIGRLLISAISSRDYPLIQSLMVYIAFIIIIANTLADIAIMIIDPRIREARDIR

SEQ ID NO: 29311 - DNA, 1164 bp, Unknown
  Obtained from environmental sample
  misc_feature (1)..(1164): n is a, c, g, or t
atgaatacaaatgtttatgttgtgagatgtgaaaactatgaaaaagcggataagaaaattgaagaattgcttaatttaatcggcggaatcggacagtttgcaaaaaaaggcgaaaaaatcaccttaaaagcaaatctgttaggcgctgccccgcctgaaagagcagtcagcactcatccgtcaataattgccgcagtaggcaagcttgcaaaaaaagaaggcgctatcccattaatcgctgacagtcccggttccggctatctgtacaatgaaacgacgcttaaaaaactttataaaacctgcggaatgtatgaagccgcggaacaagcgggtattgatgtaaacatggatacaagatatgacaaagtatcttttccgcagggcaaattaatgaaacaaattgatgttataaaaccaataacgcaagccgatgcggtatttaatctatgtaaaatgaaaacgcatttatttatgcacgtaacaggcgctgtaaagaatcattttgggattattccgggtttgtcaaaagtagggtttcacgcaaagttattcgataaagagcgttttgcggacatgctgttggatttgtctctttttgtagcaccgcgattatcaattatggacgcggtacttgccatggaaggcgaaggacccggcgcatcgggaacgccaaggcaggtgggacttttgttggcatcgacaaacgatcttgccattgatgtcgttgcgggtgaaatcatgggattgccctatgaacacaaccccgtattaatggcggcaaaaagacgcggaatattaccgtacaaaatagaagatgtaaatgtaattggcgaggagctttccaatgtaaaaatatccgattataaattcccgtcaaccgttaaaggttttagtaaaactgtcgagaaaagccctgttataaggaatattttaaaatcggctttaaccaaatatcctgtagtggcaaaaggaagatgtataggctgcggtatgtgcgcgactgcttgtccgcaaaaaatgattacaatgattacgcaaaaaggaaagaaaaaagctgatataaaactgaaagattgtattcgatgttattgctgccacgaattatgcccgcataaagcgattgatatcaagagcaagtttatttataaggctttaaaaatttaa

SEQ ID NO: 29312 - protein, 387 aa, Unknown
  Obtained from environmental sample
  DOMAIN (352)...(375): 4Fe-4S binding domain
  misc_feature (1)..(387): Xaa is any amino acid
MNTNVYVVRCENYEKADKKIEELLNLIGGIGQFAKKGEKITLKANLLGAAPPERAVSTHPSIIAAVGKLAKKEGAIPLIADSPGSGYLYNETTLKKLYKTCGMYEAAEQAGIDVNMDTRYDKVSFPQGKLMKQIDVIKPITQADAVFNLCKMKTHLFMHVTGAVKNHFGIIPGLSKVGFHAKLFDKERFADMLLDLSLFVAPRLSIMDAVLAMEGEGPGASGTPRQVGLLLASTNDLAIDVVAGEIMGLPYEHNPVLMAAKRRGILPYKIEDVNVIGEELSNVKISDYKFPSTVKGFSKTVEKSPVIRNILKSALTKYPVVAKGRCIGCGMCATACPQKMITMITQKGKKKADIKLKDCIRCYCCHELCPHKAIDIKSKFIYKALKI

SEQ ID NO: 29313 - DNA, 426 bp, Unknown
  Obtained from environmental sample
  misc_feature (1)..(426): n is a, c, g, or t
atgatctttgatcacggatgcgctcaaaaaattgttaaaagcgtgtcatccggcctgttgcagcatgagctttatacgtgggaagtgacacataacgatctggtttatgctgatgacattactccggcgagccgttttgtggataaaactgtcaaggaatggatagcggaactgaacaaggaacagcgcgaaaaattcctaaacgcgctctattccattttagataattcggaattaaaatcgcttaaggattttgaagcctcgtggtttaaggcggtggggcgtatgttaaaaacattcggcggcattgatgaaaacaagaaacatcttattcaaaaaacttttggagacctgtttaacgttgcccgccgtaattttgacactctgttaaataatcatccgcccggcaagaaaacggaaaaatga

SEQ ID NO: 29314 - protein, 141 aa, Unknown
  Obtained from environmental sample
  misc_feature (1)..(141): Xaa is any amino acid
MIFDHGCAQKIVKSVSSGLLQHELYTWEVTHNDLVYADDITPASRFVDKTVKEWIAELNKEQREKFLNALYSILDNSELKSLKDFEASWFKAVGRMLKTFGGIDENKKHLIQKTFGDLFNVARRNFDTLLNNHPPGKKTEK

SEQ ID NO: 29315 - DNA, 576 bp, Unknown
  Obtained from environmental sample
  misc_feature (1)..(576): n is a, c, g, or t
ttgggccagaaggtaagcggcatactgaaacgtctgggtatgcccaacgcgcgttttgccccctcggtaacggctaaaacccgtgaagacggtacgcaagccctggtctgcggcccctggggagccgaagacgtagaattcctcatttccgccaattccggcgagccgctgaaagacctttcccgcgtggcatccggcggagagctttcccgcgtaatgctggcgataaaatcggtattatcctccggcgacagcatagaaaccctggtttttgatgaaattgacacgggcataggcggcgaggtagcccttgcggtgggcgaatacctggaaaaaatcggaaaataccggcaaattttctgtgtaacacatcttgcgagtatagcagttcgtgccgataatcattttaaggttgaaaagcggaccgagggaggcagaacctttaccggagtcggcccattgaacgcacaagggcgcagaaaggagattgcccggatgctggcgggggattcaggagaggcggcgcttgcccatgccgatgatttaatcttaaaatacggaaagagaggcggctaa

SEQ ID NO: 29316 - protein, 191 aa, Unknown
  Obtained from environmental sample
  misc_feature (1)..(191): Xaa is any amino acid
MGQKVSGILKRLGMPNARFAPSVTAKTREDGTQALVCGPWGAEDVEFLISANSGEPLKDLSRVASGGELSRVMLAIKSVLSSGDSIETLVFDEIDTGIGGEVALAVGEYLEKIGKYRQIFCVTHLASIAVRADNHFKVEKRTEGGRTFTGVGPLNAQGRRKEIARMLAGDSGEAALAHADDLILKYGKRGG

SEQ ID NO: 29317 - DNA, 666 bp, Unknown
  Obtained from environmental sample
  misc_feature (1)..(666): n is a, c, g, or t
atgcagaaacacagagggagatattccgctgcataccgcggtcgctatggaacggatagacatagtaaatatttgttaaaaacaggcgtttctattcacgcacgcaacacaagaaacagaactccttttcaaacggctttaagcatatcgccaaaaatggtatcggctcttttggaaaacaacaggatttttataccggatgattacggcaattccgttcttcacgttgcgttactcgaaagaacgtcggatgaaataataaatgtgattgtaaaacagggagcaagaataaacgccgttgacaataacggtaaaactcctctgcgtcttgcgcttgatatggagttatggcaagctgtaaaaattatcgccgattcaggagcggatcctttctttgtcgccgccgacaacaggtctcccgccgatattgcgtttgccaaaggtgaaatcggcatcaggtctgttttttcaggcaaagcgataagcgccaaagacagttccggcaataccattttacactacgccgccagattaggcggtcctgaaatgattaccattcttcttgaattaggagcaaacagaagcataaaaaacatcgcatcagaaagccccaatgatattgccgtaagatggaatcgtcgggataattccgatttattaaggtaa

SEQ ID NO: 29318 - protein, 221 aa, Unknown
  Obtained from environmental sample
  DOMAIN (69)...(102): Ankyrin repeat
  misc_feature (1)..(221): Xaa is any amino acid
MQKHRGRYSAAYRGRYGTDRHSKYLLKTGVSIHARNTRNRTPFQTALSISPKMVSALLENNRIFIPDDYGNSVLHVALLERTSDEIINVIVKQGARINAVDNNGKTPLRLALDMELWQAVKIIADSGADPFFVAADNRSPADIAFAKGEIGIRSVFSGKAISAKDSSGNTILHYAARLGGPEMITILLELGANRSIKNIASESPNDIAVRWNRRDNSDLLR

SEQ ID NO: 29319 - DNA, 624 bp, Unknown
  Obtained from environmental sample
  misc_feature (1)..(624): n is a, c, g, or t
ttgttttttttacggacttacagaagcgaatcggcggtaatctgggaggctgtgagtattatcgcaatagtgtggatttgtatttataattttattcttccaattaatcgtgaattaaaaaaaggcaaaaaattcttcgatatattggctaatacttattcggggaatctgttaattgccactttaatgatcggcataacctcaatatttgaccttattgattccgccgctctgcattactcgcttcatttaaccagttacagtattgttgtctttgcgttgtcaattacatttatgttattccggatgtccgtcataaaagacagagaacttaaagaaaaaagcgcgctgctggaaaagatggctaatcccgcgtccgcgcgtgaaaagatattcaattcgtacggtttatcggaacgtgaaaaagaagttgcccggctgatggcggaagggcttgacaataaggatatcgcggagcgtcttttcctatccagcagcaccatcgcgttttatgtaaccaatattttccgtaagttcggcattattgacggcaagaacaagggacgggcaatgtttttgactaaattgatcgggggagtatcttcaagccgtcaagataaataa

SEQ ID NO: 29320 - protein, 207 aa, Unknown
  Obtained from environmental sample
  DOMAIN (134)...(194): Bacterial regulatory proteins, luxR family
  misc_feature (1)..(207): Xaa is any amino acid
MFFLRTYRSESAVIWEAVSIIAIVWICIYNFILPINRELKKGKKFFDILANTYSGNLLIATLMIGITSIFDLIDSAALHYSLHLTSYSIVVFALSITFMLFRMSVIKDRELKEKSALLEKMANPASAREKIFNSYGLSEREKEVARLMAEGLDNKDIAERLFLSSSTIAFYVTNIFRKFGIIDGKNKGRAMFLTKLIGGVSSSRQDK

SEQ ID NO: 29321 - DNA, 474 bp, Unknown
  Obtained from environmental sample
  misc_feature (1)..(474): n is a, c, g, or t
atgtggatttcacccgaattcaagatttatctcataaaggaatttcaaagacttaaagagcatgagtataaacagcttggctgggacatccgccgtaatttgacaaaactcaactatcgaattcacacagacgctataaaattaaatttaattccaaaaacgattacaaaagagcaagcaagcttcaaatatgcagaagaagcggatatattgaatgtcgccttgtttggaatgacagcacttgattggcgaaaacaaaacccaaaactggacggaaacatacgtgattatgcggatattgcccaactggtctgccttgcaaaccttgaatccctgaacgctcacctcataaatgaaggaattacgcaagaaaagcgaattatagcgttaaataaaacagccatctcccaaatgaaaattcttaccacagaatacggtgtaaagaaactggaaagtaaatccataaaaaaataa

SEQ ID NO: 29322 - protein, 157 aa, Unknown
  Obtained from environmental sample
  misc_feature (1)..(157): Xaa is any amino acid
MWISPEFKIYLIKEFQRLKEHEYKQLGWDIRRNLTKLNYRIHTDAIKLNLIPKTITKEQASFKYAEEADILNVALFGMTALDWRKQNPKLDGNIRDYADIAQLVCLANLESLNAHLINEGITQEKRIIALNKTAISQMKILTTEYGVKKLESKSIKK

SEQ ID NO: 29323 - DNA, 372 bp, Unknown
  Obtained from environmental sample
  misc_feature (1)..(372): n is a, c, g, or t
gtgatatttgacatggcaaatacggctgaatttaaaggtttgaaaatggccatgggggaggaagtcatcaaaagttaccattgctcaacatccttcctcccacccagcgacggccatctcatcgtgacaaaccaacggataatatttttaggcgtccccagatggaaaattcagaaattcaagagcagggttgtgcaggaagtgcggatagactctgttttaggcgtggacgctttttttggaggcaagtttacattttggaaaaatcgtttgggcttaaccgcctttattcttggcatcgccttattcaaaaatgcaacgccttcccgggttttccgctttgattggggggcgtttttttatcaattatag

SEQ ID NO: 29324 - protein, 123 aa, Unknown
  Obtained from environmental sample
  misc_feature (1)..(123): Xaa is any amino acid
MIFDMANTAEFKGLKMAMGEEVIKSYHCSTSFLPPSDGHLIVTNQRIIFLGVPRWKIQKFKSRVVQEVRIDSVLGVDAFFGGKFTFWKNRLGLTAFILGIALFKNATPSRVFRFDWGAFFYQL

SEQ ID NO: 29325 - DNA, 1026 bp, Unknown
  Obtained from environmental sample
  misc_feature (1)..(1026): n is a, c, g, or t
atggccatgatgacaagcatgaccgatccgatgcgtaaagcgttgtctgaagcgatggatcagccgtcaaggattgccggatcgctagacacatcattcaggaacatacaggtcgccgctggcgcgacaaatgaagaaatggaagtgatgcggcgcgagcttctcgccattggaggccaagcgattggcgggccggaagcggtcgccagcgcattcgaggatgtggcgggaggcataagcgatgcttccaagcgcatggcagtgatgagcgcggcggtgtctctagcggaagcgaatcaggccgatcttgccatgtccaccaacgcaatggtcaacgtaatgaacgcatggaacctttccgcagatcaggccgccatagccgccgatgttttgacgcagacttctttaatgggcgtaggccgccttgatgattttgcagggagcatcagccatatatccgcccttgccgccggcgcgggaatcgggcttgacgagcttggcgcatcctttgcctacgttactaccaaaggcttggatgccgggcaagctcaaaaacagtttaaaggcattatttcgacccttttaagccctagcgaaaacttatcaaagctttatgcgtccctgggaatcgagtccggccaagccatgctccagcaatacggccttgcggaatcccttgtgatcctaaaaaacgctttgggaggcgatgagcaagcctttggaaacctcatcggttcggctgaagcggcgaccgtagcccttgcattgacagaggacgcttatgtcgattttgccggttcctttgccgacggcatgggaaaagtcacggaagcggcccgaagcgttcagcttgaatccatcgaagcgaaaatggcgcggcttgattccgcatccagatcgcttcangcgcaggtcggtcaggacatcaacggaatcaaaggcttttttatcgatatgaaattcggtttcttgtcgaatgtagtcagcccgattatgagttcccctgtaggcggcgcgattttctaa

SEQ ID NO: 29326 - protein, 341 aa, Unknown
  Obtained from environmental sample
  misc_feature (1)..(341): Xaa is any amino acid
MAMMTSMTDPMRKALSEAMDQPSRIAGSLDTSFRNIQVAAGATNEEMEVMRRELLAIGGQAIGGPEAVASAFEDVAGGISDASKRMAVMSAAVSLAEANQADLAMSTNAMVNVMNAWNLSADQAAIAADVLTQTSLMGVGRLDDFAGSISHISALAAGAGIGLDELGASFAYVTTKGLDAGQAQKQFKGIISTLLSPSENLSKLYASLGIESGQAMLQQYGLAESLVILKNALGGDEQAFGNLIGSAEAATVALALTEDAYVDFAGSFADGMGKVTEAARSVQLESIEAKMARLDSASRSLXAQVGQDINGIKGFFIDMKFGFLSNVVSPIMSSPVGGAIF

SEQ ID NO: 29327 - DNA, 726 bp, Unknown
  Obtained from environmental sample
  misc_feature (1)..(726): n is a, c, g, or t
atgtccctgccgccgcataaatggtcgcttgccgcttaccgcgcactgttgggcaataacggttttgtgaatgcgttcgcgaacagcctaaaagtttttgtgtttggagtcgcttcggctctgtttctcactattcctctcgcctatgtgctttccgtaaaaaccctgccgggcagaaaatttttaacagtgatggttcttattccttatttgtttaacgtaggcctgatccctacttatctggtggtaaaccgtcttgggctttccaatcatcttgccgcgatatttttacccgccgcaatcaatacctacaactgccttattatgcgcggtttttttgaagggattcctgaagaattaaaagagtccgccagaatagacggcgcgcccgagataacggttctgttacggatcattctgccgctttcaaagccaatcattatgacgataggcctgtactacggggtgcatttctggaatgatttttttaacgccatgctctacattaacaacaacgcgctccagcccctgcccatacttctgcgtaacattctgatggcaagcgggatgaatgaatttgttgaagtcagcgcgtttggcgaggctcctattcaggcgataaaagccgccagcgtttttttggctgcggttccgatgatcattgcatatccgtttattcaaaaatattttacaagaggaactctgctgggaagcgttaagggataa

SEQ ID NO: 29328 - protein, 241 aa, Unknown
  Obtained from environmental sample
  SIGNAL (1)...(27)
  DOMAIN (22)...(236): Binding-protein-dependent transport system inner membrane component
  misc_feature (1)..(241): Xaa is any amino acid
MSLPPHKWSLAAYRALLGNNGFVNAFANSLKVFVFGVASALFLTIPLAYVLSVKTLPGRKFLTVMVLIPYLFNVGLIPTYLVVNRLGLSNHLAAIFLPAAINTYNCLIMRGFFEGIPEELKESARIDGAPEITVLLRIILPLSKPIIMTIGLYYGVHFWNDFFNAMLYINNNALQPLPILLRNILMASGMNEFVEVSAFGEAPIQAIKAASVFLAAVPMIIAYPFIQKYFTRGTLLGSVKG

SEQ ID NO: 29329 - DNA, 492 bp, Unknown
  Obtained from environmental sample
  misc_feature (1)..(492): n is a, c, g, or t
gtgcgtaatggagtgtccaacctctttatgatgttcgaacctcttgtcggacggcgtgaagttatggtaactgaatggcgtactcaaaaagacttcgcccattgtctgcgatatttggctgatgagcggccggatgctgaaaaaatagttgtggtaatggacaaccttaacacccactcgctcgcttcattatacgccgcttttgaaccggggctggcgttgcgtcttgcacaacgattcgaaatccaccatacccccaaacacggttcgtggttgaacatggccgagctagaaatagggataataagccgacagtgccttggacggagaatagcgggtattgaaaagatggcgagcgaagtacaaacatgggtaaccgaacggaacaaccataaaaccaccgttcattggcagttcaccaccgcagatgcccgcattaactcaggcattttatccatgtttttaggttcaagactcttgtccgtgcgataa

SEQ ID NO: 29330 - protein, 163 aa, Unknown
  Obtained from environmental sample
  misc_feature (1)..(163): Xaa is any amino acid
MRNGVSNLFMMFEPLVGRREVMVTEWRTQKDFAHCLRYLADERPDAEKIVVVMDNLNTHSLASLYAAFEPGLALRLAQRFEIHHTPKHGSWLNMAELEIGIISRQCLGRRIAGIEKMASEVQTWVTERNNHKTTVHWQFTTADARINSGILSMFLGSRLLSVR

SEQ ID NO: 29331 - DNA, 318 bp, Unknown
  Obtained from environmental sample
  misc_feature (1)..(318): n is a, c, g, or t
gtggttttatggttgttccgttcggttacccatgtttgtacttcgctcgccatcttttcaatacccgctattctccgtccaaggcactgtcggcttattatccctatttctagctcggccatgttcaaccacgaaccgtgtttgggggtatggtggatttcgaatcgttgtgcaagacgcaacgccagccccggttcaaaagcggcgtataatgaagcgagcgagtgggtgttaaggttgtccattaccacaactattttttcagcatccggccgctcatcagccaaatatcgcagacaatgggcgaagtctttttga

SEQ ID NO: 29332 - protein, 105 aa, Unknown
  Obtained from environmental sample
  misc_feature (1)..(105): Xaa is any amino acid
MVLWLFRSVTHVCTSLAIFSIPAILRPRHCRLIIPISSSAMFNHEPCLGVWWISNRCARRNASPGSKAAYNEASEWVLRLSITTTIFSASGRSSAKYRRQWAKSF

SEQ ID NO: 29333 - DNA, 429 bp, Unknown
  Obtained from environmental sample
  misc_feature (1)..(429): n is a, c, g, or t
atgctcaaaccaaatatcaagtatcgggtaacattgaccgaggatgaacggaaaacattgcagaatctggttcgtactggaaatacagcgggcaaccggatacgccatgcacagatcctgcttgcgctggatgaaataccggagaacgaatcatggaccgatgaaaagataagcaaagcgtatgggtcacacatacgcacgataggaaacataaggaagcggttcgtggaggaaggcatgcaggccgcgctggaaagaaaagaaagggaaaacccgccgttctcaaaaatagacggggaagccgaagcgaacataatcgcccttacttgcagccagccgcctgaagggtactgccgatggacgctgaaattgctggcaaacaaggtgtggaacaagggattctggacagcatttccgaccatgggatag

SEQ ID NO: 29334 - protein, 142 aa, Unknown
  Obtained from environmental sample
  misc_feature (1)..(142): Xaa is any amino acid
MLKPNIKYRVTLTEDERKTLQNLVRTGNTAGNRIRHAQILLALDEIPENESWTDEKISKAYGSHIRTIGNIRKRFVEEGMQAALERKERENPPFSKIDGEAEANIIALTCSQPPEGYCRWTLKLLANKVWNKGFWTAFPTMG

SEQ ID NO: 29335 - DNA, 399 bp, Unknown
  Obtained from environmental sample
  misc_feature (1)..(399): n is a, c, g, or t
atgaacctgattattgatgtttccggtgcggcggaaatcctgttaaaaaaagaaaaatccaaaaagttcgacaaggttttacaagaagcaaaaattgtatttgcgcccgatatttatatttctgaattatccaatgttttttggaagtataccgttataaaaaattacaataagaacgactgtataaaatatatccatgacggtcttgattacatagatatatttatcgacagcagaactatttgggaagaagctttttccgaagcgattaacaacaaccattctgtttacgatatgttttacatggtagccgcaagaagacacgccggaacattggttacaaatgactcgacgctggcggcaatttgcaagaagaatcatgttcaggtttgttgttga

SEQ ID NO: 29336 - protein, 132 aa, Unknown
  Obtained from environmental sample
  misc_feature (1)..(132): Xaa is any amino acid
MNLIIDVSGAAEILLKKEKSKKFDKVLQEAKIVFAPDIYISELSNVFWKYTVIKNYNKNDCIKYIHDGLDYIDIFIDSRTIWEEAFSEAINNNHSVYDMFYMVAARRHAGTLVTNDSTLAAICKKNHVQVCC

SEQ ID NO: 29337 - DNA, 414 bp, Unknown
  Obtained from environmental sample
  misc_feature (1)..(414): n is a, c, g, or t
ttgccgggaccgccgttgagttttgtcggtctgctgcttatgcagttgagtgggtacggaggtttcaatccggaatttttatgggtgtgggcgggtataacggtgtttataaccgtcatggattattttcttccgtcattgttggcaaggcggttcggcggctcacgttccgccgcaatcggctcgtttgtcggtcttgtgataggcatattttttttccctccctggggaatgattgccggtacttttttaggcgcgttggcgggcgaactaatccacaaccgtgaaaataaagcgcaggcattaaaagccgcctggggtgccttactcgcctttattgtaggttcgggggccaaactgatcacaagctcaataatgttattctatgccattaaggcggttgttaaatcttaa

SEQ ID NO: 29338 - protein, 137 aa, Unknown
  Obtained from environmental sample
  DOMAIN (1)...(135): Protein of unknown function (DUF456)
  misc_feature (1)..(137): Xaa is any amino acid
MPGPPLSFVGLLLMQLSGYGGFNPEFLWVWAGITVFITVMDYFLPSLLARRFGGSRSAAIGSFVGLVIGIFFFPPWGMIAGTFLGALAGELIHNRENKAQALKAAWGALLAFIVGSGAKLITSSIMLFYAIKAVVKS

SEQ ID NO: 29339 - DNA, 690 bp, Unknown
  Obtained from environmental sample
  misc_feature (1)..(690): n is a, c, g, or t
ttgaatcaatggcggatgcgattggcaaggatttcgccgctcccgccggagtcgctcagaataaccaggctgtgccaaatacagttgatcccaacaccatgttcaagctgtcttatggtttattgtattacagcaagagacggcaacaaggacaacggttgtattatcaataccgtcatgcaaataacggtaactcccgtaaagataacaattggagtgaataaagccaattatacccacgacatgatactcaaaacgggaaaattcaatgtttccgtcttaagcgagggcgtgcctttccgtgtttttcagcaatttggatttcatagcggaaaagacaccgataaatttgccggcagcggagaattcctgcgtacgtcaaacggcatacgttatctgtcagaatggacaaacggcgtgatttccgcggaagtgaaagaaactgttgattgcggaacccatactctgtttatcgccgaggtaagccaggcattttcgctgtcgcgcgatccaagcgttacttatcaatattattttgataatataaagccgaagccacagccgcccaagggaaacaaaaagggatttgtctgcaagatttgcggatatgtgcatgaaggcgatactttgccggatgattttatttgcccgctgtgcaagcacggtgccgctgattttgagaggatttga

SEQ ID NO: 29340 - protein, 229 aa, Unknown
  Obtained from environmental sample
  DOMAIN (193)...(226): Rubredoxin
  misc_feature (1)..(229): Xaa is any amino acid
MNQWRMRLARISPLPPESLRITRLCQIQLIPTPCSSCLMVYCITARDGNKDNGCIINTVMQITVTPVKITIGVNKANYTHDMILKTGKFNVSVLSEGVPFRVFQQFGFHSGKDTDKFAGSGEFLRTSNGIRYLSEWTNGVISAEVKETVDCGTHTLFIAEVSQAFSLSRDPSVTYQYYFDNIKPKPQPPKGNKKGFVCKICGYVHEGDTLPDDFICPLCKHGAADFERI

SEQ ID NO: 29341 - DNA, 957 bp, Unknown
  Obtained from environmental sample
  misc_feature (1)..(957): n is a, c, g, or t
atggccccgatggtgcattggcccgaagtcatgatgacatacgattccacagcgaaaatacttttttccgcggacgcgtttggatgtttcggcgcgttgaacggcgctattttcgcggatgaagtggatttcgcgaaggattatatggacgaggcaaggcgctattattcaaatatagtcgggaaatacgggatacaggttgaatcggcgctgggcaaaacatccgccctcaatatagaaatgatatgcccccttcacggctttgtatggcgttcaaatttaagtgaaatcgtttcaaagtatatgctttggagcaagtacgagccggaagaacgcggcgttatgatcgcttacgcgtccgtttacggaaatacggaaaacgcggcggagattcttgcctgccgcctgcgcgacaaagggattaaaacagttatattcgatgtttcagttacgccggcctcagagatagtaagcgccgcgttcaaatggagccaccttgtattcgcgtccacaacctacaacgcgggaattttcgtaacaatggaagccctgattaatgatctcgccgcgcacaatattcaaaaccgaaaggttgccattatcgaaaacggttcatgggcgcccacaagcggcggcttgattcgtgaaatactgggcaaatgcgaaaaaattaacattcttgaaaataatgtcagcatactgtctggtttaaaaaaagcgcagcttacaaatattgaatcaatggcggatgcgattggcaaggatttcgccgctcccgccggagtcgctcagaataaccaggctgtgccaaatacagttgatcccaacaccatgttcaagctgtcttatggtttattgtattacagcaagagacggcaacaaggacaacggttgtattatcaataccgtcatgcaaataacggtaactcccgtaaagataacaattggagtgaataa

SEQ ID NO: 29342 - protein, 318 aa, Unknown
  Obtained from environmental sample
  misc_feature (1)..(318): Xaa is any amino acid
MAPMVHWPEVMMTYDSTAKILFSADAFGCFGALNGAIFADEVDFAKDYMDEARRYYSNIVGKYGIQVESALGKTSALNIEMICPLHGFVWRSNLSEIVSKYMLWSKYEPEERGVMIAYASVYGNTENAAEILACRLRDKGIKTVIFDVSVTPASEIVSAAFKWSHLVFASTTYNAGIFVTMEALINDLAAHNIQNRKVAIIENGSWAPTSGGLIREILGKCEKINILENNVSILSGLKKAQLTNIESMADAIGKDFAAPAGVAQNNQAVPNTVDPNTMFKLSYGLLYYSKRRQQGQRLYYQYRHANNGNSRKDNNWSE

SEQ ID NO: 29343 - DNA, 387 bp, Unknown
  Obtained from environmental sample
  misc_feature (1)..(387): n is a, c, g, or t
ttgacgcccgtattgatacgccccgaactccgccattcattttcatccggaattacgccgccttgggcgcggcccttcgcgccgcttgtgggcgcgttccagcatttccctgatatacgttcccgtataagaagcggtatcggcggctatttcttccggcgtaccggtcgccacaacctgcccgcctttgtcgccgccttccggccccaaatcaataatgtaatccgcctgcagcagcacatcgaggttatgttctatcattatcaccgtgtttccctgatccaccagccgctgaatcacatccatgagctgcttcacgtcggcaaagtgcaggccggttgtcggttcgtccaaaatatacagggtgctgccggtagaacgttttga

SEQ ID NO: 29344 - protein, 128 aa, Unknown
  Obtained from environmental sample
  misc_feature (1)..(128): Xaa is any amino acid
MTPVLIRPELRHSFSSGITPPWARPFAPLVGAFQHFPDIRSRIRSGIGGYFFRRTGRHNLPAFVAAFRPQINNVIRLQQHIEVMFYHYHRVSLIHQPLNHIHELLHVGKVQAGCRFVQNIQGAAGRTF

SEQ ID NO: 29345 - DNA, 432 bp, Unknown
  Obtained from environmental sample
  misc_feature (1)..(432): n is a, c, g, or t
gtgggactgggttatgtgaaactcggccagtccgcgctgaccctttccggcggcgaagcgcagcgggtaaaactggcgctggagctttcaaaacgttctaccggcagcaccctgtatattttggacgaaccgacaaccggcctgcactttgccgacgtgaagcagctcatggatgtgattcagcggctggtggatcagggaaacacggtgataatgatagaacataacctcgatgtgctgctgcaggcggattacattattgatttggggccggaaggcggcgacaaaggcgggcaggttgtggcgaccggtacgccggaagaaatagccgccgataccgcttcttatacgggaacgtatatcagggaaatgctggaacgcgcccacaagcggcgcgaagggccgcgcccaaggcggcgtaattccggatga

SEQ ID NO: 29346 - protein, 143 aa, Unknown
  Obtained from environmental sample
  DOMAIN (1)...(93): ABC transporter
  misc_feature (1)..(143): Xaa is any amino acid
MGLGYVKLGQSALTLSGGEAQRVKLALELSKRSTGSTLYILDEPTTGLHFADVKQLMDVIQRLVDQGNTVIMIEHNLDVLLQADYIIDLGPEGGDKGGQVVATGTPEEIAADTASYTGTYIREMLERAHKRREGPRPRRRNSG

SEQ ID NO: 29347 - DNA, 552 bp, Unknown
  Obtained from environmental sample
  misc_feature (1)..(552): n is a, c, g, or t
atgatatgttccacgcctgttccctcgccggctttctcggattttcttgacgcgaacccccagtggggtcctgatcaaagggaagcgcttgagagccgggggctggtaaccagtgaatatctagccgattatgaagcggggacgggcagggtgattaccggcatcaacgcggtatcatggtttgcggcgcgggctttttgcgagtggcttgaaacaaagctccccgattcgctttccggttacacagtacggatgcccactgaagcggaatgggaatacgcggtaaaatcaacagaaaagtggaaccagcaaggtttacttgtcaggggaagcgcctgggaatggtgcgggaatccctattcgcatctgccttttatttccgctcctcccgaagcgattgcagccgttggttcgcccgagtatccgctgaggggcggttctttgctgaacgccgtaacgccgggcaatcccgaaacaagggcatctctgccgccggaaagctgttcgccgtttgtttccttccgtcccgtgattgcccttaaaggccgctaa

SEQ ID NO: 29348 - protein, 183 aa, Unknown
  Obtained from environmental sample
  DOMAIN (8)...(178): Domain of unknown function (DUF323)
  misc_feature (1)..(183): Xaa is any amino acid
MICSTPVPSPAFSDFLDANPQWGPDQREALESRGLVTSEYLADYEAGTGRVITGINAVSWFAARAFCEWLETKLPDSLSGYTVRMPTEAEWEYAVKSTEKWNQQGLLVRGSAWEWCGNPYSHLPFISAPPEAIAAVGSPEYPLRGGSLLNAVTPGNPETRASLPPESCSPFVSFRPVIALKGR

SEQ ID NO: 29349 - DNA, 882 bp, Unknown
  Obtained from environmental sample
  misc_feature (1)..(882): n is a, c, g, or t
atggaaattccaataaactggaatgtatctgcggatgttaaattaacgcaatttttatatgttccacaggcattgactggcattgcaatggcaaaaaaaggcaaggaaatagatgcgttggttaagcaggaaattaaagagggcataatttacggaatatctatgcagtactggagcattgtttatatggaagaaaatttggaggttatgcaaaaatccaaggataatctgagcaaaacccgcgaggcaatagccgcgatggtggagcagggcatagtgaaaaaaggcgatttgaacacaatggacatcaacttggtggcacttggcacccaaatagacaacctcaaagttcaaattcaaacccaaaaagataatcttttgcaaactatgggtcgcccaataggtgaagacatatccctaaccgaccgccttagcgtggactccagagccgcaggtggcgaaagcggagaccctttgcaaagctccataacgttgaaaagaatggaacagatggttaggcttcaagaaatgcagattgacttgaccagggaaaaaatatatcccaatgttgtggcttttgcaagttacggtacacaggcttcaagggaaaactttgattttttcagcaagcctaaagacaaattcgcggataacggcacagttggaataaacataaccattccaatttttgacggaatgtccaacagtgcggagcgtacttacgcccgaattgagaaaaggcaggctgaaatagacagggaaaagcagaaaatagctttgcaggcagcttacgaaagcgcaaaatccaccctattcaacgcccaaaaaccttgtggaacgcaacaaaaaggacgcaaagccgggcaaaagaaaactacataa

SEQ ID NO: 29350 - protein, 293 aa, Unknown
  Obtained from environmental sample
  misc_feature (1)..(293): Xaa is any amino acid
MEIPINWNVSADVKLTQFLYVPQALTGIAMAKKGKEIDALVKQEIKEGIIYGISMQYWSIVYMEENLEVMQKSKDNLSKTREAIAAMVEQGIVKKGDLNTMDINLVALGTQIDNLKVQIQTQKDNLLQTMGRPIGEDISLTDRLSVDSRAAGGESGDPLQSSITLKRMEQMVRLQEMQIDLTREKIYPNVVAFASYGTQASRENFDFFSKPKDKFADNGTVGINITIPIFDGMSNSAERTYARIEKRQAEIDREKQKIALQAAYESAKSTLFNAQKPCGTQQKGRKAGQKKTT

SEQ ID NO: 29351 - DNA, 609 bp, Unknown
  Obtained from environmental sample
  misc_feature (1)..(609): n is a, c, g, or t
atgccgggtgatactgttaccgccgccaacgggcagccccttcgcaacagttttgaccttaagaaggtacttgaacaggaatcaggcgctcttgtccttgaatacgagcgtaacggtattatgcgacaggccgtgtttaacaccaaagattttgaggaagaaatcgggttttcctgggcgcaaattaattaccgtactccaaacttgtcttttcccgcggctgttttaaagggagcaaaagaaagcattaaaacccttaccctttcaataaagagccttaggcttctttttatgggaatcgatcttacacaagcggtttcaggtcctgtgcgtataacgtatttgatgggggatatggcggcaaaaggcgggttacgttcatttgtcgagcttatcgcgcttatttccattgccctgtgtatgatgaaccttctgcctttgcctattatcgacgggggcatgattcttcttttccttgtggaattaatacgcaaaaaaccggcgcacccaaaggcgatttctatttttcaaacatgcggtattgtaattattttttgtttaatgttcttcgctttatttggcgatataatgtattttgtaaggggatga

SEQ ID NO: 29352 - protein, 202 aa, Unknown
  Obtained from environmental sample
  DOMAIN (54)...(195): Peptidase family M50
  misc_feature (1)..(202): Xaa is any amino acid
MPGDTVTAANGQPLRNSFDLKKVLEQESGALVLEYERNGIMRQAVFNTKDFEEEIGFSWAQINYRTPNLSFPAAVLKGAKESIKTLTLSIKSLRLLFMGIDLTQAVSGPVRITYLMGDMAAKGGLRSFVELIALISIALCMMNLLPLPIIDGGMILLFLVELIRKKPAHPKAISIFQTCGIVIIFCLMFFALFGDIMYFVRG

SEQ ID NO: 29353 - DNA, 351 bp, Unknown
  Obtained from environmental sample
  misc_feature (1)..(351): n is a, c, g, or t
atggcttttgaggaagccgccgccattgtaaattcgggcgaaatgcccaaatgtccaaagtgcggcagggtgttaaagccggctatcaccttttacggcgaaagtctgccgatagaggcgttgaaggaagcgacggtacaggcgcataaagccgacctgatgctggtgctgggcaccacgctggtcgtttaccccgccgcctccatgcccgaatacaccctgcgctcgggcggccgcatagttatcgtgaacaacatgcccacccatctggacggccaggcgctaatgcactttgacgaattaggccccgtgttcgaggaactgcagaaggcaatgagcaatgagaaatga

SEQ ID NO: 29354 - protein, 116 aa, Unknown
  Obtained from environmental sample
  misc_feature (1)..(116): Xaa is any amino acid
MAFEEAAAIVNSGEMPKCPKCGRVLKPAITFYGESLPIEALKEATVQAHKADLMLVLGTTLVVYPAASMPEYTLRSGGRIVIVNNMPTHLDGQALMHFDELGPVFEELQKAMSNEK

SEQ ID NO: 29355 - DNA, 417 bp, Unknown
  Obtained from environmental sample
  misc_feature (1)..(417): n is a, c, g, or t
atgagtgttggtgaactgtacaaatggatttgcgaggccaagcatctcgtggcgttcaccggcgcgggggtcagcacgctttcaggtattcgtgattttcgcggcaagaacggaatcgcgaacggggaaacagtttttaacatagatatttttgaagaagatccttcggtttactatgacaacgcgcgttcattaatctataacattgacgaaaaagagccgtccgttgtgcatactgttctgggtgagcttgaaaaaaggggcatcctgaaagcggtgataacccagaacatcgatcttttgcaccagaggggcggaagctccaatgtgatgaagttcacggctcacccaggattcattactgccttcgctgtccgggtgtcaggatggcttttgaggaagccgccgccattgtaa

SEQ ID NO: 29356 - protein, 138 aa, Unknown
  Obtained from environmental sample
  DOMAIN (21)...(137): Sir2 family
  misc_feature (1)..(138): Xaa is any amino acid
MSVGELYKWICEAKHLVAFTGAGVSTLSGIRDFRGKNGIANGETVFNIDIFEEDPSVYYDNARSLIYNIDEKEPSVVHTVLGELEKRGILKAVITQNIDLLHQRGGSSNVMKFTAHPGFITAFAVRVSGWLLRKPPPL

SEQ ID NO: 29357 - DNA, 576 bp, Unknown
  Obtained from environmental sample
  misc_feature (1)..(576): n is a, c, g, or t
atgaacaagcttattgacgccttttggaaaaaattgggagaagaaaaaaaacacaaaacagaaagggatatcctgctccttattgataaagaaaagatggatggattatcacacacttttgacttctatcaaaatgaaataggcattacgtattatttggaaaattcatccgtagaagctctgtcgtattttgataacgcaatggcggttaactcctcaggcattggttcagacggccaatcttacaattataattattgtcttgcgctttgttacgaagaaactcctgaaagttggaataaagctttaagttatctggacaaggctctgatgattacgccggataaaccgcaatctttggcgttaaaaggaacttgtttatataaattgaacaaatataacgaggccattgcctgccttgatatggcgctgagcaagaaatacggtattttctcaaataaagaaaagaaagatgtttatgcggcaagggcgaaatgttacaccgcgttgggtatgaaggacaaagcggataaggacaacgcggaagcggaccgtttggcgaaacttcccgcttga

SEQ ID NO: 29358 - protein, 191 aa, Unknown
  Obtained from environmental sample
  misc_feature (1)..(191): Xaa is any amino acid
MNKLIDAFWKKLGEEKKHKTERDILLLIDKEKMDGLSHTFDFYQNEIGITYYLENSSVEALSYFDNAMAVNSSGIGSDGQSYNYNYCLALCYEETPESWNKALSYLDKALMITPDKPQSLALKGTCLYKLNKYNEAIACLDMALSKKYGIFSNKEKKDVYAARAKCYTALGMKDKADKDNAEADRLAKLPA

SEQ ID NO: 29359 - DNA, 993 bp, Unknown
  Obtained from environmental sample
  misc_feature (1)..(993): n is a, c, g, or t
atggatatagactttgcggttacatgggtcgacatgggcgatcccaagtggaaagaggagttcgtccggtacgccggcaagatcgacaactcgaaaaatgaggtctccgaggcgcgcttccgcgactacggcttcctgaaatattggttccgcggcgtggaaaagtttacgccgtgggtccgcaaaattcattttattacctgcgggcaaaaaccggagtggctgaacgtcaataatcctaaactttgccttgtcaagcatgaagactacattcccaagcaatttctgccctgcttcaactcgagttcgcttgaaatgcatttacacaaaatacctggtttgtcggagcgttttgtctatttcaacgatgacttttttgttataaataatgttgagcgagagcgttttttcagaaacggcctaccctgcgatatcgccgcgtttcgtatcaacgacgccatgtcgcagtggggtaagagaataaggaataatatgaggataataaatgtacattttaacaaaaaagacgttatgagccgcttccacgacaaatggttcgacaaaagctacgggataaaggcgcgttggaactatttgttaaagccatacggaaaatttgttaccttacgcactccgcataacgctcagccctacctgaagagcacctttgaggaagtttgggcggccgccccgaacgaactcttggagacttcgacgcatcgttttcgatccgtatccgatctgaccccggaactctttcgcacgtggcagatatgtaagggcaattttgagccgtacaatacatacggcgatacgaaaatgttcccgcttatcataaagcccaagcaggcggcggcggcggttagaaatcagtcgtacaagctcgtttgcctgaatgataatgtacacatacgcaattatgggcaagttatgaaaaacttacgggacgcgtttgagagtatcttgccggaacgttcgggctttgaaaaatag

SEQ ID NO: 29360 - protein, 330 aa, Unknown
  Obtained from environmental sample
  misc_feature (1)..(330): Xaa is any amino acid
MDIDFAVTWVDMGDPKWKEEFVRYAGKIDNSKNEVSEARFRDYGFLKYWFRGVEKFTPWVRKIHFITCGQKPEWLNVNNPKLCLVKHEDYIPKQFLPCFNSSSLEMHLHKIPGLSERFVYFNDDFFVINNVERERFFRNGLPCDIAAFRINDAMSQWGKRIRNNMRIINVHFNKKDVMSRFHDKWFDKSYGIKARWNYLLKPYGKFVTLRTPHNAQPYLKSTFEEVWAAAPNELLETSTHRFRSVSDLTPELFRTWQICKGNFEPYNTYGDTKMFPLIIKPKQAAAAVRNQSYKLVCLNDNVHIRNYGQVMKNLRDAFESILPERSGFEK

SEQ ID NO: 29361 - DNA, 594 bp, Unknown
  Obtained from environmental sample
  misc_feature (1)..(594): n is a, c, g, or t
atgaataaagcgttggcggaactgttggccgggttgatcccgcgtaagatgacgagaaatcggtggcgcggaattttgcgatacggccctattaacgcgataaaacttataaaatcgttaaaacgctccaaagcggcgcaaccgcgttattatcttgccgtttgcgccatagccaagaatgagggcgcctattttcaggagtggatagagtggcataagagcgtgggtgtggaaaaattctacatatatgacaacgatagttcggataacacgaaagagacccttgaaccgtacgtgaaatccgggctggttgaatacctcttttttccagggaaaaaacggcagcttgcggcgtacgacgattgccttgacaaacacagattggaggcgcgctggattgcggtcatagatttggatgaatttatagttccgctggaagacaaaacgatcgccgaatttctgaaacgttttgaggagttctcggcggtggagataaattggttgatatacggtagcggcggggcaagaaaaaaggaagcgggcggcgttatggagaggttaaacatcactccgctttgggcacgtttcaaatag

SEQ ID NO: 29362 - protein, 197 aa, Unknown
  Obtained from environmental sample
  DOMAIN (50)...(192): Domain of unknown function
  misc_feature (1)..(197): Xaa is any amino acid
MNKALAELLAGLIPRKMTRNRWRGILRYGPINAIKLIKSLKRSKAAQPRYYLAVCAIAKNEGAYFQEWIEWHKSVGVEKFYIYDNDSSDNTKETLEPYVKSGLVEYLFFPGKKRQLAAYDDCLDKHRLEARWIAVIDLDEFIVPLEDKTIAEFLKRFEEFSAVEINWLIYGSGGARKKEAGGVMERLNITPLWARFK

SEQ ID NO: 29363 - DNA, 768 bp, Unknown
  Obtained from environmental sample
  misc_feature (1)..(768): n is a, c, g, or t
atggatattaccattattgagggaattgaagagaaccgcctggtgtatctggcggtacgccatgccctgaaaaacagtcatccccatttttggcattacaactcaatgatccttgatgtggggggcggttcaacggaaattatgctgctccgccggggcaaaatggtggctgcccgcagccttaggctgggaacgatccttattgatcaaaaagtccgtcagggcacgggttccgaccggtttattgaacgttacctttatgaaaatgtacataacgcccaggatattctcaacgaagaaatggatctttccaatatcaggtctttggccgccgccggttcggatgtccgtcaggcatcccgccacatcggtaaagacctgaacgaaaactgcagtatcatcaacagggacgatttttttgattttgtcaaaacggtggagaattattccgtggaagattgtgtccggcttctgggaattccttttgtcgacgccgaaggttttgttcccggacttcttatataccggacctttatggaacggctggctgcggaagaactgatcgtgccggatgtgtctgtcagggaaggttacctgataggaatgatccggggggtggaacgggaactgcaggatgatttttattcccagatcgtcgcctccgcccttagtctggggcggaagtatcattttgacgaaacccacagccgtcatgtaatggaattgagctttgccctttttgacgccctggaaaagaacacggcatga

SEQ ID NO: 29364 - protein, 255 aa, Unknown
  Obtained from environmental sample
  misc_feature (1)..(255): Xaa is any amino acid
MDITIIEGIEENRLVYLAVRHALKNSHPHFWHYNSMILDVGGGSTEIMLLRRGKMVAARSLRLGTILIDQKVRQGTGSDRFIERYLYENVHNAQDILNEEMDLSNIRSLAAAGSDVRQASRHIGKDLNENCSIINRDDFFDFVKTVENYSVEDCVRLLGIPFVDAEGFVPGLLIYRTFMERLAAEELIVPDVSVREGYLIGMIRGVERELQDDFYSQIVASALSLGRKYHFDETHSRHVMELSFALFDALEKNTA

SEQ ID NO: 29365 - DNA, 456 bp, Unknown
  Obtained from environmental sample
  misc_feature (1)..(456): n is a, c, g, or t
atgcctgattatagcaatatacaaaaagaagaaaccttaaaagctgaagtttttcaggattatttcggttcttcaaaattcttatataggccaaatatagataacattgattttgttgtaatggataaaacaggccgccatgttctatgggcagaaacaaaaagaagcgcaactggaattgttgagatgtttgttcaactgattttgacaatcggaaaagcaagaacatttgataaaaatatgccccctcaatttcttgcggtttttgacaatgtaaaatttgcttttcttccttacagcgcagtttatgagattttttttcaaaatgactttaactggaatataacgccaagtaattatgaaacaaaagaatttatacaaataaaaaaccttgtcgaaagcacagtaaataagaaaaaattgatttttcttatgctactgaaagcgccatattga

SEQ ID NO: 29366 - protein, 151 aa, Unknown
  Obtained from environmental sample
  misc_feature (1)..(151): Xaa is any amino acid
MPDYSNIQKEETLKAEVFQDYFGSSKFLYRPNIDNIDFVVMDKTGRHVLWAETKRSATGIVEMFVQLILTIGKARTFDKNMPPQFLAVFDNVKFAFLPYSAVYEIFFQNDFNWNITPSNYETKEFIQIKNLVESTVNKKKLIFLMLLKAPY

SEQ ID NO: 29367 - DNA, 672 bp, Unknown
  Obtained from environmental sample
  misc_feature (1)..(672): n is a, c, g, or t
atggtgtttgtaaaaggcgggacgtttaaaatgggctttgccggtgagcgcgaaaacgattacgactgtgacgacgaatgcaaagatcgggcgcataacgtgacggtcggcgatttttatatcggcaagtacgcggtaacgcagaaacagtggcttcaggtgatggacggcaatccgtccggaggcgttgagggggatgattatccggtcaacaatataagttggcatgacgcgcaagagtttattgagcgattgaacgcggcgacgggaaagaagtaccgcttgcttacggaagcggagtgggagtacgccgcccgcggcggcgcggagagcaaggggtacgaatactccggcggcgataatcccgacgacgtcgcgttgcacgacggcaacagcggcggcggctctcatcccgtggggtctaaggcgccgaacgaactggggatatacgacatgagcggcaacgtgtgggagtgggtgagcgattggttcggtgattacgatagaggcgatcaggttaatccgacaggtccgcagacgggtgaattccgtgtggggcgcggcgcgtattggggtttaatcgcggaggattgcaaagtgtaccagcgcggctactaccccccgggcggcagctgctacgacaccggtttccgcctcgcgctgccgaagtag

SEQ ID NO: 29368 - protein, 223 aa, Unknown
  Obtained from environmental sample
  DOMAIN (1)...(221): Domain of unknown function (DUF323)
  misc_feature (1)..(223): Xaa is any amino acid
MVFVKGGTFKMGFAGERENDYDCDDECKDRAHNVTVGDFYIGKYAVTQKQWLQVMDGNPSGGVEGDDYPVNNISWHDAQEFIERLNAATGKKYRLLTEAEWEYAARGGAESKGYEYSGGDNPDDVALHDGNSGGGSHPVGSKAPNELGIYDMSGNVWEWVSDWFGDYDRGDQVNPTGPQTGEFRVGRGAYWGLIAEDCKVYQRGYYPPGGSCYDTGFRLALPK

SEQ ID NO: 29369 - DNA, 1266 bp, Unknown
  Obtained from environmental sample
  misc_feature (1)..(1266): n is a, c, g, or t
atggtcagaatcggccgagggatccattgcgggaaatacgggcggttgtatgattgggagacggcgaaaaccgtctgcccagccggctggcacctctccaccggcgaggaatgggacaggatgttgaccgctataggcagtaagaaaggcgggagaatggggcatgattggttaggcgcgggcgcgaagctgaaaacgaagagcggttgggatatggataaagacgataaaaaaagcggcgacggcacggacgattacggtttttcggcattgccgggcggcgagcgttacggcggcggcgaattcggggaactgggcagtcgaggcgtttggtggaccgccagagagaataacggttcaagcgcgtataggcgcgaaatctcaaactacggcgacgatgtgtttgacggcacgagtttcaaggaaggcgggtattccgtgaggtgcgtcagcgacgacggtgaaattgtcaaggccggagaacgcggcgcgttctcgcttgcgttgaccgccggaagcggcggtacggcgtccgccgttccgcgcaaggataactacgttgtcggcgagagggttacgctcaccgccgcccccgacgacgggtacgtcttcgccggttggacgggcgcacgcgttacggattccgcctcgttggttaccaccgctaccgtacgctcggacatggccgtcgctgcgaatttccggcgcatcgattacggaaaactcaaagacgagagagacgggaagacgtaccgcacggttaaaatcggacggtggacgtggatggcggagaacctgaactacaagcccgaaggatcggcgggcgaatcaggatgccttgacggcaaagagagcaactgcgcgaagtacggacggttgtatgattggcttacggctacggaggcctgcccgtcaggttggtatctgccatcgtttaacgattggaacaagctggctatttgcgttggggggcctgatgtggccggcaggaagctgaaagcggcaaaaggctgggcgggggaggccggttatcgcggcacaggtacggacgagtacggtttctcggccctgcccggcggcggcgaacccaacagcttcgagaatgacgacattttcggcgcgtggtggacgaccacgaagatgtacgatgtcgcccctgtaaacgctcggatcacgctccataaagacgagttgagcgggcttgccgccgagaagagcgatatgtgttcggtgaggtgcgtcatggacgagaagtctgagcgctga

SEQ ID NO: 29370 - protein, 421 aa, Unknown
  Obtained from environmental sample
  misc_feature (1)..(421): Xaa is any amino acid
MVRIGRGIHCGKYGRLYDWETAKTVCPAGWHLSTGEEWDRMLTAIGSKKGGRMGHDWLGAGAKLKTKSGWDMDKDDKKSGDGTDDYGFSALPGGERYGGGEFGELGSRGVWWTARENNGSSAYRREISNYGDDVFDGTSFKEGGYSVRCVSDDGEIVKAGERGAFSLALTAGSGGTASAVPRKDNYVVGERVTLTAAPDDGYVFAGWTGARVTDSASLVTTATVRSDMAVAANFRRIDYGKLKDERDGKTYRTVKIGRWTWMAENLNYKPEGSAGESGCLDGKESNCAKYGRLYDWLTATEACPSGWYLPSFNDWNKLAICVGGPDVAGRKLKAAKGWAGEAGYRGTGTDEYGFSALPGGGEPNSFENDDIFGAWWTTTKMYDVAPVNARITLHKDELSGLAAEKSDMCSVRCVMDEKSER

SEQ ID NO: 29371 - DNA, 405 bp, Unknown
  Obtained from environmental sample
  misc_feature (1)..(405): n is a, c, g, or t
atggccgagatcggcagactgtacgactgggagacagcgaaaacagtttgccctgtcggatggaagttaccggacacgtcggattggaaaaagttggtaacggctgtgggcggaaaagaaactgtgggtaagaaattgaaagcggcaaacggttggaatgacggcgaggacggcaaaaacggcaacggaacgaatgatttcggtttttccgccttgcccggcggctaccggatgccgcttggcgatttcgacaatatcggcgacaacggctactggtggttggcttcggaactcgataacggttacgcctatgtcgagttcgctgattacattaaaggtgcgtacagtgtcatggccagccaagaacttggcttatccgtccgttgcgtcgccgacaacccatga

SEQ ID NO: 29372 - protein, 134 aa, Unknown
  Obtained from environmental sample
  misc_feature (1)..(134): Xaa is any amino acid
MAEIGRLYDWETAKTVCPVGWKLPDTSDWKKLVTAVGGKETVGKKLKAANGWNDGEDGKNGNGTNDFGFSALPGGYRMPLGDFDNIGDNGYWWLASELDNGYAYVEFADYIKGAYSVMASQELGLSVRCVADNP

SEQ ID NO: 29373 - DNA, 489 bp, Unknown
  Obtained from environmental sample
  misc_feature (1)..(489): n is a, c, g, or t
atgaaccatatcttggaaaaactcaccacgaaaaagaaacgtcttgccataggacttatgagcggcacatcccttgacggcatggatgcggccctggtggagatagaaggggccggcctctcaataagcgtaaaattcctggattttcttacgctgccttacaatgatgaactccattcaattctgatgaaggcggtgatgggggaagaaggcgggagccgcctaatatgctgtctcaactttcttatgggacacattgcggccaaagcgtgccttgagctttgcaggaaagccggaataagacctgcgatgattgattttgccgggagccacgggcagactgtctttcaccaaaacgagccggtttcttttggtggcaagccgattcgcggaaccctgcaaataggcgaggcgtcggtaatcgccgaagaaattggctgtccggtcgtaagcgatttccgggtcagtgatatggctcggccaatctga

SEQ ID NO: 29374 - protein, 162 aa, Unknown
  Obtained from environmental sample
  misc_feature (1)..(162): Xaa is any amino acid
MNHILEKLTTKKKRLAIGLMSGTSLDGMDAALVEIEGAGLSISVKFLDFLTLPYNDELHSILMKAVMGEEGGSRLICCLNFLMGHIAAKACLELCRKAGIRPAMIDFAGSHGQTVFHQNEPVSFGGKPIRGTLQIGEASVIAEEIGCPVVSDFRVSDMARPI

SEQ ID NO: 29375 - DNA, 429 bp, Unknown
  Obtained from environmental sample
  misc_feature (1)..(429): n is a, c, g, or t
atgaatccgtcttttattatcgccgatgagccgatttccgcgctggacgtgtccatacgcgctcaggtgttaaatctgttggctaaactgcaaaaggaacatcatctgacgattctgttcatttctcacgatttgtctgttatgcggtttattacggatcgtatagccgttttacacaagggcgtgctggtcgagctggcggaaaccgaaaaactgtttgccaatccgctgcatccttatacaagggctctgcttgctgccgtgccgctgccaaatcccactaaagaaaagaaaaaaactttgacggtatatgatccatcctgccacgattattccctggacaaaccgttttggaatgaaattgagagcgggcattttgtttacgggaacaaaaaagagatggaagaatacggaagaaaccttttatga

SEQ ID NO: 29376 - protein, 142 aa, Unknown
  Obtained from environmental sample
  DOMAIN (64)...(116): Oligopeptide/dipeptide transporter, C-terminal region
  misc_feature (1)..(142): Xaa is any amino acid
MNPSFIIADEPISALDVSIRAQVLNLLAKLQKEHHLTILFISHDLSVMRFITDRIAVLHKGVLVELAETEKLFANPLHPYTRALLAAVPLPNPTKEKKKTLTVYDPSCHDYSLDKPFWNEIESGHFVYGNKKEMEEYGRNLL

SEQ ID NO: 29377 - DNA, 1029 bp, Unknown
  Obtained from environmental sample
  misc_feature (1)..(1029): n is a, c, g, or t
atgggaagcggccttctggatgaacgttttcccgaatggggaaacagttgctacgtgaatttgaccatcagcggaaagataaagttgcaggagcttctgcggcatatctatgtactgattccggttttcgattaccgcaagcattactggattggcaacgaagaagttgacaaactgcttgcccacggctctggctggctggaaaaccatccggaaaaaaattttattacgcggcgatatttcagcaagctgggccatttcacaaggcaggccctggaacgcctgaaccgtctggacaacggcgaaggcggtgcggaaaatccggcaatagaggaagagcaggaagcagaagcggccacaccaataaaagcaccccgcatcaacgatcaacgcctgcatgcggtattgggcgaattgaaagcaagcggcgcgaaatcggtaattgacatgggctgcggcgaaggcaatttgttgcggcttctaataaaggaaaaggaccttgccgctatcgcgggaacggatgtatctgccgccgtgctgaaccgggccgcagaaaggcttgggcttgatcgacttggagagaaacaaaaaaaccgcatcgtcctgtttcaaagctcgcttttttgcagggataagcgtttcaaaaattacgatgccgccgcaatagtggaagtaattgaacatctggatgtaaaccgcctctcttcttttgcatcggttgttttcggcgatgcggcattttccattgttatcatcaccacgcccaatgccgactacaacgtanactatcagtggcttaaggccggtaattttcgtcacggcgaccaccgctttgaatggaaccgggcccaattccacgcatgggcagatgccgtcgccgtccgctacggttactctgttcgctatgaggacataggcgaacaggacgaagagtatagaacgccgagtcaaatggccgttttcaaaaaaaacattccccaaaagataactccttctgagcgggacgcggcaaccggggcctcctcatga

SEQ ID NO: 29378 - protein, 342 aa, Unknown
  Obtained from environmental sample
  DOMAIN (148)...(259): Methyltransferase domain
  misc_feature (1)..(342): Xaa is any amino acid
MGSGLLDERFPEWGNSCYVNLTISGKIKLQELLRHIYVLIPVFDYRKHYWIGNEEVDKLLAHGSGWLENHPEKNFITRRYFSKLGHFTRQALERLNRLDNGEGGAENPAIEEEQEAEAATPIKAPRINDQRLHAVLGELKASGAKSVIDMGCGEGNLLRLLIKEKDLAAIAGTDVSAAVLNRAAERLGLDRLGEKQKNRIVLFQSSLFCRDKRFKNYDAAAIVEVIEHLDVNRLSSFASVVFGDAAFSIVIITTPNADYNVXYQWLKAGNFRHGDHRFEWNRAQFHAWADAVAVRYGYSVRYEDIGEQDEEYRTPSQMAVFKKNIPQKITPSERDAATGASS

SEQ ID NO: 29379 - DNA, 417 bp, Unknown
  Obtained from environmental sample
  misc_feature (1)..(417): n is a, c, g, or t
atgcgtactcttctcttttcgagcatggcgacattaaagtacggcatagatattcttacggaaaaagaaaaagcgaagatagacagtctgttggggcacggcggcttgtttaagatcaaaggcataggacagcgatttatggcggcggtctttaacgctcctgtttctgtaatggaatccgcaggagaaggcggcgcgtgggggattgcccttcttgcctcatttataaatcaacaaggcgaaactttggaaaaatttcttgcggaaaaagttttcgccggaaagacaggaacaaaaattgaacctgatccgaaagacgtggaaagttttagaaaattcatggaacgttataccgccggtctcaaaattgaaagagccgcggttgaaaatttgaaaaggagtgattatgaatcttaa

SEQ ID NO: 29380 - protein, 138 aa, Unknown
  Obtained from environmental sample
  misc_feature (1)..(138): Xaa is any amino acid
MRTLLFSSMATLKYGIDILTEKEKAKIDSLLGHGGLFKIKGIGQRFMAAVFNAPVSVMESAGEGGAWGIALLASFINQQGETLEKFLAEKVFAGKTGTKIEPDPKDVESFRKFMERYTAGLKIERAAVENLKRSDYES

SEQ ID NO: 29381 - DNA, 780 bp, Unknown
  Obtained from environmental sample
  misc_feature (1)..(780): n is a, c, g, or t
gtgattatgaatcttaaaaaatatgaatactggtttatcgtaggaagccaagacctttacggaaatgaaacgcttaaacaagtcgccgatcatgcccgtattatgacggatgaattcaacaaggacacattgctttcaggcgctgtagtattgaaacctacggcgataacgccgcaggcgatacgaagtctttttgaggaagcgaacgcatcaaacaactgcgccggtatcataacatggatgcatacattctcgccttcaaaaatgtggatacaggggcttgctatcaaccgcaaaccgcttctgcatctccatactcaatttaatcgggatattccgtggtcttcaatcgatatggattttatgaacctgaaccaatcggcgcacggcgaccgcgagcacggttatattcatacaaggatgcggcttcctcgcaaagtagttgccggtttctggcaggataaagaaattcgccgccgaatagacgtgtggatgagagcagctgccgcgagaaaagacggaatggattctacagttatgcggttgggagacaatatgcgtgaagtggcggtaaccgaaggcgacaaagttgaagcgcaaatcaagttcggctggcaggtgaacacatggggtataggcgaccttgccgcacgttacgcaaaaataagcggcgcgcaggcggaaaaacttgcggaagaatacgcagcgaaatacgatcttacgcctgatcttaaacagagcggcaaggcgagagacgcaatgctgaacaggcaaaaatag

SEQ ID NO: 29382 - protein, 259 aa, Unknown
  Obtained from environmental sample
  DOMAIN (2)...(259): L-arabinose isomerase
  misc_feature (1)..(259): Xaa is any amino acid
MIMNLKKYEYWFIVGSQDLYGNETLKQVADHARIMTDEFNKDTLLSGAVVLKPTAITPQAIRSLFEEANASNNCAGIITWMHTFSPSKMWIQGLAINRKPLLHLHTQFNRDIPWSSIDMDFMNLNQSAHGDREHGYIHTRMRLPRKVVAGFWQDKEIRRRIDVWMRAAAARKDGMDSTVMRLGDNMREVAVTEGDKVEAQIKFGWQVNTWGIGDLAARYAKISGAQAEKLAEEYAAKYDLTPDLKQSGKARDAMLNRQK

SEQ ID NO: 29383 - DNA, 1011 bp, Unknown
  Obtained from environmental sample
  misc_feature (1)..(1011): n is a, c, g, or t
ttgggcaaccagcgccttttggggctggactactatttcggcggacatctgacgcacggttaccgcaataatctttctgggcgaatgtttgacattcacagttattccgtttccgaaaaagacggcntgctggactacgaccaaatcgaaaaacaggcgtgcgaagtgcgcccgcttattctgctgacgggctattcggcgtacccgaggaaaataaactttaaaaggatgagggaaatcgcggacaaggcaggcgctgtatttatggttgacatggcgcactttgccggtcttgtggcgggaaaagtttttacaggcgagtacgaccctgtgccttgggcgcatgttgttaccagcaccactcataaaaccctgcgagggccgcgctcgggaattgttctttcaaaaagcgaatttgccgaagcgctggacaagggttgtccgcttacaatgggcggcccgctgccccatgtgatagcggcaaaagcaatcgctctccgtgaagcggcttcccccgaatttaaacagtacgcgcaaaagattgtaaataactgtcaggcgcttgccgcttcctgtattaagaacgggcttgaagtgctgacaggcggaacggacaatcacttattattgattaatattcacaaagcgggtcttacgggcaggcaggcggaaagcgcattgcaggattgcaacataaccgttaaccgcaacagccttccccgcgacccgaacggcccttggtacacgtccggtttaaggataggcactgccgctgttaccagcctaggcatgggggaagccgaaatggaagaaataggcgcgttaattgcggatgtaacaaaagcgacaactcagtcgccggacaataaagaaccgtccaagaacagcaaggcaaagtacagcattgacgcaggcgcaaagagcgaagttataggcagggtgaaaagtcttatggataggtttcctgtgtatcccgagcttgatttggagttactgaagaaagctttttag

SEQ ID NO: 29384 - protein, 336 aa, Unknown
  Obtained from environmental sample
  DOMAIN (2)...(276): Serine hydroxymethyltransferase
  misc_feature (1)..(336): Xaa is any amino acid
MGNQRLLGLDYYFGGHLTHGYRNNLSGRMFDIHSYSVSEKDGXLDYDQIEKQACEVRPLILLTGYSAYPRKINFKRMREIADKAGAVFMVDMAHFAGLVAGKVFTGEYDPVPWAHVVTSTTHKTLRGPRSGIVLSKSEFAEALDKGCPLTMGGPLPHVIAAKAIALREAASPEFKQYAQKIVNNCQALAASCIKNGLEVLTGGTDNHLLLINIHKAGLTGRQAESALQDCNITVNRNSLPRDPNGPWYTSGLRIGTAAVTSLGMGEAEMEEIGALIADVTKATTQSPDNKEPSKNSKAKYSIDAGAKSEVIGRVKSLMDRFPVYPELDLELLKKAF

SEQ ID NO: 29385 - DNA, 915 bp, Unknown
  Obtained from environmental sample
  misc_feature (1)..(915): n is a, c, g, or t
atggaatttatcgggccgtttgcgtttaacggaattcgttttatattggggagcatttctttgctcccttttatttttttcaggcggtttcattctgttcacgtaaccgcttctccgcgttatctgattttaccttctcttgctgcgggtatttgcctctttttagctgtcatgcttcaacagtttgggattatgtttacaactgcgggaaatgcgggttttataacgggtctttatgtcgtattgacgccgtttttcggtatctttctggggagaaaaaccggttatgcgacatggataggctctgttcttacattatgcggcctttattttatcagcgccgcaggccgtccttcaataaatcccggcgacattatcgtcattatcagcgcttttttttgggcttttcacgtgcttttgattgacagatttatacattctgacgcaaagcataatgtttcgcaggaaactacagttgatccgctggagctttctttcggtcaatttgccgtatgcggcgtttttacgttgttaggctcttttttaattgaaccccatgtaattaccgcagtagaacggattaatgcttctttgcttaatgaaggtcttttttcatggctgcctctgccggatttaattacagaagttaaacatgggactgtcatgtttcccgtaggagcgctgattcctgttctttacggcggtctgggctcggtagggattgcatatactcttcaggttatagcccaacgtgatgcgccgcccgctcacgcgaccattatcctctgttttgaaggctgttttgccgctcttggcggcgtgctgcttctttcggaaaaaatagagtatggacgctgttgggttttattttatgtttgccggaatgctggctactcaatgggaagttatcgctaa

SEQ ID NO: 29386 - protein, 304 aa, Unknown
  Obtained from environmental sample
  DOMAIN (1)...(114): Integral membrane protein DUF6
  misc_feature (1)..(304): Xaa is any amino acid
MEFIGPFAFNGIRFILGSISLLPFIFFRRFHSVHVTASPRYLILPSLAAGICLFLAVMLQQFGIMFTTAGNAGFITGLYVVLTPFFGIFLGRKTGYATWIGSVLTLCGLYFISAAGRPSINPGDIIVIISAFFWAFHVLLIDRFIHSDAKHNVSQETTVDPLELSFGQFAVCGVFTLLGSFLIEPHVITAVERINASLLNEGLFSWLPLPDLITEVKHGTVMFPVGALIPVLYGGLGSVGIAYTLQVIAQRDAPPAHATIILCFEGCFAALGGVLLLSEKIEYGRCWVLFYVCRNAGYSMGSYR

SEQ ID NO: 29387 - DNA, 813 bp, Unknown
  Obtained from environmental sample
  misc_feature (1)..(813): n is a, c, g, or t
atgagtaggataaaaaacgcttttcaaagcggaaaagcctttatcggttttgttacaggcggagatccaagtatcgaaaaaacaaaagaatttgttatggaaatgatcagagccggagcagaccttatagaaatcggtattcctttttcagatccaatcgccgaaggaccggtaattcaggaagcaaataaccgcgctctcgccgccggcgcaacaatagaaaaattatttacgcttgttgaggagcttcggaaagaaacaaataccccgcttgtttttctgacatacattaaccctgtttttcattatggtctgaccactagcaaatctaatggtcagacaagttatgatgctttctttaaacgctgcaacaatgtcgggttagacggcataattattcccgaccttccttttgaagaacaaacgcctgtgcgtgaagcggcaggcaaacacaatattgaccttatttccctgatcgctccgacttcagaagctcgaataaaggaaatcgcaaaaaacgcatcgggctttatttatcttgtatcctcaatgggcgttaccggtattcgcagtgagataaataccgatctctcttcaataaccgcagctataagatcagtcacgcatattccggtcgccataggtttcggcattcactcgccgcagcaggcggaacagatggcaaaaatagcggacggcgttattgtaggaagcgcaattgtaaaaatagccgctgaacacggaacgcaggcgggacccaatatttaccgttatgtgaaagaaatgaaagaagccgtcattcgcggctcttag

SEQ ID NO: 29388 - protein, 270 aa, Unknown
  Obtained from environmental sample
  DOMAIN (8)...(267): Tryptophan synthase alpha chain
  misc_feature (1)..(270): Xaa is any amino acid
MSRIKNAFQSGKAFIGFVTGGDPSIEKTKEFVMEMIRAGADLIEIGIPFSDPIAEGPVIQEANNRALAAGATIEKLFTLVEELRKETNTPLVFLTYINPVFHYGLTTSKSNGQTSYDAFFKRCNNVGLDGIIIPDLPFEEQTPVREAAGKHNIDLISLIAPTSEARIKEIAKNASGFIYLVSSMGVTGIRSEINTDLSSITAAIRSVTHIPVAIGFGIHSPQQAEQMAKIADGVIVGSAIVKIAAEHGTQAGPNIYRYVKEMKEAVIRGS

SEQ ID NO: 29389 - DNA, 729 bp, Unknown
  Obtained from environmental sample
  misc_feature (1)..(729): n is a, c, g, or t
gtgctgggactgcctacaggctcaagccctctgggagtatacagggaactaatcgcggccaataagaagggaaaggtttcattctccaatgtgattaccttcaatatggacgagtatcttgggctttctatcgatcatcctcagagttacaaacgctttatgaaggacaatttttttgacgcgattgatattaagtgcgagaacatccacatccttgacggtatggcgacggatccagaagcggaatgtcgcgcttacgaggaagccataaaagccgccggagggatcgagcttttcctgggcgggataggcaacaacgggcatattgcttttaacgagccaggctcttctcttaaatccagaaccagaattgtaaagcttaccgatgatacccgcagagccaacgcccgttttttcgacgatgattccgcgaaagtaccaagctacgctcttactgtaggcataggaaccgtcatggacgcaagggaggtgcttatcattgtgtcggggcgacaaaaagcacgcgcactccaggctgccgtcgaaggggcggtcagccagtggtgtcccctttcctgcctgcaaatgcatgagaaggcaatcatcgtctgtgatgaggaagcggcggaagaattgaagtacggcactgtcaaatttttcagggatattgaaaggtatgaaatcaagcttcaggatcgaccagcggaagattggacggcacaaaactga

SEQ ID NO: 29390 - protein, 242 aa, Unknown
  Obtained from environmental sample
  DOMAIN (1)...(218): Glucosamine-6-phosphate isomerases/6-phosphogluconolactonase
  misc_feature (1)..(242): Xaa is any amino acid
MLGLPTGSSPLGVYRELIAANKKGKVSFSNVITFNMDEYLGLSIDHPQSYKRFMKDNFFDAIDIKCENIHILDGMATDPEAECRAYEEAIKAAGGIELFLGGIGNNGHIAFNEPGSSLKSRTRIVKLTDDTRRANARFFDDDSAKVPSYALTVGIGTVMDAREVLIIVSGRQKARALQAAVEGAVSQWCPLSCLQMHEKAIIVCDEEAAEELKYGTVKFFRDIERYEIKLQDRPAEDWTAQN
